United States Patent Application Publication US 2008/0050393 A1 - sequence listing, part 42

SEQ ID NO: 139073 - DNA, 1241 bp, Homo sapiens
aggatcacctgcagaatgaatttgctggaaatatttctgcgctggctgatgcggaaaatatttcacgtaagattattacccgctgtatcaacaccgccaaattgcctaaatcagttgttgctcttttttctcaccccggtgaactatctgcccggtcaggtgatgcacttcaaaaagcctttacagataaagaggaattacttaagcagcaggcatctaaccttcatgagcagaaaaaagctgggggacaccaaattgagcaactatccgcacaaaagagcaccttcttcagaaccggaaatcaggtgattcgctttgtggagtggcatcttctataccgcttcttttcttctttgaccctgcggtattcacttccgggcgttataaagccggaatcgtgtccttcgagtggccgccgccgctttgggcctctcgaccttgccgtatcgtattttggcgcggatttgggaattctgtttcggcagttgcttccgttttgggcggccttctcttgctgcgttcgggggaagttggttgtggggtcggggcctgccggatttcagtgtgtggcctacaaacggaacataaccgtaggtcggataaggcgtttacgccgcatccggcaaccgtgccgactagacagtgattaccatttcaccgtcatcgacaaaaaccctgccggacactcgctgactgatattgcccgtgactcccacttttatttcaccccgttgcttcaccgcatcgtcactgatagtgctgccatcctcttcaatttccgtcgaatggggatccgtattgcgcagctatcagcaggccttgctctgatacgtgctgaaacagtgatgtcagccaaggataccacacgcaaatatagctggtaccatcaactctttttctctataaattactcagtctcagacagcgacccggaagtatcgctggaagtgattcgtgccggagcgaaaggcagcaaagtctttagcgaacgcgtcaatcagtacttacgtgaacgtgaaatgtttggcgcggaagaagatcccttcagcgtgctgacggagcgcgagctggatgttctgcacgagctggcacaggggctgtcaaataaacagattgcctcggtgttgaatatttccgagcagacagtaaaagtacatattcgcaatctgctgcgtaaactcaatgtccgctcacgcgtggcggccaccattctgttcctgcaacaacgcggggcacaataa

SEQ ID NO: 139074 - DNA, 1911 bp, Homo sapiens
atggcaggcccccgatacccagtttcagtgcaaggggcagccctggtgcagatcaagaggctccaaacgtttgccttctctgtgcgctggtcagacggcagcgacaccttcgtgcgcaggagttgggacgaattcaggcagctcaagaagaccctcaaggagaccttcccggtggaggcgggcctgctgcggagatctgaccgcgttctcccaaagcttctcggtcaggccagcctggatgcaccactgttgggacgcgtggggcgcacgagccgcggcctggcgcgcctgcagctgttggaaacctattctcggaggctgctggcgactgcagagcgcgtggcacggagcccgacgatcactggcttcttcgcaccgcaacccctggacctggagcccgcgctgccacccggcagccgggtgatcctgcccaccccagaggagcagcctctttctcgcgctgcgggccgcctctccatccacagtctggaggctcagagcctgcgctgcctgcagcccttctgtacccaggacacgcgggataggccttttcaggcgcaggcccaggagagcctggacgtgctgctgcggcacccctcaggctggtggctggtggagaacgaagaccggcagaccgcctggtttccagcgccctacctggaggaggcggccccgggccaaggccgggagggaggcccgtccctagggagcagcggtccccagttctgtgcttcccgcgcctacgagagcagccgcgcagatgagctgtccgtgcccgcgggggcgcgcgtgcgcgtgttggaaacgtcagaccgcggctggtggctatgcaggtacgcgggagcgggccccgaagaactggatacttcggcacgtaatgccggggctctaacccgccgccgcgaaattcgtgatgctgcaactctgctacgtctggggctggcttacggccccggggggatgtcattacgtgaagtcactgcatgggctcagctccatgacgttgcaacattatctgacgtggctctcctgaagcggctgcggaatgccgccgactggtttggcatacttgccgcacaaacacttgctgtacgcgccgcagttacgggttgtacaagcggaaagagattgcgtcttgtcgatggaacagcaatcagtgcgcccgggggcggcagcgctgaatggcgactacatatgggatatgatcctcatacctgtcagttcactgattttgagctaaccgacagcagagacgctgaacggctggaccgatttgcgcaaacggcagacgagatacgcattgctgaccggggattcggttcgcgtcccgaatgtatccgctcacttgcttttggagaagctgattatatcgtccgggttcactggcgaggattgcgctggttaactgcagaaggaatgcgctttgacatgatgggttttctgcgcgggctggattgcggtaagaacggtgaaaccactgtaatgataggcaattcaggtaataaaaaagccggagctccctttccggcacgtctcattgccgtatcacttcctcccgaaaaagcattaatcagtaaaacccgactgctcagcgagaatcgtcgaaaaggacgagtagttcaggcggaaacgctggaagcagcgggccatgtgctattgctaacatcattaccggaagatgaatattcagcagagcaagtggctgattgttaccgtctgcgatggcaaattgaactggcttttaagcggctcaaaagtttgctgcacctggatgctttgcgtgcaaaggaacctgaactcgcgaaagcgtggatatttgctaatctactcgccgcatttttaattgacgacataatccagccatcgctggatttcccccccagaagtgccggatccgaaaagaagaactaa

SEQ ID NO: 139075 - DNA, 2770 bp, Homo sapiens
ctactggtcattctttgggtccacactgcttttatgagctgtgatactcaccgcgaaggtctgtagcttcactcctgaagccagtgagaccacgagcccacaatgacaataccgggcgatgtggagcaggcgatgaaaacgctgcaaacttttccgggtatcgggcgctggacggcgaattattttgctttgcgtggctggcaggcgaaagatgttttcctgccggatgattatctgattaaacagcgatttccgggaatgacaccggcgcaaatccgccgttatgccgagcgctggaagccctggcgttcttatgcgctgttgcatatctggtatacggaaggctggcaaccagacgaagcatgacgttggtcgccggatgcggtgcgagcgccttatccggcggttatgttccgtctgtaggcctgataagacgcacagtgtcgcatcaggcaacggctgccggatgcggcgtaaacgccttatccttcgtacggttatgttccgtttgtaggcatatttctcatcgtcataaaaccatagtgaacactcggtgcatgcgctgctggcgcatccccgggtgaaacgtgtcgtcattgccataagtcctggcgatagccgttttgcacaacttcctctggcgaatcatccgcaaatcaccgttgtagatggcggtgatgagcgtgccgattccgtgctggcaggtctgaaagccgctggcgacgcgcagtggggtattggtgcatgacgccgctcgtccttgtttgcatcabgatgacctcgcgcgattvttrggcgttgagcgaaaccagccgcacggggggggatcctcgccgcaccagtgcgcgatacgttgttcctttactttaggttgaaaaaaaatcagcgtcaagaaggtttcattaacacatatccctggcccaaaaagccggggattttttatatgtgcgttccgataaaaggtgcaaatgctcaggacgttgcagcgttttgcgtgaccgctcggggaaggcaaaattgcctctgggaaagcattgcgcggggtccggcgctcatcaacaatcggggggcagcaaggggccgctgcaatgatcgcgttgtcgaagttgatcacggttttgccgttctcaccttcaacttccagggtgttagccccggtgaatttacccagaccgttgaccactttgactttgcggcctttcgccataccagccagaccaccggtcagctgattgatcactttctctttccaggtacgaatcttgtcgatatcggttttcggttcgccgaagacgataccgtgttcagccagcgctttggcttcttcgataacttttgctacgtgcagcagtgctttagaagggatacagccgacgttcaggcaaacaccgccaagggtgttgtaacgttctacgattacggtttccagacgtattgggtaaaggtgcttgatcctggctctgaagtggtcgccgaagcgggcgacggcgcgagcgctatcgatctggcgcatagactggatatcgacgtgatcttgctggatctcaatatgaaaggtatgagtggcctggatactctcaatgccttgcgcagggatggcgttaccgcgcaaattattatcctgaccgtatccgatgcctccagcgatgtctttgcgctgatagacgcaggcgcagccggttatctgttgaaagacagcgacccggaagtattgctggaagcgattcgtgccggagcgaaaggcagcaaagtctttagcgaacgcgtcaatcagtacttacgtgaacgtgaaatgtttggcgcggaagaagatcccttcagcgtgctgacggagcgcgagctggcatgttctgcacgagctggcacaggggctgtcaaataaacagattgcctcggtgttgaatatttccgagcagacagtaaaagtacatattcgcaatctgctgcgtaaactcaatgtccgctcacgcgtggcggccaccattctgttccagtcggcggcattccgcagccgcttcaggagagccacgtcagataatgttgcaacgtcatggagctgagcccatgcagtgacttcacgtaatgacatccccccggggccgtaagccagccccagacgtagcagagttgcagcatcacgaatttcgcggcggcgggttagagccccggcattacgtgccgaagtatccagttcttcgggcttaccaatatgggccagaattgcatcaaagaagctctttgagcgcgggctgttgtgctcgccggttgggccaccgaagctttcttgcagctcttgcagcagctgtttctgcctttcgttcaggccggcaaagaagaaaattgtgaggccagggttgggacagaaaaggtggtacacggaggggtgggcacaaaagaggtcgatgagagggtagaaaaggtgcagcaggtccactcgctgtttcacagtgcccatttgcacatttgccccttttataccagcacccccaggattttccctggctctttttaagtttccatgaaaaagagacggagtgtccctatcttgcccacgttcaagtccaccggtgccatgtgggctcactgtacctattgcctgaggggtacaagtgccttttttgagtgagcttcccagggcgttgacattccttgtgctcaacacaaagcaatagatggtgcgtttgctggcttttgtccgtaatcgcagtcctttgccccgctcagccgggtggatcccgcgaggtccgcagttcgcgaccagcccggccat

SEQ ID NO: 139076 - DNA, 1572 bp, Homo sapiens
atggagaccctcaatctgtacgcggatttgcgcagcgtcaccggcgaggcactgttgctgctcgatgaacccggcgtcggcgttgaccctatctcacggcgcgaactgtggcagatggtgcatgagctggcgggcgaagggatgttaatcctctggagtacctcgtatctcgacgaagccgagcagtgccgtgacgtgttactgatgaacgaaggcgagttgctgtatcagggagaaccaaaagccctgacacaaaccatggccggacgcagctttctgatgaccagtccacacgagggcaaccgcaaactgttgcaacgcgccttgaaactgccgcaggtcagcgacggcatgattcaggggaaatcgaatatcgttggcatcaaagacaccatcgacagcgttggtcacttgcgtacgatgatcaacacagttaagtcggtacgcccgtcgttttcggtattctgcggttacgatgatcatttgctgaatacgatgctgctgggcggcgacggtgcgataaccgccagcgctaactttgctccggaactctccgtcggcatctaccgcgcctggcgtgaaggcgatctggcgaccgctgcgacgctgaataaaaaactactacaactgcccgctatttacgccctcgaaacaccgtttgtctcactgatcaaatacagcatgcagtgtgtcgggctgcctgtagagacatattgcttaccaccgattcttgaagcatctgaagaagcaaaagataaaaaccgaccgttggtcgatctcgaacacgcagccttgcaggttggtaaagggattattccgccgccgctgcgtgagtatggcgcttcggaggtgcgttccgttacccgtgcctttaaccatatggcggctggtgttaagcaactggcggatgaccgcacgctgctgatggcgggggtaagtcacgacttgcgcacgccgctgacgcgtattcgcctggcgactgagatgatgagcgagcaggatggctatctggcagaatcgatcaataaagatatcgaagagtgcaacgccatcattgagcagtttatcgactacctgcgcaccgggcaggagatgccgatggaaatggcggatcttaatgcagtactcggtgaggtgattgctgccgaaagtggctatgagcgggaaattgaaaccgcgctttaccccggcagcattgaagtgaaaatgcacccgctgtcgatcaaacgcgcggtggcgaatatggtggtcaacgccgcccgttatggcaatggctggatcaaagtcagcagcggaacggagccgaatcgcgcctggttccaggtggaagatgacggtccgggaattgcgccggaacaacgtaagcacctgttccagccgtttgtccgcggcgacagtgcgcgcaccattagcggcacgggattagggctggcaattgtgcagcgtatcggggataaccataacgggatgctggaacttggcaccagcgagcggggccggcctgtccattcgcgcctggctgccagtgcccggtacgcgggcgcagggcacgacaaaaggaaggtaaaataa

SEQ ID NO: 139077 - DNA, 2712 bp, Homo sapiens; identical to SEQ ID NO: 136709

SEQ ID NO: 139078 - DNA, 1280 bp, Homo sapiens
atgaggtatatagttgccttaacgggaggcattggcagtggcaagagtaccgttgccaatgcgtttgctgatctcggaattaacgtcattgatgccgatattattgcgcgtcaggtggttgaaccaggtgcacctgcgctacatgccattgctgatcactttggcgctaacatgattgctgctgatggaacattgcagcgccgggccttgcgcgagcggatcttcgccaacccggaagagaaaaactggcttaacgccctgctgcatccgctgatttcagcagagacgcaacaccagatcccagcagctacttccccctatgtactgtggggtgtgccattgctggagaaaaatcactgttctcgttttgcaaacccagccgcttcacggtttccgggccaagtcctgacccgtcaaatccggaaacttgtacaggatcaccggcaggtcgacgctacgggcgatctgctggccgtaggcctcgcgatgctgcgccagtttgaccgcttcgtcagtggaaggggaaccgacgccaatcaataccggcactcgcccgtcgacaatggttacagcttcttcggcgagtgccatgcgctgggctgtattcatttggctaaattcaccaccggtacccagataaaacagcccgtcgacccctttattaatcaggaagtcggcaacttcgcgcattgcctttttatcaagggttccgtcacgatgaaacgtgctggataccggtggaataatgccgctgaattttttcattacctcagtttccttttcgagctgcaactctccagcaaactggcagttcatgatgtgctgaccaatatttataatcggcgctactttttcaacagcgtagagtcattattgtcgcgacctgttgttaaggacttctgtgtcatgctggttgatattaatcagttcaaacgcatcaatgcccaatggggacatcgtgtgggtgataaagtgctggtttcaattgtcgatattatccagcaaagcatccgccccgatgatattttagcgcgactggagggtgaggtgtttggcttgctatttaccgaactcaatagtgcccaggcaaaaatcattgcggaacgtatgcgtaaaaatgtcgaactcctgaccggctttagtaacagatatgatgttcctgaacaaatgaccatcagtattggcacggttttttcaacgggtgacacgcgtaatatctcgcttgtcatgacggaagcagataaagccttagcgaagcgaaaagcgaggggggcaacaaa

SEQ ID NO: 139079 - DNA, 2451 bp, Homo sapiens
atgatcggagagatccgcgatggcgaaacagcagagatcgctattaaagcggcgcaaactggtcacctggtgttgtctaccctacacactaattccacctgcgaaacgctggtacgtttacagcaaatgggggtcgcccgctggatgctatcatcggcgcttacgctggtaatagcccagcgtctggtacgcaaactttgcccacattgtcgccggcagcaaggggagcccatccacattccagacaatgtatggccatcgccgctgccccactggcaggcacccggttgtgtacattgctaccacggtttttatggtcgtacggccttatttgaagttctgcccataacgccggtcattcgtcagcttatttccgctaataccgacgttgaatcgctggaaacgcacgcacgacaggcgggtatgcgtacgctttttgaaaacggctgcctggccgtagagcaaggcttaaccacctttgaagagttaatccgcgtactggggatgccgcatggcgacggagcggcgatggacagagaagaaaacgaactcggcgtctcctgtattgctgttccggtgtttgatattcatgggcgggtgccgtacgccgtgtcgatttcgctttcgacatcacgtctgaaacagctgtatgctggcttgcccgtttggtgcgatggaagtcgtttcttcgcgcaaaaggcgagggcgattaagtgcaaacagtggggatacgtcggggctaaatcgcgccagcgctggctgttttacgcgtatgacaggctccggaagacggttgttgcgcacgtattcggtgaacgcactatggcgacgctggggcgtcttatgagcctgctgtcaccctttgacgtggtgatatggatgacggatggctggccgctgtatgaatcccgcctgaagggaaagctgcacgtaatcagcaagcgatatacgcagcgaattgagcggtataacctgaatctgaggcagcacctggcacggctgggacggaagtcgctgtcgttctcaaaatcggtggagctgcatgacaaagcggcaggtggcgtaccggttctggtgcgtgaactgctcaaagcaggcctgctgcatgaagatgtcaatacggtggcaggttttggtctgtctcgttatacccttgaaccatggctgaataatggtgaactggactggcgggaaggggcggaaaaatcactcgacagcaatgtgatcgcttccttcgaacaacctttctctcatcatggtgggacaaaagtgttaagcggtaacctgggccgtgcggttatgaaaacctctgccgtgccggttgagaaccaggtgattgaagcgccagcggttgtttttgaaagccagcatgacgttatgccggcctttgaagcgggtttgctggaccgcgattgtgtcgttgttgtccgtcatcaggggccaaaagcgaacggaatgccagaattacataaactcatgccgccacttggtgtattattggaccggtgtttcaaaattgcgttagttaccgatggacgactctccggcgcttcaggtaaagtgccgtcagctatccacgtaacaccagaagcctacgatggcgggctgctggcaaaagtgcgcgacggggacatcattcgtgtgaatggacagacaggcgaactgacgctgctggtagacgaagcggaactggctgctcgcgaaccgcacatttctgaactgagcgcgttcacctttggaacaggacgtggatattctgcggcttttggtgtaaaatgcccgttccgaaaaagggccctgagtgatccttgctacgcaatgcgcgaagttgccgacttcctgattaataaaggggtcgacgggctgttttatctgggtaccggtggtgaatttagccaaatgaatacagcccagcgcatggcactcgccgaagaagctgtaaccattgtcgacgggcgagtgccggtattgattggcgtcggttccccttccactgacgaagcggtcaaactggcgcagcatgcgcaagcctacggcgctgatggtatcgtcgccatcaacccctactactggaaagtcgcaccacgaaatattataggattattaagtggctgtgccagccataatgaaaatgccagtttactggcgaaaaaacaggcgcaaaatatcagccaaaacctgccgattaaatctgcgggatataccttagtgctggcgcaaagtagcggcacaacggtaaaaatgaccattatcagcgaagcgggtacacaaaccacgcagacgcctgacgcctttttaaccagctatcaacgacaaatgtgcgctgacccgacggtgaaattaatgatcactgagggaattaattacagcataacgattaatgatacacgtacaggtaaccagtatcagcggaaactggatcgtaccacctgtggaatagtcaaagcataa

SEQ ID NO: 139080 - DNA, 3397 bp, Homo sapiens
atgagtgaactcccattcacaattgcttcaaagagaataaaatacctaggaatccaacttacaagggatgtgaaggacctcttcaaggagaactacaaaccactgctcaaggaaataaaagaggatacaaacaaatggaagtacattccatgctcatggttaggaagaatcaatatcgtgaaaatggccatactggccaaggtaatttatagattcaatgccatccccatcaagctaccaatgactttcttcaaagaattggaaaaaactactttaaagttcatatggaaccaaaaaggagccgcatcgcgaagtaatcctgagccaaagaacaagctggaggatcacattactaattcaactatatacaggctcagtaccaaaagctgctcggtgtctgggctgaagcagacactgctggcggagtccgaggctctgaccagctacagccaccgggtgttctcggcctgggacttcggtctctgcggggacgtccacgtgcggctgcgccagcgcatcatcttgtacgaattaaaggggcaggtgcctgcattgctgctggatgacggtactttgctgacggaaggcgtagcgattatgcagtatcttgccgacagcgtccccgaccgccagttgctggcaccggtaaacagtatttcccgctataaaaccatcgaatggctgaattacatcgccaccgagctgcataaagagttaaagttttcttttcattggagcacgacctcgcacaaaggactcggcatgaaactcgtcggtagctacaccagcccgtttgtacgcaaactttctattctgttgttagaaaagggcataactttcgaatttattaatgaactgccctataacgcggacaacggcgtggcgcaatttaacccgttaggaaaagtgccggtgctggtgaccgaagagggcgaatgctggtttgattcgccgatcatcgctgaatatattgaattaatgaatgtcgctccggcgatgttgccgcgcgatccgctggagtcgttgcgggtgcgcaaaattgaggcactggcggatggcattatggatgccgggctggtatcggtgcgtgaacaggcgcgtccagcggcgcagcagtctgaagatgaattgttacgccagcgggagaaaatcaaccgcagtctggatgtgctggaaggatcgggcggttgcccggcatccaacgccattcatggccatatcaatgattttctggtgcgtaccgggttgagaagcggtattctacaaataagactttccaaactgctcaatgacatgaatgtttcaaccctagtagagatgaaacgcacgacatctgacaaaggaatgtttctacacgaagagatattactggtcttagctattgactctgtagcacagcatagtattccccatattttccacccggaaatatactcagagcaaacgagaaatggtaccgagctgaccgagaaactgcgccatgcctgcggagctgccgtcgagtgtgtcatttccgatacctgtatcgcgggtatggctgaagccgctgcttgcgaagaaaaattcagcagtggggatgttgcccgccgcgtcactgacaaaacccatgaccggagtgacaataccgccgccaataatggtcataacgatgaaggacgaaccatatttggtgtcctggccgagattcttaatgcccagcgagaagattgttgggaaattttcatgagcaccatgcaatccggcatcgtcaagtggtttgacgacggcaagggcttcggcttcatcacccccgccgacggcggcaaggacctgttcgcccatcacagcgaaatcaagaacaacggcggcttccgcactctggccgaaggcgcccagcccgcgccctgcgcgggctttgtgctttctgggcctgccgtcgacaatccacctcttatgtccgcactgcccgttgccgccccgaaggccctgaccgcttaccgccccttctgggccaagcgtttcggccccgcacccttcctgcccatgagccgggcggagatggagcagctcggctgggacagctgcgacgtcatcatcgtcacgggcgacgcctacgtcgaccatcccagcttcgggggatcctctagagtgaccacagcagcaagctgcaccgcccctaaggcaaaaaccggccgggcccctgttgaccctaatatcgacgaactgaaacagtaccataatccgcgctacggtcgtgttccggttggcggcaactattacgcggaaacgaaaatgagcacttacgaaaaggaaactgaggtaatgaaaaaattcagcggcattattccaccggtatccagcacgtttcatcgtgacggaacccttgataaaaaggcaatgcgcgaagttgccgacttcctgattaataaaggggtcgacgggctgttttatctgggtaccggtggtgaatttagccaaatgaatacagcccagcgcatggcactcgccgaagaagctgtaaccattgtcgacgggcgagtgccggtattgattggcgtcggttccccttccactgacgaagcggtcaaactggcgcagcatgcgcaagcctacggcgctgatggtatcgtcgccatcaacccctactactggaaagtcgcaccacgaaatcttgacgactattaccagcagatcgcccgtagcgtcaccctaccggtgatcctgtacaactttccggatctgacgggtcaggacttaaccccggaaaccgtgacgcgtctggctctgcaaaacgagaatatcgttggcatcaaagacaccatcgacagcgttggtcacttgcgtacgatgatcaacacagttaagtcggtacgcccgtcgttttcggtattctgcggttacgatgatcatttgctgaatacgatgctgctgggcggcgacggtgcgataaccgccagcgctaactttgctccggaactctccgtcggcatctaccgcgcctggcgtgaaggcgattctggcgaccgctgcgacgctgaataaaaaactactacgccacgcgcatcccaattcacctcatcggcaaaatgtgagacggatactgcccatccagctcttgtggcagcaactgattcagcccggcgagaaactgaaatcgatccggcgagcgatacagcacattggtcagacacagattatcggtatgttcatacagatgccgatcatgatcgcgtacgaaacagaccgtgccaccggtgatggtatagggctgcccattaaacacatgaatacccgtgccatgttcgacaatcacaatttcatgaaaatcatgatgatgttcaggaaaatccgcctgcgggagccggggttctatcgccacggacgcgttaccagacggaaaaaaatccacactatgtaa

SEQ ID NO: 139081 - DNA, 681 bp, Homo sapiens
tcatcgttgtgtagcggtgtagatatgtgctggaaacacgctcgcaccagctttatcaccacaaaagcggatgttcataatcgcatgttcgcggatgttgagcgcaaatgacgtctccagccacagaatgcagccgctatgtaattcaatggtgccacacagcgaatcttcgacgcgcgcggaaagcccagcacatacatcggcagcatccagcatgtgaatgccgatgtcgatcagcgggccaccaccctgcagttctttattggtaaagacaccccagccgggaacgccgcagcgacgcagggcgcgggcggtggtaacgtaaatctctcccaaaacgccgttggtcacctgttcacgcagctgttgcgtatcgagcgcaaaacgatggtgaaagtcgtaggccagcaccttgcccagtttgcgcgcggtatcgacatttcccgcgcctgttatcacatggcagcccgcttccagtgccatcagggtatgttcgtaatgaaaacggttaggtgagcagacgctaaccacatcaggtttcactgccagcagcatggcctgcggatcgtcccacacggatgcattcccgtatttttctgccagcgcctgccgctgggaaaggcggctgtcacagacagctaccagttccagatacgttgcgggtgcagtagtacgaagcat

SEQ ID NO: 139082 - DNA, 957 bp, Homo sapiens
atgaaaatcggcacacagaatcaggcgttctttccggaaaacattctggagaaatttcgttatatcaaagagatgggcttcgatggttttgagattgacggcaaactgctggttaacaacatcgaagaagtcaaagcggcgatcaaagaaaccggtttaccggtgaccaccgcctgcggtggctatgacggatggattggcgactttatcgaagagcgtcgtcttaatggcttaaagcagatcgagcgcattctcgaagcgctggcagaagtgggcggtaaaggcatcgtcgttccggctgcgtggggcatgtttaccttccgcttaccgccgatgacctcgccgcgtagcctggacggcgaccgcaaaatggtgagtgattccctgcgcgtactggaacaggtcgccgcgcgtaccggaaccgtggtgtatctcgaaccgttaaaccgctatcaggatcatatgatcaacaccctcgccgatgcccgccgttacatcgtcgaaaacgatcttaaacatgtacagattatcggcgatttctatcacatgaatatcgaagaagataacctggcgcaggcgctgcatgacaaccgcgacctgctcggtcatgtgcatattgcggataaccatcgctaccagccgggcagcggcaccctggatttccacgcgctgtttgaacagctgcgcgcggataactatcagggctatgtagtgtacgaagggcgtatccgggcggaagatcctgcccaggcgtaccgtgattcgttggcctggttgcgcgcaggccaggtggcggataaggttcatgcttcgtactactgcacccgcaacgatctggaactggtggctgtctgtgacagccgcctttcccaggcgcaggcgctggcagaaaaatacgggaatgcatccgtgtgggacgatccgcaggccatgctgctggcggtgaaacctgatgtg

SEQ ID NO: 139083 - DNA, 506 bp, Homo sapiens
cgcgcggaaagcccagcacatacatcggcagcatccagcatgtgaatgccgatgtcgatcagcgggccaccaccctgcagttctttattggtaaagacaccccagccgggaacgccgcagcgacgcagggcgcgggcggtggtaacgtaaatctctcccaaaacgccgttggtcacctgttcacgcagctgttgcgtatcgagcgcaaaacgatggtgaaagtcgtaggccagcaccttgcccagtttgcgcgcggtatcgacatttcccgcgcctgttatcacatggcagcccgcttccagtgccatcagggtatgttcgtaatgaaaacggttaggtgagcagacgctaaccacatcaggtttcactgccagcagcatggcctgcggatcgtcccacacggatgcattcccgtatttttctgccagcgcctgccgctgggaaaggcggctgtcacagacagctaccagttccagatacgttgcgggtgcagtagtacgaagcat

SEQ ID NO: 139084 - DNA, 1383 bp, Homo sapiens
atggccgcaaaacccggtggtcgtctgctgatgtttggcgtgggcgtgattgtaatcggcgtaatgctctccatcttccagcaatttgtcggcatcaatgtggtgctgtactacgcgccggaagtgttcaaaacgctgggggccagcacggatatcgcgctgttgcagaccattattgtcggagttatcaacctcaccttcaccgttctggcaattatgacggtggataaatttggtcgtaagccactgcaaattatcggcgcactcggaatggcaatcggtatgtttagcctcggtaccgcgttttacactcaggcaccgggtattgtggcgctactgtcgatgctgttctatgtttgccgcctttgccatgtcctggggtccgcgctggcaatcgcggtggcggcccagtggctggcgaactacttcgtctcctggaccttcccgatgatggacaaaaactcctggctggtggcccatttccacaacggtttctcctactggatttacggttgtatgggcgttctggcagcactgtttatgggaggggtatcctctagccccaaccgcgggaacgttcagcagtttatcgatgaaggcaattatacatccggcgacaaccatacgctgagagaccctcactacgttgaagacaaaggccataaataccttgtattcgaagccaacacgggaacagaaaacggataccaaggcgaagaatctttatttaacaaagcgtactacggcggcggcacgaacttcttccgtaaagaaagccagaagcttcagcagagcgctaaaaaacgcgatgctgagttagcgaacggcgccctcggtatcatagagttaaataatgattacacattgaaaaaagtaatgaagccgctgatcacttcaaacacggtaactgatgaaatcgagcgcgcgaatgttttcaaaatgaacggcaaatggtacttgttcactgattcacgcggttcaaaaatgacgatcgatgagagcccaccagaagcatataatagtcgctgctccaagaaggctgagattctaggatgcacgcacagcccactctcaactcatgacctcctctgtgcccagggagcagaacctgctaatgagaggaacagaaaaacccacacagtgtcagtcaagtggtggaggactagaaaagggagaagaaaaactagaaacaactctttcaagacattgtactacaaagggggatcctctagagtcaaccgcggggtctgcacgcaaggcaacaacaggcaacaggcaatgatgtacattcaggtgaagaaaaaccaacaagaagtcttcacccatggattctgggatccccacaaagcagcctccatgtgccaggcattgtgctatgtgtaa

SEQ ID NO: 139085 - DNA, 2106 bp, Homo sapiens
ttatccgttctgcttttgcatccactccaccacaaaatcagccagcccctcaacatcattaatatccagtaatgcgacatgtggagaaatcgtgcacgggattgagattgaggagaaagtccagatcccatccatgcccttcatatccccgtggagcagaaggtatttttctggcttctgctctctcaaattctcaactgtgcaatacccacaacggcaggcacacttcacgggtttttcctggcaaaactttgacgggtgcgtttcaacggaaggggagaagccacccttctccatggctgtgtgtgtgcctatggtctgctcaggtcccgggtgtagcaccgcaggtgattcatcgccgtgggtcgttatcgccgtggtcagtgaggtattgtcggcgataatctgacagccaggcagttgaaatgcgatgcgatcgcctgattcaatacccttcgctaacatccagtttgccagacagctcgcggcgggatcgagcgcgctataggtgtacgatgcaccatgattatcgaccacggcaattttgtctggcatcgcacgacggtctgctgccagtaatcggccagcgaagcatcgccccataacccgtgccagactcagcacgtcggcgtgttcatatcccaggcgttcatacattccgagcaccatgtcgttatcttccggcacattgactccgcgatgcccgtcataaccgcccatcaccgttccgaccacgtcaccgtttacctcagcgaccaaaaacaaactgacgtcatggttcatcttacgctcgatgtccatttccggatcgttccacgacgcagcaagtcgcacgctcccaagggtgatgacctttcgagggatatagctgtcgtcgaggcctgacccagaggattccagggcgcacgacaacgctacttcggtcgcccggaagacggcacggttacggcgaactgcgatcgtatcgaaaaccgttacaacggtacggtaaaccactacttcctctgcgaccgtggtcgtttcggttacggttacgtcaacctgaaggatcgtccgcgtcagccagtacagcgtcgtggcgatgatttcattaccaggcaatgcagggccgcggcagatattctgcgtcagtcgaagaaagtgatcggtattggttctccgcgtgccagcgtggaaagcaactttgcgctgcgtgaactggtgggcgaagaaaacttctacaccggtatcgctcacggtgagcaggaacgtctgcaactggcgctgaaagtgctgcgtgaaggcggcatttatactccggctctgcgcgaaatcgaatcttacgatgcggtactggtgctgggcgaagacgttacccagaccggcgcgcgcgtcgcgctggcagtgcgtcaggctgtgaaaggtaaagcgcgcgaaatggcggcagcacagaaagtggctgactggcagattgcggcaatcctcaacatcggtcaacgtgcgaagcatccgctgtttgttaccaacgttgatgacacccgtctgcaagcctggcaaaaagcacaaatcgacgtcatcgtgcaggcactggcagtgcaagaactcctgcaggttgactctagaggtatcccccagacgcacttcatagtcgaacatcggcgaataatgcaggccactgcgcggcagaatatcggacgtcattaccagatccagctctccctgttgcaaggcgggctgcgggtcaaatgtcacgcccgatttaaaatccatctctacctgcggccagttcttatggaaattttctaacgcgggtgtcagccactgaatacagctatggcactcaatggcaatgcgcagacgcgtctgctgcggttcattgcaggcttgcagggcctggctaatttgcggcagtacctggtttgccagttgcaacaggatttctccctgcggtgtaaagcgtagcggctggctcttacgcacaaatagccggaagccaaggcgttgttccagatcgctaaactggtgagacagggcggattgcgtctgatgcaacgtcgccgcagcggctgcgagcgagccgcagttccgcaacgcttgtagcgttttcaggtgttttacttcgatcat

SEQ ID NO: 139086 - DNA, 1176 bp, Homo sapiens
ctactcaagaaacaagaagaggaaaagtccattcacagactcgccgtcatatagtgcgccgctgcctctcccacatgttgtgttgacagcacaatagctcgtgtcaacacgtgtaggagacagagcgtccccgcgtagcaggattaaacgacggtcgcacacaaggggaaaaaggcgtttcgccgcgagagatgctccccccactgccccagagccctctttacagaagttcgggaaccatccgaaatgggtgcccggtccaaagggtaacgggacctctctcgccattccggtatataacgctcgccaggccaaagccaatgcgacctcgcaagatgcctgtatattcaggtggtttagcgcttcacggctacgaaagtacagcgttttataaattgtctcaggtgatattcgcagcgttttttgacgtggttttgttcgccttaaccatcctgatatttgctctggagaccatttcatctccagcttttccagaacaagctttcgcaatggtaaattttgatccagtaagcacggttttggccttttcgccattctgttggctcggttattagcatcaacagctttgtaatagcgtctgccccgattacgctgaacttcacgtgagatcgtcgaaggactgcgattcagcgcagtagctatcgcacgaatgctcattttggctgacaaaccagctcgtatctcctcgcgctcagacagtgtcaggtgagctacagcccgcttacgctcatggggttttatgccgccagtatcccagtgccttcgaaaaagccagcgagactcctcagagttcaaatccatgtccaagttcatacaccatccacccaactgtagaaaacttccagacttgtaggaaccaacatttgtccaaagggtgcttaataaatgctggtcgggcgggccccagccccggtactgggggatggggtgagttggaggtggcggcagctgcgaggctccagggcgcctggaagagacatctgcagtccagccggccgccaggccaagccctttttgcttctcctccttgatggactggatccgttcaatgagaatctccttttcccggtcctcatcgccgccggctgcctcctcctccagcagcacctccagctcctcctcctggatgtcccgggtcttggggctcttgttcat

SEQ ID NO: 139087 - DNA, 861 bp, Homo sapiens
ttagtgatgcggaaacctgcggcgttcagagacgaatagtagattcgcggcctggacccggacctttaaccataacttccgattcttgatgccgtattctttcacggcgtcagcgcaacgctctgctgcacctgagctgatgtacgggctggccgccgcaggatgttcttctgcaccgggatctcctccccgtcgaggaccaggtgcggtcgcagaagcgagactcctcgcggaaagagctgagcgctcgcagcagagcgcggcgtgctgagggtcagacacggcactgccctcagccatcgcggccccgctcctcgcggcgatggcctggctaccaccacgagaacgcgggacgctggcgcataggtgcttgagcattatcaactggcgcaacttcccgtttcggcgctgcaatgccgttgcattgtccaccacaggccattgcacatcatcaacaactcgacagcaggcactggcatcgctgcaaaactggggagttttccatgtctgactgaacgatcttctgaccacccgtgagctacaacgctggcgattaattctggcgaagcggcagaaacgacgctttgtggggctgtttccgcagcaggtgattgagggctggaaagcgatgccgtgctgcgctacggcattgaagatgtggtgacaatctcgacgtgctggaacgtatgcagccttctgaaagcctgctacgcgtgttttgcacaccaaacatctgatgaaccccgaagtactggctgccgccgccggatagtgtgccaggttgttgaagaaattatggctcgactggcaaagaagttcgtcaggctttttctggtgtccgcgatcgccgtcgccgttcat

SEQ ID NO: 139088 - DNA, 3303 bp, Homo sapiens
atgaccctgcatcactggtggcagtggctggtgttaggcgagttcccggtgcatgaatgcgaaaaatcgccggtaaaccataacgtagaccacgaagagatcgctaaatttgaagccgtcgcctcccgctggtgggatctggaaggtgagttcaaaccgctgcaccgcattaacccgctgcgtctgggctatattgccgagcgtgctggcggtttatttggcaaaaaggtgctcgatgtcggttgtggcggcggcattctggccgagagtatggcgcgcgaaggcgcgacggtgaccggtctggatatgggctttgagccattgcaggtggcaaaactgcacgcactggaaagcggcattcaggtggattacgtgcaggaaaccgtggaagagcacgcggcaaaacatgccgggcagtatgatgtggtgacctgcatggagatgctggagcacgtccccgatccgcagtcagtggtcagagcctgtgcgcaactggtgaaaccaggcggcgatgtctttttctcgacacttaaccgcaacggcaagtcatggctgatggcggtggttggtcgagaacaacggcgaggtacgcccagcgcttacccgtccagatataggtcacatcaccgcaccacacctgatttggctcggtcacggcgaactgcctttcaagaatggcatcagaaggagctaataatgagcagaaaaacccaacgttactctaaaaagttcaaagccgaagctgtcagaacggttcttgaaaatcaactttcgatcagtgaaggcgcttcccgattatctcttcctgaaggcactttaggacaatgggttaccgccgccagaaaagggctcggtactcctggttcccgcacggtggctgaactggaatctgaaattctgcaactgccagaggaaaaagcctctgtttttgaactatggaagaacggaacaggcttcagtgaaatagcgaatatcctgggttcaaaacccggaacgatcttcactatgttaagggatactggcggcataaaaccccatgagcgtaagcgggctgtagctcacctgacactgtctgagcgcgaggagatacgagctggtttgtcagccaaaatgagcattcgtgcgatagctactgcgctgaatcgcagtccttcgacgatctcacgtgaagttcagcgtaatcggggcagacgctattacaaagctgttgatgctaataaccgagccaacagaatggcgaaaaggccaaaaccgtgcttactggatcaaaatttaccattgcgaaagcttgttctggaaaagctggagatgaaatggtctccagagcaaatatcaggatggttaaggcgaacaaaaccacgtcaaaaaacgctgcgaatatcacctgagacaatttataaaacgctgtactttcgtagccgtgaagcgctacaccacctgaatatacagcatctgcgacggtcgcatagccttcgccatggcaggcgtcatacccgcaaaggcgagagaggtacgattaacatagtgaacggaacagcaattcacgaacgttcgcgaaatatcgataacagaagctctctggggcatggggcaggcgaattagcctcagagtacggaattacccgtgaaatgcaggatgaactggcgctacattcacagcgtaaagcggcagccgcaattgagtccggtgcttttacagccgaaatcgtcccggtaaatgttgtcactcgaaagaaaaccttcgtcttcagtcaagacgaattcccgaaagcgaattcaacggctgaagcgttaggtgcattgcgcccggccttcgataaagcaggaacagtcaccgctgggaacgcgtctggtattaacgacggtgctgccgctctggtgattatggaagaatctgcggcgctggcagcaggccttacccccctggctcgcattaaaagttatgccagcggtggcgtgccccccgcattgatgggtatggggccagtacctgccacgcaaaaagcgttacaactggcggggctgcaactggcggatattgatctcattgaggctaatgaagcatttgctgcacagttccttgccgttgggaaaaacctgggctttgattctgagaaagtgaatgtcaacggcggggccatcgcgctcgggcatcctatcggtgccagtggtgctcgtattctggtcacactattacatgccatgcaggcacgcgatataaacgctggggctggcaacactgtgcattggcggcgatacagggaattgcgatgcgaaagttatcgggtgttttcattgaacatcgacggcgaaggtaaccccattaatcaccagtcaaaacttgtcaccagcgtcagctcgccagcattacgcatcggtacaataaatgtttcctgtttctcattgaccgatccttcatcggtgatcagcgtcagttgggcggtggttaattccgtttcgctgcgcccatccatagtagttgatatacacatgatagcgcccgtgaattggcgcgggcatggcgaaaatctcgggtccgtaccccgtcgtgacatccatataacgctgaaaaatatgcgttacgctttcgcttatggcgcagatgctgtttatgcgggccagccgcgttattccctgcgtgtgcgcaacaacgaattcaaccacgaaaatcttcagctcggcatcaatgaagcccacgcgctggggaaaaagttttatgtcgtggtcaacattgcaccgcacaacgccaagctgaaaacctttatccgtgacctgaaaccggtggtggaaatggggccggatgcgctgattatgtccgatccagggctgattatgctggtgcgtgagcacttccctgaaatgccgatccacctttcggtgcaggctaacgccgtgaactgggcgacggtgaaattctggcagcaaatgggcctgacccgcgtgatcctctctcgcgagctgtcgctggaagagattgaagagatccgcaatcaggtgccggatatggagatcgagatcttcgttcacggcgcgctgtgcatggcctactccggtcgctgcctgctctctggctatatcaacaagcgcgacccgaaccagggcacctgcaccaacgcctgccgctgggagtacaacgtccaggaagggaaagaagatgatgttggcaacatcgtacacaagtacgagccgattccggtgcaaaatgttgagcctgacgctgggtatcggcgcaccaaccgacaaagtgtttatgatcgaagaggcccagccgtcctgggcgagttatatgacctgctgctttga

SEQ ID NO: 139089 - DNA, 1784 bp, Homo sapiens
  misc_feature (1)...(1784): n = a,t,c or g
actcacaaaattgaccacagctctttggcgtgccgatcttttgaaagctatgcgcattcacgctnttcnccgccggaaagcccagcacatacatcgcagcatccagcatatgaatgccgatgtcgatcagctgggccaccaccctgcagttctttattggtaaagacaccccagccgggaacgccgcagcgacgcagggcgcgggcggtggtaacgtaaatctctcccaaaacgccgttggtcacctgttcacgcagctgttgcgtatcgagcgcaaaacgatggtgaaagtcgtaggccagcaccttgcccagtttgcgcgcggtatcgcacatttcccgcgcctgttctggcgtcatggcgggcggtttttcgcacatcacatggcagcccgcttccagtgccatcagggtatgttcgtaatgaaaacggttaggtgagcagacgctaaccacatcaggtttcaccgccagcagcatggcctgcggatcgtcccacacggatgcattcccgtatttttctgccagcgcctgcgcctgggaaaggcggctgtcacagacagccaccagttccagatcgttgcgggtgcagtagtacgaagcatgaaccttatccgccacctggcctgcgcctattatcgcgacccgcagcggagagcttgtcattgcacttttcacaaagaccagcacgatgccttcttctgaacgatagaaacgacgtgcatcttcctctgcgttttcaccaatcaccatgccttccggaataacacaagcacgatcgatgacgcagcggcgcagacggcacgagcgacctacccatacttccggtaacaatacggcggaatcaatgttgcagaatgaattcacgcgaacgcgcgagaacagaacggactgcaccaccaccgaaccggagatcacacaaccgccggaaaccagtgagttaagggtcatcccgtggctgtgctccatctcctcgtcaaacagaaaatccagttcctcttgctcatcctgatccttggacatcagctgctgggaaggcagctgctgaggcagagaggtcaggtgggaaaatctggactcctctgacttcccctttttccttggcgcaaaaaaataaccgccgccgataggtttaacgtattcctccagcgcttcgccattgagccttttttgtactgtcaggaagcctttttccagatcgtgttggtagcagacaaacagcaaccccatatccagttgcccggagttggtgacgcccagtgaataactgtagccacgacgcagcatcaggctggactcactctccgccgtgcggggattcgccagccggatatggctgtccagcgcgatcaccttcccttccgggtcgctggcgtaatcaggcacatcatgctcatgctgcattcccagcggcgcaccggtttgcttatcacggccaaaaatcgtctgctgttctttcagcggcgttctgtcccaaaattccactcgaaactgaatcaagcgtactgcctgatagctgccaccgattgtccacgcaggctcctgctgatctgccgttacccatggtgatactggagatagactccggaagctgcagtggctcacactatcaatcgagctccggtaccgctcctccagagccagctgcttgaactcctcatacatctttttgttgaagtgatctcggaggaagaaggaccagaagcggaagagtgtgttcatctcctgagactggccaatgcccaagcgtttccgctctgatgggaaagaaaggaggaaaggcat

SEQ ID NO: 139090 - DNA, 1355 bp, Homo sapiens
ccccattaagaatgtgcggggttggcatgttggctcctaaattgccccttatatcgaaacaggaagtacaaaagtccttgacttgctgaatgcatgctgcaaattaacatgatcggcgtaccatgattaaagtacgtaattgtagattcaattggtcaacgcatcagttatgtgaaaacatggggttgcggaggttttttgaatgagacgaacatttacagcagaggaaaaagcctctgtttttgaactatggaagaacggaacaggcttcagtgaaatagcgaatatcctgggttcaaaacccggaacgatcttcactatgttaagggatactggcggcataaaaccccatgagcgtaagcgggctgtagctcacctgacactgtctgagcgcgaggagatacgagctggtttgtcagccaaaatgagcattcgtgcgatagctactgcgctgaatcgcagtccttcgacgatctcacgtgaagttcagcgtaatcggggcagacgctattacaaagctgttgatgctaataaccgagccaacagaatggcgaaaaggccaaaaccgtgcttactggatcaaaatttaccattgcgaaagcttgttctggaaaagctggagatgaaatggtctccagagcaaatatcaggatggttaaggcgaacaaaaccacgtcaaaaaacgctgcgaatatcacctgagacaatttataaaacgctgtactttcgtagccgtgaagcgctacaccacctgaatatacagcatctgcgacggtcgcatagccttcgccatggcaggcgtcatacccgcaaaggcgaaagaggtacgattaacatagtgaacggaacaccaattcacgaacgttcccgaaatatcgataacagacgctctctagggcattgggagggcgatttagtctcaggtacaaaaaactctcatatagccacacttgtagaccgaaaatcacgttatacgatcatccttagactcaggggcaaagattctgtctcagtaaatcaggctcttaccgacaaattcctgagtttaccgtcagaactcagaaaatcactgacatgggacagaggaatggaactggccagacatctagaatttactgtcagcaccggcgttaaagtttacttctgcgatcctcagagtcccttggcagcggggaacaaatgagaacacaaatgggctaattcggcagtactttcctaaaaagacatgtcttgcccaatatactcaacatgaactagatctggttgctgctcagctaaacaacagaccgagaaagacactgaagttcaaaacaccgaaagagataattgaaaggggtgttgcattgacagattga

SEQ ID NO: 139091 - DNA, 3547 bp, Homo sapiens
tcagggatagtgaatgcgcccgcaggaaccagaatggcatgaatcaaactccttgttgacgaatctcgacacgagcctgagaggtgttgggtttccgttacttggccccactgccgtggtttgatgcgttgccggggcgattgatccgggatatgggtcctccaccggctttttggggtgacttccggtcgtatggtttcgatctctaggcgtcagggggtggcgctgccgtaagggccctgttggaagactggggacccgctccttatacccccgctcgcggtgcgacgctcggtaccctccgctgcggtcgcgataataggcgcaggccaggtggcggataaggttcatgcttcgactactgcacccgcaacgatctggaactggtggctgtctgtgacagccgctttcccaggcgcaggcgctggcagaaaaatacgggaatgcatccgtgtggacgatccgcaggccatgctgctggcggtgaaacctgatgtggttagctctgctcaccgttttcattacgaacataccctgatggcactggagcgggctgccatgtgatgtgcgaaaaaccgcccgccatgacgccagaacggcgcgggaaatgtgcgataccgcgcgcaaactgggcaaggtgctggccacgactttcaccatcgttttgcgctcgatacgcaacagcaccgcccgcgcccgcgtcgctgcggcgttcccggctggggtgtctttaccaataaagaactgagggtggtggcccgctgatcgacatcggcattcatatgctggatgctgcatgtatgtgctgggctttccggcggtgaaaagcgtgaatgcgcatagcttcaaaagatcggcacgcaaaagagctgtggtcaatttggtgagtgggatcggcaacttacagcgtcgaagattcgctgtttggcaccattgaatttcaaacggcggcattctgtggctggaaacgtcatttgcactcaacatccgcgacagtcgattatgaacgtcagcttttgtggtgataaagctggtgcgacgtgtttccagcacatatctacaccgataacaacggtgaattaatgacgagggcaagcccgtgatgatagccgacgccgagaggggtacatcatccagcaactggtggcggcgttgtatcaatccgcagaacagggacgcgtgtggaattatgaccaggccagtaacgttatcagaacccatttcagccagcataccctgaacaagtatgcatcgctgatggcgcagggaacggctatcttgggcttcgcgccagccatgaagaagattacacgcgcagacgcgagggatgtatctggcggggtctgcctgatgtcgtggggatggagattccataaatggtgaggttttctcgttatcccacgaagcctggcagcgtgatctcatgtgattgcgtctgacactgtctgagcgcgaggagatacgagctggtttgtcagccaaaatgagcattcgtgcgatagctactgcgctgaatcgcagtccttcgacgatctcacgtgaagttcagcgtaatcggggcagacgctattacaaagctgttgatggcttgtagattggttcgtcgtaaaagttacgcgcaattccgcgccgcttcagttcactcttcaggcgggggtgaattggctggtaataaatgacggacacagacggaaaccagtcgtagccagtgaaataaacacaaacgttggttaagcgctgtaccttcaacccggtagctaccgtcataaccagtcgtcagtgtgagttgatgatagcgcaggatctcccgtcctgtttcgctgatatcaagactggcaatatcatcatccacaccattaagctcgctgaaggttgccatggtggcggtcaaccccggctgaaagagcgtcagcaagatctggcagcggcgctggggagccgaaaggacagatggtggagcaagcgtaggcatcatctgtagatctcccataagcataattgataagaatagctaaagtttgctcggccgaagctttgggggatctttcggaatcggcagtatcaccacatgttggagcggacgcagtcaggcaattgatgccccggcgctggatcgcggcgcggctcttggcgcactaatgcgtctggaacatcccaacgccagtgccgaagcggcgctgacgatgctggcgcagttatccccggcacaatctggtgaggcgctgcacggtttgctggcgctggcccgccatcaactggcctgtcagccggcatttatcgccggtttcagcagtcatttaaatcaactgagtgaagccgattttattaacgccctgcccgatttacgcgcggcgatggcctggctaccaccacgagaacgcgggacgctggcgcatcaggtgcttgagcattatcaactggcgcaacttcccgtttcggcgctgcaaatgccgttgcattgtccaccacaggccattgcacatcatcaacaactcgaacagcaggcactggcatcgctgcaaaactggggagttttccatgtctgaactgaacgatcttctgaccacccgtgagctacaacgctggcgattaattcttggcgaagcggcagaaacgacgctttgtgggctggatgacaacgcccggcagatagaccacgcgctggagtggctgtatgggcgcgatcctgaacggctccagcgtggtgaaagttccggtgaattaggtggctccaatctctccacccttgagtggatcaacagtattacacgctgtttccgcagcaggtgatgagcggctgaaagcgatgccgtggcccagggctggcgagtgaaacatagagatgataacgatctttctctgcgataaaacgctcggaatggcaatcgtatgtttagcctcggtaccgcgttttacactcaggcaccgggtattgtgcgctactgtcgatgctgttctatgttgccgcctttgccatgtcctgggtccggtatgctgggtactgctgtcggaaatcttcccgaatgcttcccgatgatggacaaaaactcctggctggtggccatttccacaacggtttctcctactggatttacggttgtatgggcgttctgcagcactgtttatgtggaaatttgtcccggaaaccaaaggtaaaaccctgagaagctggaagcgctcatcgttgccagccagcaacgatgggccttgatgacggaaacaccagacgaagaagagctggatctacagtttctcgcaagtcgaatggatacctcaaagctggatttgattctggtcgaagggtttaagcatgaagagatcgcaaagattgtgctgtttcgcgatggagccggacatcgacctgaagaattagtgatagacaggcatgttattgctgtagccagtgatgtgccgcttaatcttgatgtcgcattactggatattaatgatgttgaggggctggctgattttgtggtggagtggatgcaaaagcagaacggataagcaagagtaggctggataagacgcgccagcgtcgctccggcat

SEQ ID NO: 139092 - DNA, 461 bp, Homo sapiens
gacaaagcttccagaggaaggagcaggcagcaatctttgctgttctgcagcctctgctggtgatacccaggcaaacagggtctggagtggacctccagcaaactccagcagacctggagaagaggggcctgactgttagaaggaaaactaacaaacagaaagcaataacatcaacaaaaaggatgcccacgcaaaaaccccatccaaaggtcatcagcatcaaagatcaaagaatagccagtttagaggagaacataaatgacctgatggagctgaaaaacacagcacaagaacttcgtgaagcatacacaggtatcaatagtcgaatcaatcaagtggaagaaaggatatcagagattgaagatcaacagaatgaaataaagtgtgaagacaagattagaggaaaaagaataaaaaacaaacaaacaaacaaagcctctaaaaaatgtgggactatgtga

SEQ ID NO: 139093 - DNA, 752 bp, Homo sapiens
gacgaagcttccagaggaaggaacaggcagcaatctttgctgttctgcagcctctgctggtgatacccaggcaaacagggtctggagtggacctccagcaaactccagcagacctgcagaagaggagcctgactgttagaaggaaaactaacaaacagaaagcaataacatcaacattaacaaaaagcacgcccatgcaaaaaacctatccaaagtgcacaaaactgaacagagaagagtatgacgaattgacagaagtaggcagaaggtgggtaataataacaaactcctttgagctaaaggagcatgttctaacccaatggaaggaagctaagaaccttgataaaaggttacaggaagggctaactagaataaccagtttagagaagaagataaatgacctgatggtgctgaaaaacacagcacgagaacttcatgaagcatacacaagtatcaatagtcgaattgatcaagcggaagaaaggatatcagagattgaagatcaacttaatgaaataaagcttgaagacaagattacagaaaaaagaatgataaggaaaggacaaagcctccaagaaatatgggactatgtgaaaagaccaaacctacgattgattggtgtacctgaaagtgatgaggagaatgtaaccgagctggaaaacactcttcaggatatcatccaggagaacttccccaatctagcaagacaggccaacattcaaattcaggaaatacaaacactactaagataa

SEQ ID NO: 139094 - DNA, 831 bp, Homo sapiens
atggatgtgagcagaggccatctccctgctgctgctgttcatgctggcaggatccgttctcaacttttcttacttggaatctacactgtccttgaccctgcctgtccccataactctacccttcgggagtacataaatccacgtttatttatggcttctataacacctaaccctgcacatcccagtctttattctggcaacattcatgttgaggcagtattacttcctcctcctatttttatttgcttccagaggaaggaacaggcagcaatctttgctgttcggcagcctctgctggtgatacccaggcaaacagggtctggagtggacctccagcaaactccagcagacctgcggcagaagggcatgactgttggaaagaaaactaacaaacaaagcaatatcatcaacatcaacaaaaagaacatccattcaaaaaccctatctgaaggtcaccaacatcaaagaccaaaggtagataaatccacgaaaatgaggaaaaaccagcccaaaatggctgaaaattccaaaaaccagaatgcctcttctcctgcaaaggatcacaactccttgcctgcaagggaacaaaactggatggagaatgagtttgatgaattgacagaagtaggcttcagaaggtgggtattaacaaattcctccaagctaaaggagcatgttgtaaccaaatgcaaggaagctaagaaccttgaaaaaaggttagaggaattgctaagtagaataaccagtttagagaagaatgtgaatgacctgatagagctgaaaaacacagcagaagaacttcgtgaagcatacacaagcatcaatagctaa

SEQ ID NO: 139095 - DNA, 1511 bp, Homo sapiens
atgggcaaggacttcatgactaaaacaccaaaagcaatggcaacaaaagccaaaattgacaaatgggatctaattaaactaaagagcttctgcacagcaaaagaaactaccatcagagtgaacaggcaacctacagaatgggagaaaatttttccaatctacccatatgacaaagggctaatatcaagaatctacaaagaacttaaacaaatttacaagaaaaaaatcaaaccaccccatcaaaaagtgggcaaaggatatgtcttctcaaaagaagacatttatgcagccaacagacacatgaaaaaatgctcatcatcactggccatcagagaaatgcaaatcaaaaccacaatgagataccatctcacaccagccaaccgaggaattgaaatcattaactgtccatttttagatgatgcagcatcctgtatagatccaacttattcctccaacatattcccccctgttaacttgtcatggggacttcctatgaagccaaaggaagtaaagattaagcggcagaaaaaagaacaccttctcaaggacagggattttagttttcaggagcctatcatggctctacgcacagtcattttggagatcctgatggaaaaggaaatggacaactcacaaagagaatgtattaaggacattctcaccaaacaccttgtagaactctctatactggccagaactttcaagaacactcagctccctgaaagggcaatatttcaaattaaacagtacaattcagttagctgtggagtctctgagtggcagctggaagaagcacaagtattctgggcaaaaaaggagcagagtcttgccctgagtattctcaagcaaatgatcaagaagttggatgccagctgtgcagcgaacaatcccagcctaaaacttacatacacagaatgtctgagggtttgtggcaactggttagcagaaacgtgcttagaaaatcctgcggtcatcatgcagacctatctagaaaaggcagtagaagttgctggaaattatgatggagaaagtagtgatgagctaagaaatggaaaaatgaaggcatttctctcattagcccggttttcagatactcaataccaaagaattgaaaactacatgaaatcatcggaatttgaaaacaagcaagctctcctgaaaagagccaaagaggaagtaggtctccttagggaacataaaattcagacaaacaggtgcccctctgggacaaagcttccagaggaaggaacagtcagcaatctttgctgttctgcagcctccactggtgatacccaggcaaatagggtctggagtggaactccagcagactccagcagacctgcagctgagggacctgactgttagaaggaaaactaacgaacagaaaggaatagcatcagcatccacaaaaaggacatccacagaaaaaccccatacgaaggtcaccaacatcaaagaccatagatagaaaaatccatgaagatgaggaaaaaccagtgcaaaaaggctga

SEQ ID NO: 139096 - DNA, 966 bp, Homo sapiens
atgacactgaacggtgctgaagtgctgtctgatactcctaagtgcaagaaggctgtgtcaggcccttctgctgcaggtctgctggagtttgctggaggtccactccagactccgtttgcctgggtatcaccagtggaggctgcagaacagcaaagactgctgcctgttccttcctctggaagctttgtcccagagggacacctgccagatgccaggtggagtgctcctatacgaggtgtctgtcaatccctgctgggaggtgtctcccaggcaggaggcacaagggtcagggacccacttgaggaggaagtctgtcccttagcagagctcgagcgctgtgctgggagatctgttgctgtcttcagagccagcaggcaggaacatttacgtctgctgaagctgacttcacagccgccccttcccccaggtgctctgtcccagggagatgggagttttatctataagcccctgactggggttgctgcctttctttcagatgccctgcccaagaggaggaatctggagaggcagtctggctatagcacctttgaggagctgtgtttccagaagagaacttggggaagggatgcagtgcgaatcagtgacctgttattaggagaccactcgcattttggcaaatgcccaatatcaaggcttgagagagcagaaaatatgccagtggtatcggagctctcagctgcagggtgtagtactgaagtgaatcatgtatttgttggaatcatttggcaaaagggcaaatgcagcaaatacactgctccctccaagtccagtgttccagtgtcaagcaccagaggacacgttcatatcacagtacaaaatccaactctggtaccttttgtcgggaagctcaatattgacagcccaataggtgataggaatattccagtcctgacagctggtaactgcaaaactttaggtgatctgcggtcatttccacacaattaa

SEQ ID NO: 139097 - DNA, 2223 bp, Homo sapiens
tgtgtgttgattttgtactctgcaactatgccaaaactatttgttagctcatagatgttttgtggattatatgctaaataatgttatctgcaaatagagtagttttacttctgcctttcaatttgaatgtcttttattttttttttcttgcctatttgctctggctagaacttttaatacagtgttgaattgcagtggtgtgaaagcactatcattgcctgttcatgatcttagggggggatctttcagtctttcactatggagtatgttacctatgagttttttgtatatgtgctttattatgtggaggaacaggcagcagtctttgctgtttggcagcctccactggtgataccgaggcaaacagggtctggagtggacctccagcaaactccagcagacctgcagcagaggggcctgactattagaaggaaaactaacaaagagaaaggaataacatcaacatcaacaaaaaggacatccattcagaaaccccatctgaaggtcaccaacatcaaacaccaaagactgagcaaaattgtgattttccagggatcagtgtcgtttagggatgtgactgtgggcttcactcaagaggagtggcagcatctggaccctgctcagaggaccctgtacagggatgtgatgctggagaactacagccaccttgtctcagtagggtattgcattcctaaaccagaagtgattctcaagttggagaaaggcgaggagccatggatattagaggaaaaatttccaagccagagtcatctggaattaattaataccagtagaaactattcaataatgaagttcaatgagtttaacaaaggtggaaaatgtttctgtgatgaaaagcatgaaataattcattctgaagaggaaccttctgaatataataaaaatgggaacagcttctggctgaatgaagacctcatttggcatcagaaaattaaaaattgggaacaatcttttgaatacaatgaatgtgggaaagctttccctgagaattcactcttccttgtacataagagaggttacacaggacagaaaacctgcaaatatactgaacatgggaaaacctgtgatatgtcatttttcatcactcatcagcaaacacatccaagagaaaaccactatggtaatgaatgtggagaaaatatctttgaggaatccattctccttgaacatcagagtgtttacccattcagccagaagttaaatctcactccaattcagagaacccactcaattaacaatattattgaatataatgagtgtggaacatttttcagtgaaaaattagtccttcatttacaacagagaacacatacaggagaaaaaccttatgaatgtcatgaatgtggaaaaaccttcacccagaagtcagcccacacaagacatcagagaacacacacagggggaaaaccctatgaatgtcatgaatgtgggaagaccttctataagaattcagacctcattaaacatcaaagaattcatacaggggagagaccttatggatgtcatgaatgtgggaaatccttcagtgaaaagtcaacccttactcaacatcaaagaacgcacacaggggagaaaccatatgaatgtcatgaatgtgggaaaaccttctcatttaagtcagtccttactgtgcatcagaaaacacacacaggggagaagccctatgaatgctatgcatgtgggaaagcctttctcagaaaatcagacctcattaaacatcaaagaatacacacaggtgaaaaaccttatgaatgtaatgaatgtgggaagtcattctctgagaagtcaacccttactaaacatctaagaactcacacaggtgagaaaccttatgaatgtattcagtgtggaaaatttttctgctactactccggtttcacagaacatctgagaagacacacaggggagaaaccttttggatgtaatgaatgtgggaaaaccttccgtcagaagtcagccctaattgttcaccagagaactcatataagacagaaaccctatggatgtaatcaatgtggaaaatcattctgtgtgaagtcaaaactcattgcacatcatagaacacacacaggggagaaaccctatgaatgtaatgtttgtggaaaatcattctatgttaagtcaaaactaactgtacatcagagaatacacttggggagaaaccctataaatgtagtaaacgagggaaattactctgggtga

SEQ ID NO: 139098 - DNA, 414 bp, Homo sapiens
ccccagaggaggcactctgtgccttagcagagctcgagcgctgtgctgggagagctgctgctctcttcagagccgagaggcagaaacgtttacgtctgctgaagctgcacccacagccgccccttcccccgggtgctctgtcccagagagatgggagttttatctataagcccctgactggggctgctgcctttctttcagagatgccctgcccagagagcagttttacaggctttttacagacagatcagaccgagtccctgaaaactccgtgacagatgtttgtcacattgaaagtaaaatggagcctctccgcctcggcccacaaacgtctccattatgagaccaagcctggtctgctcgttcaccactctggtctttatttcctcaaatgctcagagctctctcgtagct

SEQ ID NO: 139099 - DNA, 2095 bp, Homo sapiens
gtcgactactagaggatcccccccgcaagaggcccggcagtaccggcataaccaagcctatgcctacagcatccagggtgacggtgccgaggatgacgatgagcgcattgttagatttcatacacggcttccagtcttcatgcttcctccaacgccgagaaaaacttcctggattgtagcccctgtactggaggtcctagccagagcaatcagacacgagacagaaatacagggcatccacaccggtacagaagacgtcccagtgtcactgtttgctgatgacatgatcatttaccttgacaaccttaaagactcctccagaaagctcctagaagtgataagagacttcagcaaagtgtctggatacaagattaatgtacacgaatcagtagctcttctatacaccaacaatgactacgcagagaatcacatcaagaactcaaccccttttactatagggtacgtgctcgcattcgtagtcatggtcatagctgtatcctgtgtgagattgttatacgctcacaattgcacacaacatacgagcctgaagcataagtgtcaagcgtgggtcgtgactactgtcgatgcagctgcattcatgactcaggctacgcgcgaggagaggcggattgcgtattcggcgccaggtggttatttctttcacatactggaagtcctagccagaacaatcagacaagagaaagaaatacagggcatccaaaccggtaaagaagaagtcaaagtgtcactgtttgctgatgacatgatcatttaccttgaaaaccttaaagactcctccagaaagctcctagaagtgataaaagaattcagcaaagtgtctggatacaagattaatgtcgactctagaggatcccccacagacttggtaatttataaagaagaaattgtatttctcatagttccaaaggctaagaagtccaaaatcaaggtgctggcctctgacccgctttgttatgccgcaacgacctggcgaatgaccatcattgccggccttcccgttgaatataacgatcgctttattcgtggaattgcggtgttcgcaccgtggcgaaaaacgcctgggatctaccatcagagtcatgacccgctttgttatgccgcaacgacctggcgaatgaccatcattgccggccttcccgttgaatataacgatcgctttattcgtggaattgcggtgttcgcaccgtggcgaaaaacgcctgggatctaccatcagagtcatggtgcatgtctgggccgtcgttccagaaccatcacggtggtcgatgcacaaccgcaagtcatggatatggacccgacctgttcactgtttactacagggcaatgtctgggagaacccgacctgctggcgtcggcccgtcgcttacaatttttttcacatcagtactcgattgccgtgctgatggcaaatgcccgtggtaacagtgcatatatgggagtaactatggtggtctcatcgttcgcgccgatcgtggttcattattgttagtcgggttggcaaggcgatatcattccattacgctaggctttttcggcctggagcatgccatgttgcgcattatcgatacagaaacctgcggtttgcagggagggatcgttgagattgcctctgttgatgtcattgacggaaaaatcgtcaaccccatgagccacctggtgcgccccgatcgtcctattagtccacaagcgatggcgattcatcgcatcaccgaagccatggtcgccgataaaccgtggattgaagatgtgatcccacactattacggtaagtgaatggtatgtcgcgcataacgccagctttgaccgccgcgtactgcctgagatgcccggtgagtggatttgcactatgaaactggcccgtcgtttgtggcctgggatcaagtacagcaatatggcgttatataaaacacgcaagctcaatgtacagacgccgccgggcctgcatcatcaccgcgcgttgtatgactgttatatcaccgccgcgttgcttatcgatattatgaacacctccggctggacggcagatacagatggccgatatcaccggacgtccgtcgttgggggatcctgctag

SEQ ID NO: 139100 - DNA, 2538 bp, Homo sapiens
atgcttcaaagcaaccgaaccgccgccagccattcaccatccatccagccagccatccagccagccatccagccagccagccaactatccatccacaatttgtggacacaattccggcattcaaccaaaattccagttgaatgggtgaatggtgaatggctgaatggacgaatgccagaagatcatcatgaatggcaatgcaactatcagaacgttcagcagtttatcgatgaaggcaattatacatccggcgacaaccatacgctgagagaccctcactacgttgaagacaaaggccataaataccttgtattcgaagccaacacgggaacagaaaacggataccaaggcgaagaatctttatttaacaaagcgtactacggcggcggcacgaacttcttccgtaaagaaagccagaagcttcagcagagcgctaaaaaacgcgatgctgagttagcgaacggcgccctcggtatcatagagttaaataatgattacacattgaaaaaagtaatgaagccgctgatcacttcaaacacgagagaaaccgtcgatttcaacggtaaacatattcatgtgcgcggagcaaaactgctcttcccggcgattcaacagccgtatccgccactttactttggcggatcgtcagatgtcgcccaggagctggcggcagaacaggttgatctctacctcacctggggcgaaccgccggaactggttaaagattttatcgaacaagtgcgggcgaaagctgccgcgcatggacgcaaaattcgtttcggtattcgtctgcatgtgattgttcgtgaaactaacgacgaagcgtggcaggccgccgagcggttaatctcgcatcttgatgatgaaactatcgccaaagcacaggccgcattcgcccggacggattccgtagggcaacagcgaatggcggcgttacataacggcaagcgcgacaatctggagatcagccccaatttatgggcgggcgttggcttagtgcgcggcggtgccgggacggcgctggtgggcgatggtcctacggtcgctgcgcgaatcaacgaatatgccgcgcttggcatcgacagttttgtgctttcgggctatccgcatctggaagaagcgtatcgggttggcgagttgctggtcccgcttctggatgtcgccatccccggaaattccccagccgcagccgctgaatccgcaaggcgaagcgctaaggaagaaataatggcacgcccagtgaagaagtggttattgcgcgttgccccctggtttttaccggtgggcatcgtggcggtgtggcaactggcctcctcggttggctggctgtcgacgcgtattttgccttcaccggaaggagtggtgacggcgttctggacgctctccgccagcggcgaactgtggcagcatctggcgatcagctcctggcgggcgctgattggcttttcaattggcggatcgctggggttgattttgggactgattagcgggctatctcgctggggagaacggctgctggatacctcaattcagatgttgcgcaacgtgccgcatctggcgctgatcccgctggtgattttgtggtttggcattgatgaatccgcaaaaatctttctggtggcgctcgataatatcgatcgcgggttggtggagatggcgcgtagctatggattatccggcataccgctgtttatccatgtgatcctgcctggtgccctgccctcaattatggtcggcgtgcgttttgcgttgggcctgatgtggctgacgctgattgttgccgaaaccatttctgccaattcaggcattggttatctggcgatgaacgcgcgagaaagcttcaggagccgatgcgatcaactggaagaaagggtatcagcaatggaagatgaaatgaatgaaatgaagcgagaagggaagtttagagaaaaaagaataaaaagaaatgagcaaagcctccaagaaatatgggactatgtgaaaagaccaaatctacgtctgattggtgtacctgaaagtgatgtggagaatggaaccaagttggaaaacactctgcaggatattatccaggagaacttccccaatctagcaaggcaggccaacgttcagattcaggaaatacagagaacgccacaaagatactcctcgagaagagcaactccaagacacataattgtcagattcaccaaagttgaaatgaaggaaaaaatgttaagggcagccagagagaaaggtcgggttaccctcaaaggaaagcccatcagactaacagcggatctctcggcagaaaccctacaagccagaagagagtgggggccaatattcaacattcttaaagaaaagaattttcaacccagaatttcatatccagccaaactaagcttcataagtgaaggagaaataaaatactttatagacaagcaaacgctgagagattttgtcaccaccaggcctgccctaaaagagctcctgaaggaagcgctaaacatggaaaggaacaaccggtaccagccgctgcaaaatcatgccaaaatgtaa

SEQ ID NO: 139101 - DNA, 1971 bp, Homo sapiens
atgacaatcaagggtgaacaggcgaaaaaacagctgattgctgccgcactggcgcagtttggtgaatatggaatgaacgccaccactcgcgagatagccgcccaggccgggcagaatatcgctgccatcacctactacttcggttcgaaagaagatttgtacctcgcctgcgcccagtggattgccgattttattggcgagcagttccgtccgcatgccgaggaagccgaacgcttgttcgcgcaaccacagcctgatcgggctgccatccgtgaactgatccttcgcgcctgcaggaacatgattaagctgctcacccaggatgacaccgtcaacctcagcaagtttatctcccgtgagcagctctctcccacggcagcctaccacctggtgcacgaacaggaggcagagcaccgttttgcgatgggcgaactgccagatgaagtgctggagatctgccagcggctggcaaaactcaccgagatgctgcgtggcctggcggagttatttcttaacgatttaagtgagaaaaccggcagccatgacattgtacgtctgcatcggttgattttgcagatgaaccgcgcgttggggatgttcgaggcgcaaagcaaactctggcggctggcttcgctggcgcaatcttccggtgcaccggtgaccaaatgggcgacgcgggaagagcgcgaagggcagctacacctctggtttcactgcgtgggaatacgtgtcagcgatcagctggaaaggctgctgtggcgcagtattccgcacattattgtcacctccgcaaccttgcgttcgctgaacagtttttcgcgtttgcaggagatgagtggtctgaaagagaaagcgggcgaccgttttgtggcgctggattccccctttaaccactgcgaacagggcaaaattgttattccccggatgcgcgttgagccttccatcgacaacgaagagcagcatattgccgaaatggcggcctttttccgtaagcaggtggagagcaaaaaacatctcggtatgttggtactgtttgccagcggacgggcgatgcagcgctttctcgactatgtgacggatttacgtctgatgttgctggttcagggcgatcagccgcgttaccgtttagttgaactgcaccgcaaacgcgtcgccaacggtgagcgcagcgtgctggtgggcttacagtcattcgccgaagggcttgccagtcccggccccgagccccctccttttccggcagccttggagatgttgccttttcttaatttgcatatgtcgccggagcgaatgctgcagcggatggactcggaaaaagtggttaccttcaccacagcgctaatgaccgggctttccggggcaatggcgagcgtgcttttgctgctgatgaccgtagtttttatgctgtttgaagtgcgccacgtcccttacaaaatgcgttttgcgctgaataatccacagattcacatcgcgggattacaccgcgcacttaaaggcgtttcgcactatcttgcattgaagacgctactcagtttatggacaggtgtcatcgtctggctggggctggagctgatgggggtgcagtttgcgctgatgtgggcagtactggcgtttttgctcaactacgtgcccaatatcggcgcggtaatttccgccgtaccgccaatgattcaggtgctgctgtttaatggtgtttacgaatgtattctggtcggcgcattgtttttagtggtccatatggtcatcggcaatattttagaaccacggatgatgggccatcgcctggggatgtccaccatggtggtatttctttcattgttaatttggggatggctgctcggcccggtagggatgctactttcggtgccattaaccagcgtgtgtaaaatctggatggaaaccaccaaaggcggtagcaaactggcgattttactggggccgggcagaccgaaaagtcggttaccgggatga

SEQ ID NO: 139102 - DNA, 1380 bp, Homo sapiens
ttacccacacgggatactagaatttttataaacacatagatcaatcagctcggtaccgctggtcatttcgtatgcggcattactgcctgccatgctgccgaagctgcgcaccgtctcacggtgcagcctgtcccgcgtatactcgaccagcggcgtcccgcccagcttcattcccgccaggtaaccgctgccatacgtcagccactccaccggcggcaggctgtccggcgtgacgcggtttgccagcccctgctcgttgtatgcgtgtttcgtctcatgctgccacagcagttcccccgtctccgggttctccaccgtctggcattcgccggtcaggcggcctttatcgtcatagccatagtggacggcaacacggtggccttcgctcaggtggctgatgtctgtcagccagccgtggccatcatactgccactgcttctgtgtgagttttccggtcaggtcataatgataacgttgcgtccgcccgtcaaagccgccctgctgtaccagccggtccagcgcatcgtaactgaagacgctgtggctgccgtccaggaaccagttccccacagataccatggggcgacagtattcagaataatgcagacgattttcataaaacagatctgccgtttgctgctgtaaggcggcaacctcggcgttaaccggtttgatggtggtaggagggcgatgatctaagtaagaggcaatcaccggtgccggtaagcccatcgtttttgccagtaaagcgatgctttgctcgcgctggctgcgggttaacgcatcggcctcactaaaggttgccagtacgccctgaataaaagcgccgtttttttctgcatagggacgagctgccagataaaacgatccagtttgattgagatcggtgccgtctttcagcacccgcacgccgccctgtaataatgcagcagagtagtagggatcccagatagcccaggcgtcaacgttaccttgctggaacgcggcgcgggcatcagcgggcgtcaggtaagtgggttggatatcggtaaacttaagtccggcctgacgcagtgcacgcagtaaaaggttgtgtgaactggaacctttctgaaaggcaactttgtgacctttaagatcggctacggttttgatcgggctgttttctgccaccagaatcacttcggctttgggcttcggtggctcgacgcccacgtacaccaaatcagccccggcagcctgggcaaagattggcggaatatccccggtactgccgagatcaatactgccaacgtttaacgcttccaacatttgcggacccgcggggaactccacccaggagatttttgattccggatagcgttttccagtaactggtggcttttggcaggaccataccat

SEQ ID NO: 139103 - DNA, 1518 bp, Homo sapiens
  misc_feature (1)...(1518): n = a,t,c or g
ctccttgctggaatatgcgcgggaaaaactaaatggcctggatgtagaggtttatcactggaatctgcaaaacttcgccccggaagatctactttatgctcgtttcgatagtccggcactcaagaccttcaccgaacagctgcaacaggccgatgggctgattgtcgccacgcctgtgtataaagccgcctattccggtgcgttgaaaaccctgctcgacctgctgccagaacgcgctttgcaaggcaaagtggtgctaccgctggcgacgggcggtaccgtggcccatctgctggcggtcgattatgcccttaaaccagttttaagcgcactgaaagctcaggagatcctgcacggcgtgtttgccgatgactcacaagtaattgattaccatcacagaccccagttcacgccaaatctgcaaacccgtcttgataccgcgctagaaactttctggcaggcattgcaccgccgcgatgttcaggttcctgaccttctgtctctgcgagcaccgaagcccaaagccgaagtgattctggtggcagaaaacagcccgatcaaaaccgtagccgatcttaaaggtcacaaagtgcctttcagaaaggttccagtcacacaaccttttactgcgtgcatgcgtcaggccggacttaagtttaccgatatccaacccacttacctgacgcccgctgatgcccgcgccgcgttccagcaaggtaacgttgacgcctgggctatctgggatccctactactctgctgcattattacagggcggcgtgcgggtgctgaaagacggcaccgatctcaatcaaactggatcgttttatctggcagctcgtccctatgcagaaaaaaacggcgcttttattcagggcgtactggcaacctttagtgaggccgatgcgttaacccgcagccagcgcgagcaaagcatcgctttactggcaaaaacgatgggcttaccggcaccggtgattgcctcttacttagatcatcgccctcctaccaccatcaaaccggttaacgccgaggttgccgccttacagcagcaaacggcagatctgttttatgaaaatcgtctggtgccgaaaaaagtcgatattcgccagcgcatctggcagcccactcaactggaaggaaaacaattatgagtctgaatatgttctggtttttaccgacccacggtgacgggcattatctgggaacggaagaaggttcacgcccggttgatcacggttatctgcaacaaattgcgcaagcggcggatcgtcttggctataccggtgtgctaattccaacggggcgctcctgcgaagatgcgtggctggttgccgcatcgatgatcccggtgacgcagcggctgaagtttcttgtcgccgtgcgtcccagcgtaacctcacctaccgttgccgcccgccaggccgccacgcttgaccgtctctcaaatggacgtgcgttgtttaacctggtcacaggcagnnnnnnnnnnnnnnnnnnnnnnnnnnnnnngtcgtga

SEQ ID NO: 139104 - DNA, 691 bp, Homo sapiens
acgctggtcgtcattgaccagtagccgatatggcttttgtcgctgtcctgaatcggcagacaaagaatgccttcacgttaaaagcgcggcgggcaaaaaggccacaaacgtgggtcattacgccggatggttgcgaacgtattcgccgcacctggcggcccatcgggtaaactttttcttcggcatcaatgcgcacatggatcagcgcgggccagggcgattgatgatttcctgcaatgaagcctgcggatcggcttgttattcaaatcacagttatatgaggaacgacaagcacgcagtgcggagagcagacagcggtagagcagagggaggaggaccacgagttaaaagtgttataaaagcccccgttattaccccaaagaaaaagcccgttgtgtcgacactaaagcactgggtattgatgctcgcgtgggtaacctgttctccgctgactgttctactctccggacggcgaaatgttcgacgtgatggaaaaatacgcattctcggcgtggaaatggaagcggctgcgtctggcaatcagtcaggcgacgttccacgccttgttgccagagaagatcgggtgattcgctttggtaaagcacggcaacgcgatatgcactgctgcgtccttatcgcggaattgagcgtattccgtctggcgggtggacgataccggaaaggcgcataa

SEQ ID NO: 139105 - DNA, 2298 bp, Homo sapiens
atggtcatctgttgccagacggccctacaccatgggcggctttccgggcgttgcgctgctgacggaagagtacatcactttatggccagcaatttcgaccgcctgaccgtctggcaggacggcaaaaagtcgactttacgctggaggcatacagtattcccggaagttagcaaagagcaaatgcagatccgcgatattcggcgcgtccggcgttttatctcaccgcctcgcagcaacgctgggaagaaacctgaagaaagggttaaccaatccggatgcgacgccggaacagacgcggtcgcggtgaaagcgatcgacacgctcaacggtaactggcgctcaccggcgcatcatccagaacagcgcgtgcagcccaagtttgtgagtgatgatcgggcaagcaccatcgcaatggcaaagctggcaaatggcatcagccacgggagccgactgaaagcaaaattccggcggcgaaaatcaaattcatcggcctcggttgccgttaaacaatttgtccgagccccaaccggctaccagcgaccgataaatccgcccagttcaaacatcgtcactgccgtattcgccgtgccagatcgacgcccagtgtctcggacatatacaaattgccccagtcgttatcgccgcccggaccacatagaccagcacatagcaaaacgaaagcagccgatatacggattcagcaacacatatttgcgcgtcgtgtcgccatcaccgaccgccggtaaacctaacgcctgcgggcgatcgcgtagccgccgcagagaaaaatccccacgactatcgccatacaaccagcaatcatcatccggcacgccagccgtaatgcagcgcagccgctgccatcacaaggggaatagtgcgccgccgacgttatgcgccgtgttccataatgcccaccaatcgcgggctcggtacgtgaataccaggccgtttacagacgcgcacaaaccgaagaatttcatggtaaacatcaccacgcatccggtaatcggctgggccatcaggaaaaaatggttgtgttccagcgcctctgtagtcgattcatcatcgcgactttatctttcaattcgcgttgcaaaacattgccccgcgacgctgcatattttccggggcgttggtcacgatggaagttcggcgaccgtatttagctctcccagcagcagaccatgcttggccgctatcgctgacttcgacatggtgcgtaacgcagtagatgcactaaagcactgggtattgatgctcgcgtgggtaacctgttctccgctgactgttctactctccggacggcgaaatgttcgacgtgatggaaaaatacgcattctcggcgtggaaatggaagcggctggaagaagatgtgctctacgccctaccgtatttaacggtgaatatactggcggttggttggtcggggaggggattatcagcgatggattactgcacaacaccctgcggaaattcctcttgccgcagccaactcgctgtttagccatcgtttacacgaccgtctgggtagccgcagtatacagattcactgcattctcaggggtcggcaagcagtattggatgcgtcatgtcggagggcacgaacgttcaagggccgctaggcggcgatttgcgcagtggagtagcaacgcgcaggatcgctggcatcttggcgtgatggcggctacgccaatcagcacagtaatactcagagtaatcgtgtgggttataatcggatgggcgcatcagcggttacagcgctgggctgtacgcgacctggatcagaacgatgcgaataagaccggcgcttatgttgacagctgggcgcttataactgccgttaccactcccggccggcattggcgcggagtactggcgcgactatctaaaattaagcagtacggctatttgcgactgaccaactggcgcagcgcacctgaactggacaacattatgaagcacgcccggccaatggctgggatgtacgcgcagaaagctgctacccgcctggccgcaccttggcgatgtgttcgtacacttctctgctatccagacgatggttacaaatctctggacgaaggtcagaaagtgtccttcaccatgaaagcggcgctaaaggcccggcagctggacgttgataagcggggtcatcgtgatgattaccgtcctctgatcgccacccagttcgcgccttacttcactgaaatggcgctcaaagcggtttcagttttgccggtgaaagtgcgcaaatctcagcgttgtccgtggcaatatgttcggttggtcgatttctga

SEQ ID NO: 139106 - DNA, 1679 bp, Homo sapiens
atgggggtagagccgtcatggcttggtgccatccttgtgatagccctgaaaggatgcatgatgctcatccgtggccactctgctgcaggtctgctggagttttctggagttctactccagaccctgtttgcctgggtatcaccaatggagatggcagaacagcaaagatattgccgcctgttccttcctctggaagcttcgtcccagaggggcacccactggatgccagccacagctctcctgtatgaggtgtctgtcgacccctactcggagatgtctcccagtcaggatacacagagagaggaggaatctagagaggcagtctggccacagcagccttgcttagctgtggtgggctccacccagttcgaacttcgtttacactgtgaggataaaactgcctacttaagcctcagcagtggtggatgcccctcccgcgatcaagctcgagcatcccaggtcaacctcagactgctgtgctggcagcaaaaatttcaggctagtggatcttggcttgctgggctctgtggaggttgggcctcggatccagtcccatcttttacctgggtaaattcatcccacttacccggagttagccaattggtgtttcacacagatgattttcctttgggtcgggtgtctcttcagtatcatcccttctgtggttcgccagaaagatattaccagaaaggggtccaaatccagaccccaagagagggttcttggatctcacacaaaaaagaattcaaggccggacttaagtttaccgatatccaacccacttacctgacgcccgctgatgcccgcgccgcgttccagcaaggtaacgttgacgcctgggctatctgggatccctactactctgctgcattattacagggcggtgtgcgggtgctgaaagacggcaccgatctcaatcaaactggatcgttttatctggcagctcgtccctatgcagaaaaaaacggcgcttttattcagggcgtactggcaacctttagtgaggccgatgcgttaacccgcagccagcgcgagcaaagcatcgctttactggcaaaaacgatgggcttaccggcaccggtgattgcctcttacttaaatcatcgccctcctaccaccatcaaaccggttaacgccgagggtggcgccttacagcagcaaacggcagatctgttttatgaaaatcgtctggatctggctctgaaggggctacgtgttttgctcgtggaaggtaacgacccccagggaacagcctcaatgtatcacggatgggtaccagatcttcatattcatgcagaagacactctcctgcctttctatcttggggaaaaggacgatgtcacttatgcaataaagcccacttgctggccggggcttgacattattccttcctgtctggctctgcaccgtattgaaactgagttaatgggcaaatttgatgaaggtaaactgcccaccgatccacacctgatgctccgactggccattgaaactgttgctcatgactatgatgtcatagttattgacagcgcgcctaacctgggtatcggcacgattaatgtcgtatgtgctgctgatgtgctgattgttcccacgcctgctgagttgtttgactacacctccgcactgcagtttttcgatatgcttcgtgatctgctcaagaacgttgatcttaaagg

SEQ ID NO: 139107 - DNA, 1112 bp, Homo sapiens
cggcacgctgcccgggtgtggagcaatgcacacatgccctagcggcccagcgactcatctcgtccgccgtcgcatcgtccgcctccccgcttgtgtcgtcaccagagcgaacgtgccgactccctcccgacctgtcaatgcgacaatcggcgcgtttcactcgggatagatggcatcccaggggcggcgtctgtcagcacagtacccatggtcaccgtttcaatacgcagacccgtcccgtacccaccgttcccggtaggctggtcttcaccggtacctccaaagcgcccaaaatttccgtaatgggtcccggtatgggtatcccgtcatgctccatctccgccaaagaactgatcaccgatttcggcgtgaagaaaattatccgcgtgggttcctgtggcgcagttctgccgcacgtaaaactgcgcgacgtcgttatcggtatgggtgcctgcaccgattccaaagttacccgcatccgttttaaaggccaagcctttggcggtatcgctgacttcgccatggggcgtaccgcagtagatccaggtaaagcactgggtattaatgctcgcgtgggtaacctggtctccgctgacctgttctactctccggacggcgaaatgttcgacgtgatggaaaaatacggcattctcggcgtggaaatggaagcggctggtatctacggcgtcgctgcagaatttggcgcgaaagccctgaccatctgcaccgtatctgaccacatccgcactcacgagcagaccactgccgctgagcgtcagactaccttcaacgacatgatcaaaatcgcactggaatccgttctgctgggcgataaagagtaattgtgtttcgctgcaaggcgattgccttgtgaagccggagcgggagactgctccggctttttagtatctattcatttttctctccagcttgaatattttcgctatacttttcagtgaaatgtgttaataaatctattcaagtatctattcacgaatctattcattaatgagcgagctgactgatcttttactgcaagggccgcgttctgccccggaattgcgccagcgtctggcaatcagtcaggcgacgttctcacgccttgttgccag

SEQ ID NO: 139108 - DNA, 1534 bp, Homo sapiens
tcatgtgcagctgttactggcgctgttttttgccatcgtcctcaacccgctcgtcacatggtttattcgtcggggagtacaacgccccgttgccattacgattgtagtggtggtgatgctgatcgcactaaccgcgctggtcggcgtactggcggcatcgtttaacgaatttatctctatgctgccgaagtttaataaggagctgacgcgcaaactttttaaattgcaggagatgttgccttttcttaatttgcatatgtcgccggagcgaatgctgcagcggatggactcggaaaaagtggttaccttcaccacagcgctaatgaccgggctttccggggcaatggcgagcgtgcttttgctggtgatgaccgtagtttttatgctgtttgaagtgcgccacgtcccttacaaaatgcgttttgcgctgaataatccacagattcacatcgcgggattacaccgcgcacttaaaggcgtttcgcactatcttgcattgaagacgctactcagtttatggacaggtgtcatcgtctggctggggctggagctgatgggggtgcagtttgcgctgatgtgggcagtactggcgtttttgctcaactacgtgcccaatatcggcgcggtaatttccgccgtaccgccaatgattcaggtgctgctgtttaatggtgtttacgaatgtattctggctcaccctgctggacatctgcggttacagtatcactctgcgctggcgaacgattttgcggaagcggaatcggcgcgtcgccgcctcaaaaaccgtattgcgctgacgctctcgatggcgacgatggccttcggcctgttctggctgatctggattttaatgtccaccatcactcgcggtatcgacggtatgtcgctggcgctgttcactgaaatgacgccgccgcccaatacggaaggtggtggtctggcgaacgctctggcgggtagcgggctgttaattttgtgggccacggtattcggtacgccgctgggcattatggcggggatttatctggcggaatatggtcgtaaatcctggctggcagaagtgattcgcttcattaacgacattctgctctctgcgccgtcgattgtggttggtctgtttgtttacaccattgtggtgccgattgttatccgcaccaccgagaacatgctgaaactggtgccgtacagcctgcgtgaagcggcttatgcgctgggtacaccgaagtggaagatgatctctgcgattacgctgaaagcgtcggtgtccgggattatgaccggtatcctgctggcgattgcccgtattgctggtgaaaccgcgccgctgctgtttaccgcgctctccaaccagttctggagcacggacatgatgcagccgatcgccaacctgccggtgacgatctttaagtttgcgatgagcccgtttgcggaatggcagcaattggcctgggccggggtattgatcattaccctgtgcgtactgctgctgaacattctggcgcgcgttgtttttgcgaagaataaacacggttga

SEQ ID NO: 139109 - DNA, 2142 bp, Homo sapiens
aacgttcagcagtttatcgatgaaggcaattatacatccggcgacaaccatacgctgagagaccctcactacgttgaagacaaaggccataaataccttgtattcgaagccaacacgggaacagaaaacggataccaaggcgaagaatctttatttaacaaagcgtactacggcggcggcacgaacttcttccgtaaagaaagccagaagcttcagcagagcgctaaaaaacgcgatgctgagttagcgaacggcgccctcggtatcatagagttaaataatgattacacattgaaaaaagtaatgaagccgctgatcacttcaaacacgagagaaaccgtcgatttcaacggtaaacatattcatgtgcgcggagcaaaactgctcttcccggcgattcaacagccgtatccgccactttactttggcggatcgtcagatgtcgcccaggagctggcggcagaacaggttgatctctacctcacctggggcgatccggcggacctgcgttaatgagattgtcgaacaagtgcgggcgaaagctgccgcgcatggacgcaaaattcgtttcggtattcgtctgcatgtgattgttcgtgaaactaacgacgaagcgtggcaggccgccgagcggttaatctcgcatcttgatgatgaaactatcgccaaagcacaggccgcattccgcccggacggattccgtagggcaacagcgaatggcggcgttacataacggcaagcgcgacaatctggagatcagccccaatttatgggcgggcgttggcttagtgcgcggcggtgccgggacggcgctggtgggcgatggtcctacggtcgctgcgcgaatcaacgaatatgccgcgcttggcatcgacagttttgtgctttcgggctatccgcatctggaagaagcgtatcgggttggcgagttgctggtcccgcttctggatgtcgccatccccggaaattccccagccgcagccgctgaatccgcaaggcgaagcgctaaggaagaaataatggcacgcccagtgaagaagtggttattgcgcgttgccccctggtttttaccggtgggcatcgtggcggtgtggcaactggcctcctcggttggctggctgtcgacgcgtattttgccttcaccggaaggagtggtgacggcgttctggacgctctccgccagcggcgaactgtggcagcatctggcgatcagctcctggcgggcgctgattggcttttcaattggcggatcgctggggttgattttgggactgattagcgggctatctcgctggggagaacggctgctggatacctcaattcagatgttgcgcaacgtgccgcatctggcgctgatcccgctggtgattttgtggtttggcattgatgaatccgcaaaaatctttctggtggcgctcggtacgctattccccatttatatcaacacctggcatggcatccgtaatatcgatcgcgggttggtggagatggcgcgtagctatggattatccggcataccgctgtttatccatgtgatcctgcctggtgccctgccctcaattatggtcggcgtgcgttttgcgttgggcctgatgtggctgacgctgattgttgccgaaaccatttctgccaattcaggcattggttatctggcgatgaatgcgcgggagtttttgcaaacggacgtggtggtagtcgctattattctttacgccctgctcggccaactggctgacgtcagcgcgcagctgttagagcgcctctggttgcgctggaacccggcttatcatttgaaggaggccacgggcacgccattgttgctcaatgcagtaagcaaacattacgcggaaaatatcgtcctgaaccaactggatttacatattccggcaggtcagtttgtggcggtggtgggccgtcagcggtggtggcaaaagtaccctgctgcgcctgctggcaggtctggaaacgccaaccgcaggcgatgtgttagcgggcaccatcaccgctggtctgaaattcaggaagacacgcgaatgatgtttcaggatgcgcgtctgctaccgtggaaatcggtgattgataacgttgggttaggccttaaaggccagtggcgcgatgccgcacgtcgagcgttggtctgcg

SEQ ID NO: 139110 - DNA, 2678 bp, Homo sapiens
atggtcctaaaccgcttgttaactggtttattcttcgggagtacaccgccccgttgccattacgatttaattggtgctgatcctgatcgcactatccgctctgttcggctgtactggcggcattcgttgaacgaattaatctctatgctgccgaagtttaataaggagctgacgcgcaaactttttaaattgcaggagatgttgccttttcttaatttgcatatgtcgccggagcgaatgctgcagcggatggactcggaaaaagtggttaccttcaccacagcgctaatgaccgggctttccggggcaatggcgagcgtgcttttgctggtgatgaccgtagtttttatgctgtttgaagtgcgccacgtcccttacaaaatgcgttttgcgctgaataatccacagattcacatcgcgggattacaccgcgcacttaaaggcgtttcgcactatcttgcattgaagacgctactcagtttatggacaggtgtcatcgtctggctggggctggagctgatgggggtgcagtttgcgctgatgtgggcagtactggcgtttttgctcaactacgtgcccaatatcggcgcggtaatttccgccgtaccgccaatgattcaggtgctgctgtttaatggtgtttacgaatgtattctggtcggcgcattgtttttagtggtccatatggtcatcggcaatattttagaaccacggatgatgggccatcgcctggggatgtccaccatggtggacggcgtgcgggtgctgaaagacggcaccgatctcaatcaaactggatcgttttatctggcagctcgtccctatgcagaaaaaaacggcgcttttattcagggcgtactggcaacctttagtgaggccgatgcgttaacccgcagccagcgcgagcaaagcatcgctttactggcaaaaacgatgggcttaccggcaccggtgattgcctcattacttgagatcagtcagcccgtctctaaccatccgatcagaaccaggttaacagccgaggttgccgccttacagcagcaaacggcagatctgttttatgaaaatcgtctggtgccgaaaaaagtcgatattcgccagcgcatctggcagcccactcgactggaaggaaaacaattcatgagtctgaatatgttctggtttttaccgacccacggtgacgggcattatctgggaacggaagaaggttcacgcccggttgatcacggttatctgcaacaaattgcgcaagcggcggatcgtcttggctataccggtgtgctaattccaacggggcgctcctgcgaagatgcgtggctggttgccgcatcgatgatcccggtgacgcagcggcgtgaagtttcttgtcgccctgcgtcccagcgtaacctcacctaccgttgccgcccgccaggccgccacgcttgaccgtctctcaaatggacgtgcgttgtttaacctggtcacaggcagcgatccacaagagctggcaggcgacggagtgttccttgatcatagcgagcgctacgaagcctcggcggaatttacccaggtctggcggcgtttattgcagagagaaaccgtcgatttcaacggtaaacatattcatgtgcgcggagcaaaactgctcttcccggcgattcaacagccgtatccggcactttactttggcggatcgtcagatgtcgcccaggagctggcggcagaacaggttgatctctacctcacctggggcgaaccgccggaactggttaaagagaaaatcgaacaagtgcgggcgaaagctgccgcgcatggacgcaaaattcgtttcggtattcgtctgcatgtgattgttcgtgaaactaacgacgaagcgtggcaggccgccgagcgttttgtgctttcgggctatccgcatctggaagaagcgtacgggttggcgagttgctgttcccgcttctggatgtcgccatcccggaaatccccagccgcagccgctgaatccgcaaggcgaagcggtggcgaatgatttatccccccggcgaactgtggcagcatctggcgatcagctcctggcgggcgctgttggcttttcaattggcggatcgctggggttgattttgggactgattaggggctatctcgctggggagaacggctgctggatacctcaattcagatgtgcgcaacgtgccgcatctggcgctgatcccgctggtgattttgtggtttgcattgatgaatccgcaaaaatctttctggtggcgctcggtatgattggggattttctaaccaagctgataacacgttcgcggtattctgggcttcacccggtacttacaaaggccgcaaaattccgtaatgggtcacggtatgggtatcccgtcctgctccatctacaccaagaactgatcaccgatttcggcgtgaagaaaattatccgcgtgggttccgtggcgcagttctgccgcacaccatgctttgccgctatcgctgacttcgacatggtgcgtaacgcagtagatgcactaaagcactgggtattgatgctcgcgtgggtaacctgttctccgctgactgttctactctccggacggcgaaatgttcgacgtgatggaaaaatacgcattctcggcgtggaaatggaagcggctggtatctacggcgtcgctgcaaatttggcgcgaaagccctga

SEQ ID NO: 139111 - DNA, 372 bp, Homo sapiens
cggtgctctcctgctggcgacttgccccttgtggctgaatcgtcggacggatgagaaagccgagcagcatggatgccacgcccaacgtcaacagcgcgaggatcacccgataatcaaacatagtgaccagtttgcccgtcagcgccgagccaatgacaaacgccaccgagccccacagtcgcacagtggtgagaaaaagagggttaaagccaatcatcaccagcatcagccacgctacgtgcgcccccgcccagaaggcgacagcaaagagaagtgtcagcagtgccagcacgcgcaaggcggaaatcaggcgggaaggatcgctgacgcggggcgcgatgagcaaactcccgaggaaacgggcaaccagac

SEQ ID NO: 139112 - DNA, 2760 bp, Homo sapiens
atggcggcgaagggacggtggatgccgatggtcgccgcgacgggcggcaacatcgtgacgcttgaagtctgcgggccgatgggcgaaaaagtgaatgctttttatggccttaccggcgacgggaaaacggcggtgattgagatggcggcagcaagtggcctgatgctggtcgcgcctgaaaagcgtaatccgttgctggcctccagttttggtacgggggagttaattcgtcatgcgctggataacgacattcgccatattattctcggcattggcggcagtgcgacggtcgacggcggtatgggcatggcgcaggcgctcggtgtgcgtttccttgatgccgacggtcaggcgctggcggcaaacggtggcgtcaccatcggggataattctgttattggcgcgggtagtatcgtcacaaaagacattccaccaaacgtcgtggcggctggcgttccttgtcgggttattcgcgaaataaacgaccgggataagcactattatttcaaagattataaagttgaatcgcctacaagttcagcgatctacattagccgcatccggcatgaacaaagcgcaggaacaagcgtcgcatcatgcctctttgacccacagctgcggaaaacgtactggtgcaaaacgcagggttatgatcatcagcccaacgacgcacagcgcatgaaatgcccagtccatcaggtaattgccgctgatactacgcagcacgccagaaaaccacggggcaagcccggcgatgataaaaccgattccctgcataaacgccaccagcttgccagcaatagccggttgcacagagtgatcgagcgccagataaagcaccatcgttctcccatggagctgatgacgatgctgcgtgacgtgcgcttaaacgggctgcccctgatcgacatccgcgtgccagcggcagccagcacagcacgatcaacaatcccattaagaccgccgaccagcgcgccagccgtgcccgccaggaaggggaacggctccagtcgcgcgctggtcgccagcggaaacagcatcccggcaccgaaaaagaacagcgcggcgggaacgagcagcgtccagacattcatcacgccaaaccagtcggggatccacatcagcaagccagccagcaggcagcagataaccgactgccacattaaccacgccggagcaggcttcaaaggcggcaatcccggccagaccgccaatcagcatcagcaaataacagttaaaaccgctgttaccgactctagagatccccggtaccgagacaacacccacgctcagaggagctcgcgcaagaagtccccgttgccctggtctacaacggcattccgcatgtgccgcccctttatggggttgaaggcacgcgcccgtgcgctggcgggacgtacgggctgtggcgtatgcggcgtggagcaacttaatgacatcggaaaaccggtgcagccgctaccgttcacccagacgtctgacctcaacaaactggatgatgcattacgtcatctcaacgattttcagccagtggggcaactgactggttgtactcacgccgctgcctggatgttgccatctggcgaactggtcggcgggcatgaagacgtgggtcgccatgtggcgctggacaaactgttaggccgccggtcacaagaaggggaaagctggcagcaaggtttaagattagcgtgcaagaaagaattaaagcttgccccactgaaagcatccaaactcaaattcgcggcagaggcgcttccggatgccatctcccgtgcagccatgacgctggttcagtctctgctcaatggcaacaaaatcctctgttgtggtaatggaacttccgctgccaatgcacagcattttgctgccagcatgatcaaccgtttcgaaacggagcggcccagcttacctgccattgcactaaatactgataatgttgtcttaacggcgattgccaacgatcgcttacatgatgaagtgtatgcaaaacaggtgcgggcgctgggtcatgcgggagatgtattgttagccatttccacccgtggcaacagccgcgatattgttaaagcagttgaagccgccattacgcgtgatatgaccattgtggcattgaccggctatgacggcggcgaacttgcaggtttgttagggccacaggatgtggagatccgcattccttcgcatcgtagtgctcgcattcaggaaatgcatatgctgacggtaaattgcctgtgcgatctgatcgataacacgcttttgactctagacatccccgataccgagccagatccgccaatacagcattgctgtggctcaaccggaaatctggggttatcaatcggcattatgagcgcccgcattggctttaaggtgacagttcatatgtctgctgatgcccgggcatggaaaaaagcgaaactgcgcagccatggcgttacggtcgtggaatatgagcaagattatggtgttgccgtcgaggaaggacgtaaagcagcgcagtctgacccgaactgtttctttattgatgacgaaaattcccgcacgttgttccttgggtattccgtcctggccagcgtcttaaagcgcaatttgcccagcaaggccgtatcgtcgatgctgataaccctctgtttgtctatctgccgtgtggtgttggcggtggtcctggtggcgtcgcattcgggcttaaactggcgtttggcgatcatgttcactgcttttttgccgaaccaacgcactccccttgtatgttgttag

SEQ ID NO: 139113 - DNA, 2460 bp, Homo sapiens
atgggcgatgagcggatgtggccgttaagtatgccatgctacatcgcagaaggtcaggacatcgaactggcacagtacggcacttctaacaccggacgctttaaaacgctgtatcgtgaagggctgaaaaatcgctacggcgcgctgatgcaaaccatttccggcgtgcactacaatttctctttgccaatggcattctggcaagcgaagtgcggtgatatctcgggcgctgatgccaaagagaaaatttctgcgggctatttccgcgttatccgcaattactatcgtttcggttgggtcattccttatctgtttggtgcatctccggcgatttgttcttctttcctgcaaggaaaaccaacgtcgctgccgtttgagaaaaccgagtgcggtatgtattacctgccgtatgcgacctctcttcgtttgagcgatctcggctataccaataaatcgcaaagcaatcttggtattaccttcaacgatctttacgagtacgtagcgggccttaaacaggcaatcaaaacgccatcggaagagtacgcgaagatcggtatcgagaaagacgaatgccaacaaacagaccacgcgccaaaaatctggtctgcacgcggtggcacaagaccgtgcgctgaaagacggcaaactgaatgtttactggaccatgtgcgcaatatgcgaaagaacaagaacgcccggattggctgggtcctgagcagcaacatactcttttgctaccaggttcatcccgtcacgcagtggcgtcactggataccgcttattgatttgaaagggcaagctgccaacaggctgtttgcaaaactcaggagtggggcattccagccgtgctggcgccgtggcgtgtgcccatcggctcgccggcgggatgatgtagtgttgttgcacgtccctccggtcactcgtgccccctttacctgtcgtctcttctccggcgggacaccgcacccgggcttggcggggttggcaattccgttagtcgccgggccgactattctcgccacgctgatgttgttgtctcatcagtacccgaatcagatggggcatctggtgattgctctgctgctggcctggggcggcacctttgtcatcctgctacagtcttcgctatttttacgtctgctgggcgagaaaggggatattttgatatcttctcatacgatactgccatccctggtcagagtgcagaacaggatgctcgtgaggattaagctttttgaatgcctgatcgagcatattctcaaccatgttcatcactggtctttccgaaaggctgtaagaaataacttcgttgttgaagagatctattactggagacaaatacagcttgcgcccattgactgcaaattcagtaacatcggtaacccacttctcgtttggccgcgtagcctgatggtgatgattcacaccactacctggtatgtgaccaatgctcatagtgttagccccgtcacatgggatatcgccaatgttctgaattctgcctctcgtgtcagcgtgccgctatttttcatgatttccggctatctcttttttggcgaacgcagcgcccagccgcgccatttcttgcgtatcggcttatgtctgattttttatagcgcaatcgcactgctctacattgcgctgtttacctccatcaatatggagttagcgctgaaaaacctgctgcaaaagccagtgttttaccacttgtggtttttcttcgcgattgcggtgatttatctggtttcaccgctgattcaggtgaagaacgtcggcggaaaaatgttgctggtgctaatggcggtgattggcattatcgctaacccaaacacagtgccgcagaaaattgacggttttgaatggctgccaattaacttatatatcaatggcgatactttttactacattctgtatggcatgttgggccgcgctatagggatgatggacacacagcataaagcactgtcgtggaaaccaccgcgccgggggacacgggaggccaacgagaacacacacaccacaatacagcagctacaccaaaaagaaacagacagcacacaagacgaaccgtcgaaccgaaacaaatcaccaaaacacaaaggcaaaaccaacaggaaaacacgccacaccaggaatacaccacgaaccaaacacgcgacacaaaacacagaggcacaccgacgaagcaaacacgccaccgacagcagcgacccgcccaacaacacccaagagcactacgcccaaacaccggaaacctacaaaccaagcggcaacacaaacaagaaagtgaccaccacacgccgagcacgacaacaacaacaaggcagcagcgcctgcttaggtgactctagaggatcccgacaactccaccgagccccacagtcgcactttgccgtaatcaagcgggaactgcttttgccacgtattcgccagtgcatcggtcaacggtaccagtggtga

SEQ ID NO: 139114 - DNA, 993 bp, Homo sapiens; identical to SEQ ID NO: 138799

SEQ ID NO: 139115 - DNA, 2625 bp, Homo sapiens
attatcgggccggaggcgcattcaaccccattttaaaaagcagcagtctcgttgatacgctggcagttattctctccaatatgcatatgcacccgattcttctggcctggttagtggctcttattctgcatgcggcagtgggctccgctaccgtggcaatgatgggggcaacggcaattgttgcacccatgctgccgctgtatcccgacatcagcccggaaattattgcgattgctatcggttcaggtgcaattggctgcactatcgttacggactcgcttttctggctagtgaagcaatattgcggcgctacgctcaatgaaacatttaaatactatacgacagcgacatttatcgcttcagttgtcgctctggcgggcacattcctgctgtcatttatcatctaagcgcaaagagacgtactatggaaaacgctaaaatgaactcgctcatcgcccagtatccgttggtaaaggatctggttgctcttaaagaaaccaccgggggtttatcccggccacgcttcatggggttaagggtttaccttatgttggcctgaccgaacaggatgttcaggacgcccatggcgcgcttatcccgttttgcaccctatctggcaaaagcatttcccggaaagtggctgcccacgggggggattattgaatccagagctgggggccctttccagctatgcaaaaacggctgggaaaaagaatatcagcaaccgatcagcgggcaactgttactgaaaaaagatagccatttgcccatttccggctccataaaagcacgcggcgggatttatgaagtcctggcacacgcagaaaaactggctctggaagcggggttgctgacgcttgatgatgactacagcaaactgctttctccggagtttaaacagttctttagccaatacagcattgctgtgggctcaaccggaaatctggggttatcaatcggcattatgagcgcccgcattggctttaaggtgacagttcatatgtctgctgatgcccgggcatggaaaaaagcgaaactgcgcagccatggcgttacggtcgtggaatatgagcaagattatggtgttgccgtcgaggaaggacgtaaagcagcgcagtctgacccgaactgtttctttattgatgacgaaaattcccgcacgttgttccttgggtattccgtcgctggccagcgtcttaaaagcgcaatttgcccagcaaggccgtatcgtcgatgctgataaccctctgtttgtctatctgccgtgtggtgttggcggtggtcctggtggcgtcgcattcgggcttaaactggcgtttggcgatcgtgttcacgggttgcaggcatgatagattcccataatgccccagcgcactacgccgcaaatcgccgagatcaacagcatatcgcgtgcacgccgaggccgagtagccagctgcctgccagtaaatggcgctaaaaccgtaataggccgcatgtgccccctgcaataaacaaacgcaggccagaaagcgccagttctggcgaaccagcgccaaccacgcagaccaaccggtgctctcctgctggcgacttgccccttgtggctgaatcgtcggacggatgagaaagccgagcagcatggatgccacgcccaacgtcaacagcgcgaggatcacccgataatcaaacatagtgaccagtttgcccgtcagcgccgagccaatgacaaacgccaccgagccccacagtcgcactttgccgtaatcaagcgggaactgcttttgccacgtattctccagtgcatcggtcaacgggaccagtggtgagaaaaagagggttaaagccaatcatcaccagcatcagccacgctacgtgcgcccccgcccagaaggcgacagcaaagagaagtgtcagcagtgccagcacgcgcaaggcggaaatcaggcgggaaggatcgcatattctgcgcgacgaagaaaacacccgttttcgccatacttcgactaccacgcgaccgttatctttactgcggttttgcggcgtgtagcttttttgctgaagttgcttcagcgcggcggcgtcctgctcttcggcactcggcttattaaattgcgattgcaggaagttcaccatctgattgagacggatatccccgccaccaatcgccgccagcaactcgtcgacatcattgaagttgtaacgcggcagcagatgtttttctgcttctttcaggctgatccccagatgttccagctcgtcgtcaaggatttgccgcccagccagaatgtttttgtcacggtcctgtttacggaaccaggcgtgaattttcgaacgcccacggctggttgtgacgtaaccgaggtttgggtttaaccagtcacggctggggttcggctgtttctgggtgataatttcaatctggtcgcccatctgcagtttactacgcgacagtaactccagttggtcggcttcggcggtaaaaccgggaagcagttccctttcatcacatttgacgaaaaaatcatgtcctgcatagcgcaaatgccatgcggcatggacttctccgccaggcagttcattacgcagttcgatttcgccttcacctaactgctcgctcaaaagacgactgattgcctgccacat

SEQ ID NO: 139116 - DNA, 1497 bp, Homo sapiens
ggcccgaatatgcagtaagcgacgcagacgaccgagcacttcaacaatgcccatcaccgccagttcttccatttcgtaccaggcttcgcagccttcagcctgcattcgtggcccggcaacaccaacaaagcgggcgttgggcacatgttctttcagagcgcggattaaaccggcccccaggatatcgccggaggtttctccggcgaccagggcaatcgttaatggacgctgttcagtcattaacgaatcagaccgcgcgttgagcgtgcaaagaaatcggtaaaggctttcacttccggatatgtttccgccagttcagcaatttccggtttcacttcatcgagcgttttaccgctacgataaatcagcttattacgcattgcggatagccggaatcgcctcacggctgaatccgcggcgcttcagcccttctatattgacacccgaacggcggtgcgtggttaccctgcgcaatgacataaggagggacgtcttgcgccacaaccaaccccgaagtacggcgagcacgcgacaggcccggcgcaggatgaagagttcgtgctggcacatgccgacaacgtcgaagccgcaggctttgtctcacacctcaaactcccccactacgtcgatttccaggccgaactggagctactcaaacgtctgcaacaggagcagaaccatggctaatctgagcggctacaactttgcctacctcgacgagcagaccaaacgcatgatccgccgcgccatcttaaaagcggtggcgatccccggttatcaggtgccgtttggcgggcgcgagatgccgatgccgtacggactggggaaccggcggcattcagcttaccgccagcggtgattggcgaaagcgacgtgctgaaggtgattgaccagggcgcggatgacaccaccaacgccgtgtcgattcgcaacttcttcaagcgcgtgaccggggtaaacaccacggaacgtacggacgatgcgacggttatccagacgcgtcaccgcatccccgaaacgccgctgaccgaagatcagataattatcttccaggtgccaatccccgagccgctgcgctttatcgagccgcgcgaaacggaaacccgcaccatgcacgcgctggaagagtacggcgtgatgcaggtgaaactgtatgaagatatcgcccgcttcggtcatatcgccaccacctacgcctatccggtgaaggtaaatgggcgctacgtgatggacccgtcgccgatcccgaaattcgataacccaaaaatggacatgatgcccgccctgcaactgttcggcgcggggcgcgagaagcgcatctatgcggtgccgccgtttacccgcgtggaaagtctcgatttcgacgatcacccgttcaccgttcagcagtgggatgagccatgcgccatctgcggatcgacccacagctatcttgatgaagtggtgctggatgacgccggaaaccgcatgtttgtctgctccgataccgattattag

SEQ ID NO: 139117 - DNA, 405 bp, Homo sapiens
tcagggaatccgaacgaccctagcacggacctgaggcacgatccgcaggaggcggggcttgatttctttcaacgcgccgccactgtcgaagttttcaggttcaatggcatccacatcactggaaggtggacgacgcccctgagcaaccaggtaatttttcgctgtatttacagcaatccgatacagccatgtataaaaagcgctatctccccggaacgaatccagcgcacgataggctttaataaaagcttcttgtaccacatcgggaacatcacccgacggcacatagcgggaaaccagactcgccactttatgctgatagcgcactaccagtaagttaaaggctttctgatctcccttctggacccgttcaaccaggacctggtccgttaactgctcgctcat

SEQ ID NO: 139118 - DNA, 2454 bp, Homo sapiens
atggggtacgtgggtttctcggtggcgtttgcttttgccattgcttctttgctgagcgggcgtctggacagcacttatgcgcgttttactcgtccgtggacgctggcagcgtggatcttcctgacgctcggcatcgtgctcggttccgcatgggcctattacgaactcggctggggtggctggtggttctgggatccggtagaaaacgcctcgtttatgccgtggctggtggggactgcgctgatgcactcactggcggtcactgaacaacgcgccagcttcaaagcgtggacattactgctggcaatcagtgccttctcgttgtgtctgttggggactttcctcgtgcgttccggcgtgctggtatcggtacacgcgtttgcgtctgatccggcgcgcggtatgtttatcctcgcctttatggtgctggtgattggcggttcgctgctgctgtttgccgcgcgtggacacaaagttcgctcacgcgtaaacaatgcgctgtggtcgcgggaatctttgctgttagcgaacaatgttttgctggtcgctgcgatgctggtggtgttgctggggacgctgctgccgttggtgcataagcaactgggactgggcagtatttcgattggcgaaccgttcttcaacaccaggtttacctggctgatggtcccgtttgcgctactgcttggtgtcggtcctctggtgcgctgggggcgggatcgcccgcgtaagatccgcaatttattgattatcgccttcatctctacgctgcaaagttgtggcgatgacggtgctcggcactggacaatggccctgctggattgcggtgctggttctgacttcaacgccaacggcgaaaaagcggtcttcttcggtgcgatgtatgacctgaaaaactggaatcttccaggcttcgccatcggcgcttcctacgtttacgcatgggatgctaaacctgcgacctggcagagcaatccggatgcgtactacgacaaaaaccggactattgaaaaccgaatcagagcgtccgaccttagtggatcccgtctgtacatgcatcgcatcgaaaaagactggtacacgctgatgaacaccatcatcaacggttcagcttctgaagcagatgccgcacgtaagcaactgcgcgaagaactgctggcgattgcgccggtcttcggtcagaagccgtacttcctgagcgatgagttcagcctggtcgattgctatcttgctccgctgctgtggcgtctgccgcaactgggcatcgagttcagcggcccgggtgcgaaagagctgaaaggctatatgacccgcctaacaccacgtcgtccctatctgctgcgtgcattctatgagtggttgctggataaccagctcacgccgcacctggtggtggatgtgacgctccctggcgtgcaggttcctatggaatatgcgcgtgacgggcaaatcgtactcaacattgcgccgcgtgctgtcggcaatctggaactggcgaatgatgaggtgcgctttaacgcgcgctttggtggcattccgcgtcaggtttctgtgccgctggctgccgtgctggctatctacgcccgtgaaaatggcgcaggcacgatgtttgagcctgaagctgcctacgatgaagataccagcatcatgaatgatgaagaggcatcggcagacaacgaaaccgttatgtcggttattgatggcgacaagccagatcacgatgatgacactcatcctgacgatgaacctccgcagccaccacgcggtggtcgaccgggattacgcggcctgacgctgcgctggtttagcgtggcagcacagcgtagtgatattcttgatgccgtgacactgtcacttaaagtggcggcgctggcgacattaattgcgctggtgttagggacgctggcagctgccgcgctgtggcgacgagactttttcggcaaaaacgccatttcgctgttactgctgctgcccattgcgctgccgggcattgtcactggtctggcgttattaaccgcctttaaaaccatcaatctggagccgggatttttcaccatcgtggtcggtcatgcgactttttgtgtagttgtggtgtttaacaatgtcatcgcccgttttcgccgcacctcctggagtctggttgaggcgtcaatggatcttggggccaatggctggcaaaccttccgctacgtagtgttgccgaatctcagttcggcgttactggcaggaggaatgctggcgtttgccttgtcgttcgatgaaatcatcgttacgacctttacggcaggtcatgaacgaacgttaccgttgtggttgctcaatcagcttgggcgaccgcgtgatgtaccggtaactaacgtggtggcactgctggttatgttggtaacaaccttgccgatcctgggggcctggtggctaaccgcgaaggcgacatatcttgaaaaacttaaagtgtag

SEQ ID NO: 139119 - DNA, 2183 bp, Homo sapiens
atgagcgagcagttaacggaccaggtcctggttgaacgggtccagaagggagatcagaaagcctttaacttactggtagtgcgctatcagcataaagtggcgagtctggtttcccgctatgtgccgtcgggtgatgttcccgatgtggttcaagaagcttttattaaagcctatcgtgagctaacaccacgtcgtccctatctgctgcgtgcattctatgagtggttgctggataaccagctcacgccgcacctggtggtggatgtgacgctccctggcgtgcaggttcctatggaatatgcgcgtgacgggcaaatcgtactcaacattgcgccgcgtgctgtcggcaatctggaactggcgaatgatgaggtgcgctttaacgcgcgctttggtggcattccgcgtcaggtttctgtgccgctggctgccgtgctggctatctacgcccgtgaaaatggcgcaggcacgatgtttgagcctgaagctgcctacgatgaagataccagcatcatgaatgatgaagaggcatcggcagacaacgaaaccgttatgtcggttattgatggcgacaagccagatcacgatgatgacactcatcctgacgatgaacctccgcagccaccacgcggtggtcgaccggcattacgcgttgtgaacgtgattgtggcaatcatattcaccacgaaaccgactgccatggggatcgctgtccgcttcaccaccgcaaaaggcgaaacgcctgcaattcctgacgtaacgaccaccaccgcagtaatcggcgaaaccgcgcgcgctagcgtcgtggcaaaatgcatcggcataatcattacaaccgctgtgccaatcgtcgttaagcctttcgcaaatatttcacccgcgaccaccagcgtaccacggttcttcggtttaccggcctccagttcgcacaccttgattggtgcgattatcggcatcggtttaaccaacgcgctgttaaccggctcatcggtgatggatgcgttaaacctgcgtgaagtgaccaaaattttctcctcgctgattgtttcccctatcgtcggcctggtcattgcgggaggcctgatattcctgctgcgacgctactggagcgggacgaaaaagcgtgaccgtattcaccgcattccggaagatcgcaaaaagaaaaaaggcaaacgtaaaccgccattctggacgcgtattgcgctgattgtttccgctgcgggcgtggcgttttcgcacggcgcgaacgacggacaaaaagggatcggcctggtaatgctggtactggtggggattgcccctgctggcttcgtcgtcaatatgaatgcgtccggctatgaaattacccgtacccgcgatgccgttaccaacttcgccgcaagagagtccgaagcgagtgttattcgccattcgaatcgcttcatcgaaacaataaacggcgggcgcaggtgcagccgtgggatcacgctgacgctccataaactacgcctcggcacagcctctgctccgccgtgctgaaccgcctggaacagaaaaaaccggtggggctgcgctacgatccgcaagcacaatcgctggtgtgcctgcccacgcaaacccggacgggctggaatctcaatggctttgaggtggggttcaggccatgcgtcaggctgatgatttacggacgttctcttgaggcgcaggcaaccgcgagtcttgcagcagccacaggctatgacagccatatcttcgatctttttccggcctcagccagcgctcagatcgataccgatacggcggtcattttgctgtgccatgatctcaaccgggagctgccagtgttgcaggccgcgcgagaagcaaaacccttttatctcggcgcattgggcagctatcgaacccacacgttacgtctgcaaaagctccacgagctgggatggtccagtgcaggaaacaacgcaaatccgggcacccgtcgggatattccccaaagcccgggatgcgcatactctggcactctccgtgctggcagaagtcgcctctgtacgtctccatcaggaggaggattcatgcctgcccccgtcgtcctgatccttgcggccgggcgtggagagtgctttctcgcctccgggggaaatacccttgcagacagtctggacatggacagcgcggagaaaccggagcgtacatatcgtacgtga

SEQ ID NO: 139120 - DNA, 363 bp, Homo sapiens
cgccggatacagtacccgcaccgcgctcgccatcgtcaataaaccacccagcagcgcaatcccgcccaccagcgggctggcaagcagaaaacgaaatcctgccagtaatgatttcaacggatgctcacgcggctgcggtggcggtggcaacgccggaaggcttaacaacggtagcaagcgatccgccagcacaccgccgaccatcaggccaacaaacatcgcgccgccggtcagcgtcaccgaaagccccacctgccaggtggaatgtgtcatcatctggatctgcaccggcaccgcgacgccgagcaaacccagagacacaattgagatgaaacgagcgaggaatactgcgcgaaacgccgg

SEQ ID NO: 139121 - DNA, 3195 bp, Homo sapiens
atgaataagaaatttaaatataagaaatcgcttttagcggctattttgagcgcaaccctgttagccggttgtgatggcggtggttccggatcttcctccgatacgccgcctgtagattctggaacagggtctttgccggaagtgaaacctgatccaacaccaaacccggagccgacgcctgagccaacgccggacccagagcctacgccagaaccgatacctgatcctgaaccaaaccagaacggagccgaactgtcctacaacacggaaaaaacgttaactattcgcgattcagtttttacttataccgagaatgctgacgggactatatctctgcaagatagcaatggtcgtaaggcaacgattaatctttggcagattgatgaagcgaataacactgttgcccttgaaggggtgagcgcagatggcgcaacgaagtggcaatataatcacaacggtgagcttgttattacgggtgataatgccacagtaaacaacaatggcaaaaccaccgttgacggtaaagattccaccggtacggaaatcaacggtaataacgggaaagtgattcaggacggcgatctggatgtcagcggcggcggtcacggtattgatatcaccggtgacagcgcgacggtggataacaagggcaccatgaccgtcaccgatccggagtccatgggtatccagatcgacggtgacaaggccatcgtcaataacgaaggcgagagcaccatcaccaacggtggcaccggcacccagattaatggtgatgacgccacggcaaacaacaacggcaaaaccaccgttgacggcaaggattccaccggtacggaaatcaacggtaataacggaaaagttattcaggacggcgatctggatgtcagcggcggcggtcacggtatagatatcaccggcgacagcgcaacggtggataacaagggcaccatgagcgtcaccgatccggagtcatcgattgacggcgaccaggccatcgtcaataacgaaggcgagagcactatcaccaatggcggcaccggcactcagatcaacggtaacgacgccaccgcgaataacagtggaaaaaccactgttgatggaaaagattccacgggtaccaaaatcgcgggcaatatcggcattgtaaatctggatggtagcctgactgttacaggcggtgcgcatggtgttgagaacattggtgacaacggcacggttaacaacaaaggagatattgttgtttccgatactggatcgattggcgtgctcatcaacggtgagggggcaacagtatccaatacgggtgatgttaacgttagcaatgaagcgacagggttcagcatcacaaccaacagtgggaaggtttcgctggcaggcagtatgcaggttggcgatttctcgaccggggtagatcttaatggcaacaataacagcgtgacgctggcggcaaaagatctaaaagtggtcgggcagaaagcgacgggcataaacgtttctggcgatgcgaatacagtgaatatcactggtaacgttctggttgataaggataaaaccgcagacactgcggcggaatatttcttcgatccatccgtgggtatcaacgtttacggcagtgataataacgtgacgctggatggaaacagtgtcgctatgggggtatgccttacagttccacataaagtagccaatcccggaagccaccacgccaagaaacaccagaatgccccattgcagcgtggtttgcggcattttctgcgcatttcccagcaagaaccatgcaatcactgccaccagaaacgcgccaagatagaaccacgcaaaggcgttatgctgtggcatcgggcgagtttccatcaggcgtttgtaacccaccatgccaatggcaaaagtgatattggagagttgcaccagcagcaagccagtccagaaatggtcggtgacctgatcatagcgaataatcccggcaccaatcaccgccagcaaggcgctaaaggcatagccccagcgcagacggcgcttactcatgatgtcataaatcagcgtgatgtagagcggcgtcagcacggtgaacagcagcagctcggaaaccgtcaggtagagataagcgcggaaactcagcatatacatcacgccaagctgcatcgcgcccaccagcatatacaggccgaccgttttcaggctattgccacgggtacgcagaaacggcagaaaaacgagtgccgccaggccaacgcgcaccagcaccgcaaaatagctatcgacgtgccccgcaagaggaaacgaggacacggaacgcagacacgaacacaacacgcaacaagagaaaacacaacgagacagcaggaagaagagacgagaagaggcacagcacaaaaaacagcagaacacaaacagcagcaagaagacacgacaaaccttactggaccactggcgttaactggcggcaatattgcactgctggcttgtgcaggtccgatgggcattggcgctatcgattacgccattaacggcggcatacaaccgtcgcgggtggtggtggtcgatatcgacgacaaacgtctggcgcaggtacagaagctgctgccggtggaactggcggccagtaaaggcattgagctggtgtatgtgaataccaaagggatgagcgatcctgtccagatgctgcgggcgctgacaggagatgccgggttcgatgacatttttgtttatgcggcggtgcctgctgtcgttgagatggctgatgaattactggcggaagatggctgtctgaacttctttgccgggccgacggataaaaacttcaaagtgccgtttaatttctacaacgtccattacaacagcacgcacgtcgtcggtacatctggcggttcaacggacgacatgaaagaggcgattgcccttagcgccactgggcagttacagccgtcgtttatggtgacccatatcggtggcctggatgcggtgccagaaaccgtgctcaatctgccggatatccctggcggtaaaaaactcatttataacggcgtgaccatgccgctcactgccattgccgatttcgccgaaaaaggcaaaagcgatccgctgtttaaagagttggcgcggctggttgaggaaacgcacggcatctggaatgaacaggccgagaaatatctgctggcacactttggcgtcgatatcgcggaaggccgcgcatga

SEQ ID NO: 139122 - DNA, 1383 bp, Homo sapiens
ttaacgttgtgcttcgccacctaatccttcaatcaggttttgaattaacgctgccagttcaccagtcatcaggatgaaatcggcatcaaaacgctgggcgaaatcttcacggtcgatatcttcgttttgatcgcgcagctcgtcgcagaacttcagacgcttgagcgaaccatcgtcgcacatcacaaactgaatgcgctgctgccagtcgagcgccagtttagtcaccacttttccggcttcaatgtgattggtgatctcttcgctggtcagatcttgtttcttcgcgcggatcacgccgccatcttccagcaacgatttcagctcggcttcatcaagcagctggaagccctgtgccgcactaccggagcgaacccattcggtcagcgtcagttcaatcgggttttccatgctcaatggtacaaccggtaacgaccccaggcttttacgcagtaatgccagcgtatcttccgcttttttggcactggcgcagtccaccataatcaaaccgttaaccgtgtcgatccacatcattgtctggctaaaacggctaaaatagtagaacaatctcaaattactgcgttttgataaatcgactaatgtcagacgttcagcaaacaggcgcaaacattgccaaccgcgctccattgcttcattggagagggcattttcgctattcaggccagcagccagacgcactttgcgttttattcgcgtcagcgtctggatgcttccagccaccggaattgagtgaccaatataggtctcaatagcaggcaaattcaatgcatactcttcacacgccaggctgatagagtgaccgcttgcgcctgcgcgacctgtacgaccaatacggtgaacgtaatcttcacagtccatccggtacatcgagttacaaactgcgttctggcggatattgcacccggccggaacgtcgtgtgaaccggatatccaattcccgggtaatccccgaataccgcagtttttgggcaaatcgcgtgaaaacgacgggtccagccaattccaccggcaacgcgccgcgtaaagtgtccgcaacaccaaatatacgagttgtagacggggctcaaaaaccaatgtgtcacctcgaggtctgcggcaatgaggatcacattcgggcccatagagcttcagaggattgcgagtaaggcttatgactgtgtgccagctagcactgccagtccagccatctttgggcgtcatccgtcgtccgcaggcgccgtcatcaggcattcgtcgaagtcccgagtcctttttgcatatgcagcagttgtgttcctcgcgatcgtggtcccatcctaagcctcccttgatcggcccaccaagcattgctttttggtgctgctgagataacacaatccgcat

SEQ ID NO: 139123 - DNA, 1073 bp, Homo sapiens
cagagttgacaatcacatccgcagcgctacgggcaataagcagttcgcgcgggttagtggtcatacgggtcgcgccagcgccgatttttgcagcatcgccaacgcggtcaactttgacgatcaaatcaacctgatcttgctcaatgcttgccggattatgcggataaggcagcagttcttcggtaagcatcacgacctgttttgcgttgtcggcatcaactattgcatagccgagggagccgcagcaggctttaccggtgtagccgttggcattaccgaattcatcacaggacgggacgccgatgaaagccacgtcaatattcagttcgccgctctgtaccagatgcacacgaccgccgtgagagtggatctgcaccggttctgccagcagaccacgggagatctcttccgccagtggaccacgcaggccggaggtataaatgcgggtaaccacgcccggctgcggcggtaatttgatttgctctttcgccgccgccagttgcttatcaaactgcgcaatccgctctgccgcttgtttctcatgcccggtaatttcgccaagttgcgttaacagcgactgccagcttttgtcgtcgtaattgatgattaatgtcggggcgatggtggaaagctgatcatacagtgccagcgccgaatccccgccggttgcgctaattaaaatcagatccggcatttgcgcggcaacggcttcggcgctcggttcgccgatataaaaccgttgcagtttgcgttctttcgccaccttgctccactggcgtaaaaagccctggtcatccgcgacgcggttattcggcgtggtcgcgccgctggcgatcaccggagcatcaatcgccaacattgagccggtcagggtgacgctgtctggtacgatcaattcacttggctcatgttccgtcaatgccggagagacaattgaagttgatttaggtgatgtcttcgctgccaatttccgtgttgtagggcataaacctcttggggccagaacggcagaacttgcaattccagtcaggtgtaacacgggaaacgcgggattagttaatgtcaacctgagt

SEQ ID NO: 139124 - DNA, 864 bp, Homo sapiens
  misc_feature (1)...(864): n = a,t,c or g
ccagcatgggcacatgggatgacatataaaactgtgaccgggggatgcctgctaggatgcgacataccgtcaggcagctgtctgcttctttggttgctgtcctttttctttgtcagtctcaaagggcggagaccataatattggtggtcgcgagaagttctcccacagcgccttcccagaaggtgctctcgccccggcgggaccatacagcggagccccgacggctccacacgcctggagtgccagcgccgatccccgccggttgcgctaattaaaatcagatccggcatttgcgcggcaaggcttcggcgctcggttcgccgatatagagccgttgcagtttgcgttcttcgccaccttgctccactggcgtaaaaagccntggtcatccgcgacgcgttattcggcgtggtcgcgccgctggcgatcaccggagcatcaatcgccacagtgagccggtcagggtgacgctggtggaaacaatacgctgcggctggtttccagtgtatgtgtgccacggctgtcagtaatctgacgcggccagtcgcggcctgaactgcggctattcctgaaagcaaaagtcccgttttgccgaattctcccgcgtcaaccgtccgtcgttcataaccagtgtcgacgatgcctcctattcgtccaggcgatggcgaccacgacccacggtttaaagcgccctctggaacgccccaccaacccccccgtgctggacatagtttgtcgaaggcacggttaaacggaaaattgcacagccgcctaaggccagttgcgcacaccaggcgataacggcacggtgatgagtgcggataccataacttttccttaatgtagtggcggaatcctgtatgc

SEQ ID NO: 139125 - DNA, 2922 bp, Homo sapiens
atgtcatttctgttacccatccaattgttcaaaattcttgctgatgaaacccgtctgggcatcgttttactgctcagcgaactgggagagttatgcgtctgcgatctctgcactgctctcgaccagtcgcagcccaagatctcccgccacctggcattgctgcgtgaaagcgggctattgctggaccgcaagcaaggtaagtgggttcattaccgcttatcaccgcatattccagcatgggcggcgaaaattattgatgaggcctggcgatgtgaacaggaaaaggttcaggcgattgtccgcaacctggctcgacaaaactgttccggggacaatgtgttttatccgggaggcattatgttactggcaggcgctatctttgtcctgaccatcgtattggttatctggcagccgaaaggtttaggcatcggctggagtgcaacgctcggcgcagtactggcgttagttacgggcgtggtccatccgggtgatattccggtggtgtggaatatcgtctggaacgcgacggctgcgtttatcgccgtcattatcatcagcctgctgctggatgagtccggcttttttgaatgggcggcgctgcacgtctcacgctggggtaatggtcgtggtcgcttgctgtttacctggattgtcctgctcggtgctgccgttgccgccctgtttggcaatgatggcgcggcgcttattttgacaacgattgtcatcgccatgctgctggctttaggggtcagtaaaggcactacgctggcgttcgtgatggcggccgggttcattgccggccactccttccccggccagtacaccgcccttcagtttgaaatcgttgaagccatatttttcatatgccgcttccgccaggcgcaccaccgcatccggcgcgataccagtcgcatgagtcatccggctggctttgatacggcagcggcgtggctttgcgattaccgacgaagaacagataaccgagcatttcgacatcctacgctgttgaccatcgcccagcagcgatgccacgtttacccccagatgctgccccagcagatccagcattgccgcttctatcccggtaactacatgaatagtggtaccatcacgatcggcaaaagtattacgcaccagcgtcagaacgtttttgtattcacccagcgttttacctaccaccagcggaatcgcatcttccagcgttttacggattttctcgccgccgggaatttcccctacgccagtgtgaccagaattatctttgataatcacaatattacgcgtaaagaacgaatcaatgacggccgaaaacgggacgtttacggtcaaaggtccagccggggatcaggtactgcatcggacctgcgtcgttacgcgcaccgccaggcagacgtttataggcctcatgtgccttttgtacctgttcccagtccagttccagcccagaccgggcgcatcaggaacggcaatttttccgtttttaatctccagcggattttgggtcagcgacaatcgccctcctgccaaatccagtgggtatcgatagcggtaggattacccggtgccgccgcgcccacatgggtaaacatcgccagagagatatcgaaatggttattagaatggcagccccaggtcagcccccagtcgtcgcaaagtgcgccacacggactgcaccggaaagcgtccagaagtgcggatcggactctagagatccccgagtaccgagctagaattcaggggggttttagccaccatttcggggactttcgggacctcggtcaacatcacaaaaggggcgaggggacggattgtgcgctttgtcgaatttgtcattacgcccttaaccttattaataacaggaagctgatttcgcgcgaccacgccgaatacaccgtcgcggatgaccagggctttttacgccagtggagcaaggtggcgaaagaacgcaaactgcaacggctctatatcggcgaaccgagcgccgaagccgttgccgcgcaaatgccggatctgattttaattagcgcaaccggcggggattcggcgctggcactgtatgatcagctttccaccatcgccccgacattaatcatcaattacgacgacaaaagctggcagtcgctgttaacgcaacttggcgtaattaccgggcatgagaaacaagcgtcagagcggattgcgcagtttgataagcaactgtcgtcggcgaaagagcatatcaaattaccgccgcagccggtcactgccattgtctatactgccgctgcacacagtgccaatctctggacgccagaatcagcacaagggcagatgctggaacaactcggctttacgctgcgcgaagttacccgcagggttaaatgccagccacaagtcaggtcacgactgtacgccagtggatcaatctctcctggcgttatcagcgcgggtaaacccaacacgatgacaatattaaaaatgtttgcgccaatgatatttccgacagcaatgtcgttttcacctttgcgaaccccccgctattgcggttgccagttccggcaggctggttccgatagcaattgccgtcagacccatcgtcaactcgctgatggcaaagtaattcgccagcaccgtggcgttatcaaccacaatccgcaacaaaaatggcatgatgatatgcgacatgccgagacatatccacgacacgcgaaatcgacgatacccggcacaggcatggtcagttcgccccacggcaccaacggctcaatttcgcccatgaccgtgatccccagtaacgccgccagctgtgcgttattgcccagctcaggatgtgcgtcaagcggcaaatgccagccatacaggttgatatcattcgccagcaacgtttttaaacggttacgcttcattccgcgaatgaccggagactctcctttccagaagtag

SEQ ID NO: 139126 - DNA, 3852 bp, Homo sapiens; identical to SEQ ID NO: 129116

SEQ ID NO: 139127 - DNA, 2283 bp, Homo sapiens
atggaggtaaagaacaaactggcgcataaagagatcgaccaaatcctgaaacgcgcgcaggtacgccgctggcgagttggcgtacataacgatcgccagttgctgcaattttgctacacctcagaagtggccgacagtgcgctgaaaatcctcgacgaagcgggattacctggcgaactgcgcctgcgtcaggggctggcgctggtggcgatggtcggtgcaggcgtcacccgtaacccgctgcattgccaccgcttctggcagcaactgaaaggccagccggtcgaatttacctggcagtccgatgacggcatcagcctggtggcagtactgcgcaccggcccgaccgaaagcctgattcaggggctgcatcagtccgtcttccgcgcagaaaaacgcatcggcctggtattgttcggtaagggcaatatcggttcccgttggctggaactgttcgcccgtgagcagagcacgctttcggcacgtaccggctttgagtttgtgctggcaggtgtggtggacagccgccgcagcctgttgagctatgacgggctggacgccagccgcgcgttagccttcttcaacgatgaagcggttgagcaggatgaagagtcgttgttcctgtggatgcgcgcccatccgtatgatgatttagtggtgctggacgttacagccagccagcagcttgctgatcagtatcttgatttcgccagcacggtttcccactatcaacccactgaaatcattctctctgaaggtcgactggtcgatagccaggggtatggtgttgctggcgtcaactactacaccaattcaggccgtggcgtgacaggggaaaatggtgaattttcctttagctggggcgaaaccatctcctttggtatcgatacctttgaactgggttcagtgcgcggcaataagtcgaccattgcgctgactgaactgggtgatgaagttcgcggggcgaatattgatcagcttattcatcgctattcgacgaccgggcaaaataatacccgtgttgttccggacgatgtacgcaaggtctttgccgaatatcccaacgtgatcaacgagattatcaatctctcgttatccaacggtgcgacgctgggggaaggtgagcaagtcgttaatctgcctaacgaatttattgagcagtttaatacgggtcaggccaaagagatcgataccgcgatttgtgcgaaaaccgatggttgtaacgaggctcgctggttctcgctgacgacgcgcaatgttaatgacggccagattcagggcgttatcaacaagctgtggggcgtggatacgaactacaaatctgtcagcaagttccatgtattccatgactccaccaacttctatggcagcacgggtaatgcgcgcggtcaggcggtggtgaatatctccaacgcggccttcccgattctgatggcgcgtaatgataaaaactactggctggccttcggcgtaaaacgcgcctgggataaaaacgagctggcgtacattacggaagcgccttctcttgttgagccggaaaaccagaatgcctgctttacaaaccctcgctacggcgcgggtgcggcgacgaacccagatcctgaagtcttcagctgggcggcaacgcaagttgttacagcgatggaagcaacccataaattgggcggtgaaaactatgtcctgtggggcggtcgtgaaggttacgaaacgctgttaaataccgacttgcgtcaggagcgtgaacaactgggccgctttatgcagatggtggttgagcataaacataaaatcggtttccagggcacgttgcttatcgaaccgaaaccgcaagaaccgaccaaacatcaatatgattacgatgccgcgacggtctatggcttcctgaaacagtttggtctggaaaaagagattaaactgaacattgaagctaaccacgcgacgctggcaggtcactctttccatcatgaaatagccaccgccattgcgcttggcctgttcggttctgtcgacgccaaccgtggcgatgcgcaactgggctgggacaccgaccagttcccgaacagtgtggaagagaatgcgctggtgatgtatgaaattctcaaagcaggcggtttcaccaccggtggtctgaacttcgatgccaaagtacgtcgtcaaagtactgataaatatgatctgttttacggtcatatcggcgcgatggatacgatggcactggcgctgaatattgcagcgcgcatgattgaagattggcagctggataaacgcatcgtgcagcggtaa

SEQ ID NO: 139128 - DNA, 1045 bp, Homo sapiens
atgactgagcccacgctcctcaattgcgtggcaataacagaacgttactgcttccctaacaccagagaccacacggggggcgaggggacggattgtgcgctttgtcgaatttgtcattacgcccttaaccttattaataacaggaagctgatttcggcgcgaccacgccgaataaccgcgtctgcggatgaccagggcttgttacgccagtggagcaaggtggcgaaagaacgcaaactgcaacggctctatatcggcgaaccgagcgccgaagccgttgccgcgcaaatgccggatctgattttaattagcgcaaccggcggggattcggcgctggcacttgccaatctctggacgccagaatcagcacaagggcagatgctggaacaactcggctttacgctggcgaagttacccgcagggttaaatgccagccaaagtcagggtaaacgccatgacatcattcagcttggtggggaaaatctggctgcagggttaaatggcgagtcactattcctgttcgccggtgatcagaaagatgctgatgctatttatgctaatccgctgctcgcgcacctgcctgcagtacaaaacaagcaggtttatgcgctgggaaccgagacgttccgtctggattactacagcgccatgcaagtgctggataggcttaaggcgctgttttaagcattaactgtcggacgctgtcacctgcggcggcgtctggcgaaaatgtcgcaactccaccagcaccagcaataacaacacgccgataatcaacaaaccaaaaccgctcgcgcttgcggaagcaaccggtgtcatcatcgcgcccaaaccacccagcagcgccgcgcctatggcatcgcccgtcacgttctgcgccgtccacaaaccgttaatccgccctaacatcgcttccggggtttgcgtttgcagcattgtgtattgcagcaacgagctgaccgcactcaaccagccgaacagcgccagacaaaccacgcctaaaatccacatcggcatcaggccaaacagaccaatggcgaggaac

SEQ ID NO: 139129 - DNA, 2319 bp, Homo sapiens
ctggcgcacgtattccggaaacttcagacggctatcggagtggatgaatccacagccagcacctttggggcataccgccgcgacatattccccgcgtccgctttgtcccggacggccatctggccgaaccccacgggaatcgagaacacgcgtcaccgcagatccccgcgggtaacgccaccaggcgggaaacgcatgcacacacacctgcggcggcgtctggcgaaaatgtcgcaactccaccagcaccagcaataacaacacgccgataatcaacaaaccaaaaccgctcgcgcttgcggaagcaaccggtgtcatcatcgcgcccaaaccacccagcagcgccgcgcctatggcatcgcccgtcacgttctgcgccgtccacaaaccgttaatccgccctaacatcgcttccggggtttgcgtttgcagcattgtgtattgcagcaacgagctgaccgcactcaaccagccgaacagcgccagacaaaccacgcctaaaatccacatcggcatcaggccaaacagaccaatggcgaggaacgatcccagcgtggagagcagcatcaataaccctggtcgcgcactatgtgccagcttcccgctggttaacgcaccaatagccgcgccgagcgggatcgccgcgtagagaaaaccaatctgtgccgctgacatctgccagttgtcagccagcgccggatacagtacccgcaccgcgctcgccatcgtcagcgggctggcaagcagaaaacgaaatcctgccagtaatgatttcaacggatgctcacgcggctgcggtggcggtggcaacgccggaaggcttaacaacggtagcaaggtaataaacgtgcccgccgccgccagcccgtagttccaggctacgccaccggtcgccagcaataaaccgccaatcatgggcgaaatcaccgaccccagacgcacggtcaacatggtgatcgccccggcctgcattaagttttcacgccctaccagtgctggtgtcgccgccaatagcgccgtaacgccaagcgatgcgaaaaaaccatcccataaaccaagtaaatagattgccagcaatgacggctccggcagcagtgcattaaggcacagtccaatgaagccaatgccacaggtgccgcgcgccagcaaaatcacttttttgcgctcatagcgatccgccagcacaccgccgaccatcaggccaacaaacatcgcgccgccggtcagcgtcaccgaaagccccacctgccaggtggaatgtgtcatcatctggatctgcaccggcaccgcgacgccgagcaaacccagagacacaattgagatgaaacgagcgaggaatactgcgcgaaacgccgggtgcgtttcagcaggcagttcaggatcgagcgccgaggtaggttcatcaaacagtaaaacttccggttccatcgccagcgcccgcgcgatagaaacacgctgttgctgaccgccggaaagatgcaccggatatttcccctgcgcacgttcgtctatcccgacttttgccagatacttcaccgcccgctcgcgcgcttcctgcttgctcaggcccaacacctgaatcggcgcttccatgacgttttccagcaccgtcatatggctccagagattgaagtgctggaataccatcgtcaggcgtgtgcgcagtaagcgcagttgatttttatcggcgactttgagttgaccgtctttgtcgcgcaccagattgatcgtctggccattgaccacgatcgacccttcactcggtttttcgaggaagttaatgcagcgcagaaaggtacttttccccgatcccgacgatccgatgatgcttattacatctccggcattcgcttgcagtgatacccctttcagcacttcatgttcgccgtagcgtttgtgcaaatcgataacgtttaatttattctcggacatcgtattcgcggcaatgccgaaggcggtaaaaggttgatacgtggcggcgttaatatcgcgggctattttcagcagatccggcaccgtggcagtaaatgccaacgcagtagagtgcagcatcaggatcacttcgttgctgtatgccggtaacgcaatacgcagcgcagaaggcaaaataatgcagcgatacattttaaaagtcgcgaagccataggctctggcggcttcaatttccccatgcggaaccgaacgagttgccccagcaaaaatatcgtagtgtaagcgcagtgtaagcgtcagcgcagcgggatggtgaccggcattcttccgctgttgattagcctgctggttatcatgaacgcactgattaattttatcggtcagcat

SEQ ID NO: 139130 - DNA, 3094 bp, Homo sapiens
gtcaggtacgaggatcccctgcggcacgcaggacatggcgaagatgggctgggttcctccgatgggatcgcacagcgatgcgttaacgcacgttgccaatggtcaaattgttatctgcgcgcgcaaagaagaaaaaatcctcccgtctccggtgattaaacaggcgctggatagcgaatatcgccaaactggaagcggaacaggcgcgtaagctgaagaaaaccgaaaaagattcgctgaaagacgaagtgctgcactctctgctgccgcgtgctttcagccgttttagccagacaatgatgtggatcgacacggttaacggtttgattatggtggactgcgccagtgccaaaaaagcggaagatacgctggcagtactgcgtaaaagcctggggtcgttaccggttgtaccattgagcatggaaaacccgattgaactgacgctgaccgaatgggttcgctccggtagtgcggcacagggcttccagctgcttgatgaagccgagctgaaatcgttgctggaagatggcggcgtgatccgcgcgaagaaacaagatctgaccagcgaagagatcaccaatcacattgaagccggaaaagtggtgactaaactggcgctcgactggcagcagcgcattcagtttgtgatgtgcgacgatggttcgctcaagcgtctgaagttctgcgacgagctgcgcgatcaaaacgaagatatcgaccgtgaagatttcgcccagcgttttgatgccgatttcatcctgatgactggtgaactggcagcgttaattcaaaacctgattgaaggattaggtggcgaagcacaacattctggaacagggtctttgccggaagtgaaacctgatccaacaccaaacccggagccgacgcctgagccaacgccggacccagagcctacgccagaaccgatacctgatcctgaaccaacaccagaaccggagccagaacctgttcctacgaaaacgggttatctgaccctgggcggaagccagcgggtaactggtgctacctgtaatggtgaatccagcgatggctttacatttaaacctggcgaggacgttacttgcgtggcgggtaacacgacaattgccaccttcaacactcagtcaagaacgtgcgcgtagcttgcgtgcggttgaaaaagtgtcgtttagcccttgaggacgcgcaagaactggcgggctccgatgacaagaaaagcaatgcggtttcgctggtaacgtccagtaacagctgtccggcgaatacagaacaggtttgtctgacgttctcctcggtgatcgagagtaaacgcttcgactcgctgtataagcaaatcgatctggcaccggaagagttcaaaaagctggtcaatgaagaggtggaaaacaatgctgcgaccgataaagcgccatccactcatacttcaccggtcgtgcccgtcaccacgccgggaacaaaaccggatctgaacgcttccttcgtgtcggctaacgcggaacagttttatcagtatcaacccactgaaatcattctctctgaaggtcgactggtcgatagccagggatatggtgttgctggcgtcaactactacaccaattcaggccgtggcgtgacaggggaaaatggtgaattttcctttagctggggcgaaaccatctcctttggtatcgatacctttgaactgggttcagtgcgcggcaataagtcgaccattgcgctgactgaactgggtgatgaagttcgcggggcgaatattgatcagcttattcatcgctattcgacgaccgggcaaaataatacccgtgttgttccggacgatgtacgcaagggtgagggctggggacttttgctttcaggaatagccgcagttcaggccgctgactggccgcgtcagattactgacagccgtggcacacatacactggaaagccagccgcagcgtattgtttccaccagcgtcaccctgaccggctcactgctggcgattgatgctccggtgatcgccagcggcgcgaccacgccgaataaccgcgtcgcggatgaccagggctttttacgccagtggagcaaggtggcgaaagaacgcaaactgcaacggctctatatcggcgaaccgagcgccgaagccgttgccgcgcaaatgccggatctgattttaattagcgcaaccggcggggattcggcgctggcactgtatgatcagctttccaccatcgccccgacattaatcatcaattacgacgacaaaagctggcagtcgctgttaacgcaacttggcgaaattaccgggcatgagaaacaagcggcagagcggattgcgcagtttgataagcaactggcggcggcgaaagagcaaatcaaattaccgccgcagccggtcactgccattgtctatactgccgctgcacacagtgccaatctctggacgccagaatcagcacaagggcagatgctggaacaactcggctttacgctggcgaagttacccgcagggttaaatgccagccaaagtcagggtaaacgccatgacatcattcagcttggtggggaaaatctggctgcagggttaaatggcgagtcactattcctgttcgccggtgatcagaaagatgccgatgctatttatgctaatccgctgctcgcgcacctgcctgcagtacaaaacaagcaggtttatgcgctgggaaccgagaccattgtgtattgcagcaacgagctgaccgcactcaaccagccgaacagcgccagacaaaccacgcctaaaatccacatcggcatcaggccaaacagaccaatggcgaggaacgatcccagcgtggagagcagcatcaataaccctggtcgcgcactatgtgccagcttcccgctgagaaaaccaatctgtgccgctgacatctgccagttgtcagccagcgccggatacagtacccgcaccgcgctcgccatcgtcaataaaccacccagcagcgcaatcccgcccaccagcgggctggcaagcagcaaacgaaatcctgccagtaatgatttcaacggatgtcacgcggctgcggtggcggtggcaacgccggaaggcttaacaacggtagcaaggtaa

SEQ ID NO: 139131 - DNA, 2118 bp, Homo sapiens
gcactgttggcaaagggcagtggtccctatttctatctgccgaaaacccagtcctggcaggaagcggcctggtggagcgaagtcttcagctatgcagaagatcgctttaatctgccgcgcggcaccatcaaggcgacgttgctgattgaaacgctgcccgccgtgttccagatggatgaaatccttcacgcgctgcgtgaccatattgttggtctgaactgcggtcgttgggattacatcttcagctatatcaaaacgttgaaaaactatcccgatcgcgtcctgccagacagacaggcagtgacgatggataaaccattcctgaatgcttactcacgcctgttgattaaaacctgccataaacgcggtgcttttgcgatgggcggcatggcggcgtttattccgagcaaagatgaagagcacaataaccaggtgctcaacaaagtaaaagcggataaatcgctggaagccaataacggtcacgatggcacatggatcgctcacccaggccttgcggacacggcaatggcggtattcaacgacattctcggctcccggaaaaatcagcttgaagtgatgcgcgaacaacacgcgccgattactgccgatcagctgctggcaccttgtgatggtgaacgcaccgaaagaaaattcaatgcattaatggaaagtgaaaaaggacagagccagaacttgtggaaatttgccgtttactcaggacttcgtcacggggaactggcagctctggcgtgggaggatgtggatctcgaaaagggaatagtgaatgtcagaagaaacctgacgatacttgatatgttcggtcccccaaaaacaaatgccgggatccgaacagtaacactactgcagcctgctcttgaagcactgaaggagcaatacaaactgaccgggcatcatcgcaaaagcgaaatcaccttttatcatcgggagtacggcagaaccgaaaagcaaaaactgcattttgttttcatgcccagggtgtgtaacggaaaacaaaaaccttattactcggtaagcagtttgggggcaaggtggaatgcagcagtaaaacgtgctggtattcgccgccgtaatccgtaccatacgcggcatacttttgcctgctggctgttgacggcaggagcgaacccggcatttatagccagccaaatggggcatgagactgcgcagatggtgtatgaaatctacgggatgtggattgatgacatgagcgacgaacagatagccatgttgaatgcgcgggttatggtttatgacgtggcttccggcaacgcgttatttatttctgaactcggtccgttaccggaaaatgttacctggttatcgccggaaggggagtttcagaagtggaacggcacagcctgggtgaaggatacggaagcagaaaaactgttccggatccgggaggcggaagaaacaaaaaacaacctgatgcaggtagccagtgagcatattgcgccgcttcaggatgctgcagatctggaaattgcaacggaggaagaaatctcgttgctggaagcatggaaaaagtatcggagcatcccactgtgctctaaggtggttacaatgatgtttgatgaccgccctggatgcccagtgggatttccaatgtggggaagaggtggttttgacagaatgcctcctggttggggtgggcgtcccatgcctccatctagaagagatatgagccctcatcgaggaccacctcctcctcttactggacgaggtggccggggtggtagcagagctcggaatcttcctcttcctccaccaccaccacctataggggaagacctaatggcctatgacagaagagggagacctggagactgttactatggcatggttggtttcagtcctgatgaaacttggaactctgcaatagatacatggagcccatcggaatggcagatggcttatgaaccacagggtggctccggatatgattattcctatgcagggattgggggctcatatggagatcttggtggacctattactactgcccaagtcactattcccaaagatttgactggatctattattggcaaacgtggtcagcggattaaacaaatgctcatgagttggcagctttcataa

SEQ ID NO: 139132 - DNA, 3189 bp, Homo sapiens; identical to SEQ ID NO: 132453

SEQ ID NO: 139133 - DNA, 1452 bp, Homo sapiens; identical to SEQ ID NO: 129927

SEQ ID NO: 139134 - DNA, 677 bp, Homo sapiens; identical to SEQ ID NO: 123393

SEQ ID NO: 139135 - DNA, 1173 bp, Homo sapiens
atgagccttaaagtttcagaatgttctcctttggactccatgccttacatccgggtcacgctgatgcaagagcctatgaagaaggtgcctgcttctccgttgccttctgccatgattggcctgaatggtatgctattggtcagccatcctgcaagtgtaggcaaacaacagactggtggccgtgtctacagctgtcagcacatgcgtatgcccccgcgaccttggcagcggcctgatgtggtctgtttaccacctaatcaagggcatccaccctactgtcatttgttgtgtaacactgggcagctagctgtctccacctgggggtatgccggtgcacacactgggcacttccggcaggcctcccagatatcttgcttggacatggacagatcccaatgcttcttgacctgttgcattagtttacgccttgcacgacccaattttcggtgcagtcatggggctacatatcattccttttgcctcttaaaactaagctgtcattattacttggacatttttactggcttattcattccagttgggatatccttccaaccttgcctgggaaatccagttactaatgcaactacagataacgaaggctcggtgctggtcgaatttggcgataccaaagtgttgtgtaccgcctctattgaagaaggcgtgccgcgcttcctgaaaggtcagggccagggctggatcaccgcagagtacggcatgctgccacgttctacccacacccgtaacgctcgtgaagcggcgaaaggtaagcagggtggacgcacaatggaaatccagcgtctgatcgcccgtgctcttcgcgcggcagtagatttgaaagcgctgggtgagttcaccattacactggactgcaacgtgcttcaggctgatggtggcacgcgtaccgctacgattacgggtgcctgcatggcgctggtagatgcgctacagaagctggtggaaaacggcaagctgaaaaccaatccgatgaaagggatggactatgataccccccacttcgaaatgggcagccatgacacaacaagacgagacacaccgaacgaactacaagccgatgcctatacgagcaataggcgcgagaagaagacaccttacgactcagtcatcatacatcgatggaccaacgccctcctctcgtcctatctatcataa

SEQ ID NO: 139136 - DNA, 3066 bp, Homo sapiens
  misc_feature (1)...(3066): n = a,t,c or g
atgaccgcgctggcaatggctttagggctggcttgcgcttcttcgtgggccgctgaactggcgaagcctcttacacttgaccagcttcaacaacaaaatggcaaagcgatagatactcgccccagcgcgttttataacggctggccacaaaccttaaatggcccttctggtcatgaacttgccgccttaaacctctctgccagctggcttgacaaaatgagcaccgaacagctcaacgcgtggatcaagcaacataacctgaaaaccgatgctccggtggcgctgtacggtaatgacaaagatgtcgacgccgtcaaaacgcgactgcaaaaagcaggtttaacgcatatctccatcctgagtgacgcgctaagcgaaccttcccgtctgcaaaaactgccgcattttgagcagctggtttatccgcaatggctgcacgacctgcaacaaggtaaagaggttacggcgaaacctgccggtgactggaaagtcattgaagcggcctggggcgctcctaagctttaccttatcagccatattcccggcgctgactacatcgataccaacgaagtggaaagtgaaccggtgtggaacaaagtttctgatgaacaactaaaagcgatgctggcaaaacaagggattcggcatgacaccaaggcgcgtgtggcgcagattatgctttatgctggcgtgaaagatgtgcgcctgctggatggcggctggcaaacctggtccgacgcgggactgcctgttgagcgcggaacgccaccgaaagtgaaagcggaaccggatttcggcgtgaagatcccggcacaaccgcagttgatgctcgatatggaacaggcccgtggactgctgcatcgccaggatgcatcgctggtgagcattcgttcgtggccagaatttatcggtacgaccagcggttacagctatattaaaccaaaaggtgaaatagccggcgcacgttggggacacgctggtagcgactcgacgcatatggaagattttcataacccggatggcaccatgcgcagcgccgatgatattaccgctatgtggaaagcgtggaatatcaaaccagagcagcaagtttcattctactgcggcaccggctggcgcgcgtccgaaacctttatgtacgcacgcgccatgggttggaagaatgtttccgtgtatgacggcggctggtacgaatggagcagcgatccaaaaaatccggtagcaaccgttcgtgtttcaccaacggtccgttgcacctgggtgaacaacgaccttggacgttcaccccatactgtacatacgcctttgccaggcactatactcccacatttcggcccaggcgttggctggttaagtcagcggcacagcagggcctcggcgtacctggaatctggcccttatacccgtaaccagaaaagtaagatgaggagcgaaggcatgaaaccatatcagcgccagtttattgaatttgcgcttagcaagcaggtgttaaagtttggcgagtttacgctgaaatccgggcgcaaaagcccctatttcttcaacgccgggctgtttaataccgggcgcgatctggcactgttaggccgtttttacgctgaagcgttggtggattccggcattgagttcgatctgctgtttggccctgcttacaaagggatcccgattgccaccacaaccgctgtggcactggcggagcatcacgacctggacctgccgtactgctttaaccgcaaagaagcaaaagaccacggtgaaggcggcaatctggttggtagcgcgttacaaggacgcgtaatgctggtagatgatgtgatcaccgccggaacggcgattcgcgagtcgatggagattattcaggccaatggcgcgacgcttgctggcgtgttgatttcgctcgatcgtcaggaacgcgggcgcggcgagatttcggcgattcaggaagttgagcgtgattacaactgcaaagtgatctctatcatcaccctgaaagacctgattgcttacctggaagagaagccggaaatggcggaacatctgggcnggngcngcggtcagtggaatttccacttttttgaccatccgctgcaagtaccagaagccttcacctctgagttaatggctgactgggggcatattaccgtccccgccatgtggcaaatggaaggtcacggcaaactgcaatataccgacgaaggttttccgttccccatcgatgtgccgtttgtccccagcgataacccaaccggtgcctatcaacgtattttcaccctcagcgacggctggcagggtaaacagacgctgattaaatttgacggctgggcggactctacctacgtggaagaccaggatatgtggtggtcagcggggatcttccgcgatgtttatctggtcggaaaacacctaacgcatattaacgatttcactgtgcgtaccgactttgacgaagcctattgcgatgccacgctttcctgcgaagtggtgctggaaaatctcgccgcctcccctgtcgtcacgacgctggaatataccctgtttgatggcgaacgcgtggtgcacagcagcgccattgatcatttggcaattgaaaaactgaccagcgccagctttgcttttactgtcgaacagccgcagcaatggtcagcagaatccccttatctttaccatctggtcatgacgctgaaagacgccaacggcaacgttctggaagtggtgccacaacgcgttggcttccgtgatatcaaagtgcgcgacggtctgttctggatcaataaccgttatgtgatgctgcacggcgtcaaccgtcacgacaacgatcatcgcaaaggccgcgccgttggaatggatcgcgtcgagaaagatctccagttgatgaagcagcacaatatcaactccgtgcgtaccgctcactacccgaacgatccgcgtttttacgaactgtgtgatatctacggcctgtttgtgatggcggaaaccgacgtcgaatcgcacggcttgataaatgcgacgccgatccagctgctgctggccaagtacaaccgcaacaagtcgaacgggatggtgtga

SEQ ID NO: 139137 - DNA, 1761 bp, Homo sapiens
tcagccgggctttcgaccgataaataacttggcttggcgcagccggtaagttccaagcgtggcccgggtggaacccagatcgcaaatcgcatccgccagtccggcacgcggggcgatttcaacagaaccgttcagtaagcaggatttaaaagagatgcctttttgttcgagataacgcttgagcaggtgaggataagaggtggcgatacgtttaccgtttaaggagagcggaccgtcccaggcttcatcaaccggcgttgccagcgaaagacgacagccgccgaaatccagacgacgcagggtaaagtagcgtggatcttcaccttgggcgcggcggttaagcagctcttcttccagcacgttttcgccgataatcccaaggtctaccacgccatccattaccagaccgggaatgtcgtcgtcacgcacgcgcagaatatcaatcggcatgttttctgccatcgcgatcaggcgctgggtgtgaagattaattttaatgccacagcgcgccagcaattcgcgtgagtcatcacttaaacggggggatcctctagagtggacttgcacgaagtgtatcttcaaacttccgaagtcccaaagaccagcaccagatctagccagggaggactgggggaagggtgcctttccatttgagctcggagaaggttttacacaacacgatggtactttacatttgttgattgccttctctgttccaggtggtctacaggtattatctcctttaatcctcaaaacagccatagctgctggtgtcattaatcttgccattggtgttgttgctgtgattattctctgtctccgattcagtctgcagcagacgcgggtgagttgggtagcaacggcattctgccagacgtcgaaagcttgcgtattccggtacagtatctggcgaatttgctgaccgccggtgataccaaaccggtactgcgcgcactgaaacgtatgctggcgatgcgtcattacaaacgtgctgaaaccgttgacggtaaagttgatacccgtgcgctggaagaggtcggtctgaccgaagcccaggcacaggagatgtaccgttatctggcgattgctaactacgaagatcgctttgtggtgccgagtagtcatcgtgaactggcacgggaagccttcccggagaaaaatggctgcggctttacctttggtgatggcaaattcaatctgttcaacagccgtcgtatcgatgccatcgatgtgaccagcaaaacggagccgcatccatgatcgaactcgtgattgtatcgcgtctccttgaatatccggatgctgcattatggcagcatcaacaatagatgtttgaggcgatcgccgcgtcgaaacattggtcgagtcggcctgcgcggaagatgtaacggggctaaaccatgcaccgaagctgcggcagcgacgcttatgcgttgttgggtaggggagcgttctgtaagcctgcgaaggtgtgctgtgaggcatgctggaggtatcagaagtgcgaatgctgacataagtaacgataaagcgggtgaaaagcccgctcgccggaagaccaagggttccttttactttgttggagtcttgtgagtccttttgatgatctgacccagcatgattgctgcaacctctcttgatgctcggctctagttcctggcagtttcctcttgacatccagactgtagaatcttcagggctcatgggctctggcccctgcttccccttctctcttccttcttctctggccgtgtaagccat

SEQ ID NO: 139138 - DNA, 2727 bp, Homo sapiens
atgaactcgattgcgtgtttggtccggaaactagtgaacctggggctcatgtgtatggcgggcgtccctgatactgaattgaggcggcctgggagggagtgccgcggggtgggccggataccagaagggagtaggcgacggattataagccggctctgcccggagttaggaatggccgtaagtggggtggcgcgggattacatggagattgaaataggctcgctgatgggaacgcgcgagggagcgaggtggaagagtgttattgacggagatgggggagtctggatggggagtgccgatatcgggacgattaggacggtgctacggttaataaggggaaacgatatcttgaaaaggggcgtatgtgtcatgctgagctgcgactttctaaatcttgggatgggccgcggggccgttggattgtcccgggtgggccggcgccgaccgttggacccgaacctattcggccttctcgtcgcgaggatcgaagaagtcatactcaatggcataacccggacgcacgatcttcgcgttttccatcccctgcatagagcggacgatgtgcatctgcacatcgaacggcaggctggtggagataccgttcggataaatttcattagaggtcagtccttccggttcaaggaagatctgatgctgatttctgtcggcgaacggcatgactttgtcttcgatcgacgggcagtagcgtgggccgacaccttcgatcacccctgcgtacattgggctacgatcgaggttactgcggatcacatcatgggttttctcgttggtatgagtgatataacacggcacctgctggggatgctgggacgcatgacccataaacgagaataccggcattgggttatcgccatgctgttgcgccagtacgctaaagtcgatgacgaccaacgcgcagttcagttcacgcaaacggcgagaaagcggaatggacggcggatcaccagcacggccaccgctgtaattatccagaccgatatgaattttaccgtcgaggaacgtcccaacggtgagcacgacggctttggcacggaacttcagtcccatttgggtaacagcaccgaccacgcgatcgttttcgacaataagatcttcaaaccgcctgctggaagatcatcaagttcggttggttctcaagcgccgtacgtaccgcctgacgccggagatttcaatatgcgtccagcaggccgtagcaataatcaggtgcgtcccgttaccctgactcgtaactatacaaaacatgcagaaggctcggtgctggtcgaatttggcgataccaaagtgttgtgtaccgcctctattgaagaaggcgtgccgcgcttcctgaaaggtcagggccagggctggatcaccgcagagtacggcatgctgccacgttctacccacacccgtaacgctcgtgaagcggcgaaaggtaagcagggtggacgcacaatgggaatccagcgtctgatcgcccgtgctcttcgcgcggcagtagatttgaaagcgctgggtgagttcaccattacgctggactgcgacgtgcttcaggctgatggtggcacgcgtaccgcgtcgattacgggtgcctgcgtggcgctggtagatgcgctacagaagctggtggaaaacggcaagctgaaaaccaatccgatgaaaggatatgttagcgcgcaaggtgagctgatcctcaacgaaaaactggctaaacagctggtaactgccgcgaactgggtaaaaatgcagagtgacgaaggggaaatcaacccggttgatattctacgctggccgggcgtgatggcagcccaggagcaggatcttgacgccattgccgctgaaattctcgcggcgctggatggtacgctggacgactttattgtcgcgcgcgaaaccgaaggtcaggcactgaaagcattgatcgagcagcgtctggaaggcgtcaccgccgaagtggtcaaagtccgctcccatatgccggaaatcctgcaatggcagcgtgagcgtctggtcgcgaagctggaagatgctcaggtgcaactggaaaacaaccgtctggagcaggaactggttctgctggcacaacgaattgacgttgccgaagaactggatcgcctcgaagcgcatgtcaaagagacctacaacattctgaagaaaaaagaagcggttggtcgtcgtctggattttatgatgcaggagttcaaccgcgagtcgaacactcttgcgtcgaagtctatcaatgccgaagtgacaaactccgccatcgagctgaaacgtgctaatgcctggatgctcaactactccaacccggcagccattgtcgcagaagccacgcgtcgtctgcgcccgaatgcgaaaatcctcaacatctgtgacatgccaatcggtattgaaagccggatggcgcaaattgttgggctgcaagatcgcaaacagatgcgcgtgcgctactacggcctgaaccactggtggtcggcgatatcccgcagtttcagaaaggcgatagcgccagatccagacgcgcatcgaggtaatattctttcggcgtcttgccggtatagcgtaaaaacagacgacgcaaccaggcttcgctaccaggggatcgtgcagccatatgaggccactaagaaagagtcagtcatggccatgacgggctgtacttcaaggaagtcccagtataggtatttcccaggagcaacccaagtcttcgggtattacctgaattag

SEQ ID NO: 139139 - DNA, 2289 bp, Homo sapiens
cgtaaaatcaacggcaaactgcagccgcgcatgggtaaccgtgccatgctgctgggtaaaatcttcgctaacccgcatctgccggggatcgacgattattacgagccgttcgattttgactatcagaacctgcatcccgcgccggaaggcagcaaatcgcagccgattgcccgtccgcgttcgctgattcccggggaacggatggcgaaaatcgaaaaagggccgaactgggaagatgacctgggcggtgagtttgacaaactggcgaaagacaagaacttcgacaacatccagaaggcgatgtatagccagttcgaaaacaccttcatgatgtatttgccgcgcctgtgcgaacactgcctgaacccggcatgtgtggcgacctgcccgagcggtgcgatttacaagcgtgaagaagatggcatcgtcctgatcgaccaggataaatgccgtggctggcgtatgtgcatcactggatgcccgtacaaaaaaatctacttcaactggaagagcggtaagtctgagaagtgcatcttctgctatccgcgtattgaagcgggtcagccgaccgtgtgctcagaaacctgtgtcggtcgtatccgttatcttggcgtgctgttgtacgatgccgacgctattgaacgtgcagccagcaccgagaacgagaaagatctttaccagcgtcagctggacgtgttcctcgatccgaacgatccgaaagtcatcgagcaggcgattaaagacggtattccgctgagcgttattgaagccgcacagcagtcgccggtttataaaatggcaatggaatggaaactggcgctgccgctgcatccggaatatcgcacactgccgatggtctggtacgtgccgcctctgtctccgattcagtctgcagcagacgcgggtgagctgggtagcaacggcattctgccagacgtcgaaagcctgcgtattccggtacagtatctggcgaatctgctgaccgccggtgataccaaaccggtactgcgcgcactgaaacgtatgctggcgatgcgtcattaccaacgtgctgaaaccgttgacggtaaagttgatacccgtgcgctggaagaggtcggtctgaccgaagcccaggcacaggagatgtaccgttatctggcgattgctaactacgaagatcgctttgtggtgccgagtagtcatcgtgaactggcacgggaagccttcccggagaaaaatggctgcggctttacctttggtgatggctgccacggttcagataccaaattcaatctgttcaacagccgtcgtatcgatgccatcgatcatcaacaagagatgtttgaggcgattgccgcgtcgaaaaatctgccaaaagaggatgcccatgcgctgggcattttcctgcgcgatttaacgacgatggatccgctcgatgcccaggcgcagtacagcgaactgttcgaccgtggccgcgccacgtcactgttgctgtttgaacatgtgcacggcgaatcccgcgaccgcggccaggcgatggtggacctgctggcgcagtacgagcagcacggcttgcagttaaacagccgcgaattgccggaccatctgccgctgtatctggagtacctggcgcagctgccgcaaagcgaagccgtggaaggtttgaaagatatcgcgccgattctggcattgctgagcgcgcgtctgcaacagcgtgaaagccgttatgccgtgctgtttgatctgctgctgaaactggcgaataccgctatcgacagcgacaaagtggcggaaaaaattgccgacgaagcgcgcgatgatacgccgcaggcgctggatgctgtctgggaagaagagcaggttaaattctttgctgacaaaggctgcggtgattcagcaatcactgcgcatcagcgtcgctttgccgccggggcggtcttcctgattggtagctggctgcgttatgactacgggcagtacacctggcgcgcggcgtccagccagatgctggatcgcaaagggatgaacctggcgtcgaacctgttccatatcgggattctggggatttttgtcggtcacttcttcggtatgctgacgccgcactggatgtatgaagcctggctgccgattgaagtgaaacagaaaatggcaatgtttgctggtggtgccagcggcgtgctgtgtctgattggcggcgtgctgttgctgaaacgtcgtctgttcagcccacgcgtgcgtgcaaccactaccggagcggatatcctgatcctgtcgctgctcgttatccatgcgcgctgggcctgttga

SEQ ID NO: 139140 - DNA, 3412 bp, Homo sapiens
atggctaaactcttcatatggcggggagcagcgggggactgggggcccttcttgcgaacgctgatcacgggacaccatagggaatttgacgcttttgaggatgaggtaaatgacgggttggaagaaagcagcttggagggcgcatgtagtcacaggccccatagctggctgtgtcagaatctcccgtgtcagtggtgggaagaccaggaaaccatagggcacactatgctccggggatatgctacgaggatcttggggccctcttccgacaaggcacaagatcagtatgaagggtgtatcctcgcggttcctttatatggccacacaactggttccaaccggggattccaaaaggctcccaacggcctgtaccaaaaacagggggctcccgttaccgtgactcgtaactatccaaaacatgcagaaggctcggtgctggtcgaatttggcgataccaaagtgttgtgtaccgcctctattgaagaaggcgtgccgcgcttcctgaaaggtcagggccagggctggatcaccgcagagtacggcatgctgccacgttctacccacacccgtaacgctcgtgaagcggcgaaaggtaagcagggtggacgcacaatggaaatccagcgtctgatcgcccgtgctcttcgcgcggcagtagatttgaaagcgctgggtgagttcaccattacgctggactgcgacgtgcttcaggctgatggtggcacgcgtaccgcgtcgattacgggtgcctgcgtggcgctggtagatgcgctacagaagctggtggaaaacggcaagctgaaaaccaatccgatgaaagggatggtagccgcagtttctgtcggaattgtgaacggcgaagcggtttgcgatctggaatacgttgaagactctgccgcagagaccgacatgaacgtagtgatgaccgaagacgggcgcatcattgaaaaaagtaagatgaggagcgaaggcatgaaaccatatcagcgccagtttattgaatttgcgcttagcaagcaggtgttaaagtttggcgagtttacgctgaaatccgggcgcaaaagcccctatttcttcaacgccgggctgtttaataccgggcgcgatctggcactgttaggccgtttttacgctgaagcgttggtggattccggcattgagttcgatctgctgtttggccctgcttacaaagggatcccgattgccaccacaaccgctgtggcactggcggaacatcacgacctggacctgcccgcaatccgcgtattgaaccggaaacctgtgtcggttcgtatccgtaatcttggcgtgctgttgtacgatgccgacgctatggaacgtgcagccagcaccgagaacgagaaagatctttaccagcgtcagctggacgtgttcctcgatccgaacgatccgaaagtcatcgagcaggcgattaaagacggtattccgctgagcgttattgaagccgcacagcagtcgccggtttataaaatggcaatggaatggaaactggcgctgccgctgcatccggaatatcgcacactgccgatggtctggtacgtgccgcctctgtctccgattcagtctgcagcagacgcgggtgagctgggtagcaacggcattctgccagacgtcgaaagcctgcgtattccggtacagtatctggcgaatctgctgaccgccggtgataccaaaccggtactgcgcgcactgaaacgtatgctggcgatgcgtcattacaaacgtgctgaaaccgttgacggtaaagttgatacccgtgcgctggaagaggtcggtctgaccgaagcccaggcacaggagatgtaccgttatctggcgattgctaactacgaagatcgctttgtggtgccgagtagtcatcgtgaactggcacgggaagccttcccggagaaaaatggctgcggcttaccctttggtgatggctgccacggttcagataccaaattcaatctgttcaacagccgtcgtatcgatgccatcgatcaaaacggagccgcatccatgatcgaactcgtgattgtatcgcgtctccttgaatatccggatgctgccttatggcagcatcaacaagagatgtttgaggcgattgccgcgtcgaaaaatctgccaaaagaggatgcccatgcgctgggcattttcctgcgcgatttaacgacgatggatccgctcgatgcccaggcgcagtacagcgaactgttcgaccgtggccgcgccacgtcactgttgctgtttgaacatgtgcacggcgaatcccgcgaccgcggccaggcgatggtggacctgctggcgcagtacgagcagcacggcttgcagttaaacagccgcgaattgccggaccatctgccgctgtatctggagtacctggcgcagctgccgcaaagcgaagccgtggaaggtttgaaagatatcgcgccgattctggcattgctgagcgcgcgtctgcaacagcgtgaaagccgttatgccgtgctgtttgatctgctgctgaaactggcgaataccgctatcgacagcgacaaagcactgttggcaaagggcagtggtccctatttctatctgccgaaaacccagtcctggcaggaagcggcctggtggagcgaagtcttcagctatgcagaagatcgctttaatctgccgcgcggcaccatcaaggcgacgttgctgattgaaacgctgcccgccgtgttccagatggatgaaatccttcacgcgctgcgtgaccatattgttggtctgaactgcggtcgttgggattacatcttcagctatatcaaaacgttgaaaaactatcccgatcgcgtcctgccagacagacaggcagtgacgatggataaaccattcctgaatgcttactcacgcctgttgattaaaacctgccataaacgcggtgcttttgcgatgggcggcatggcggcgtttattccgagcaaagatgaagagcacaataaccaggtgctcaacaaagtaaaagcggataaatcgctggaagccaataacggtcacgatggcacatggatcgctcacccaggccttgcggacacggcaatggcggtattcaacgacattctcggctcccgtaaaaatcagcttgaagtgatgcgcgaacaagacgcgccgattactgccgatcagctgctggcaccttgtgatggtgaacgcaccgaagaaggtatgcgcgccaggaatatttgtcggcaccctgatggaagtcggtgcccacaaccagccggagagctggatagcagagttgctggcggcaaaggacagtactctggcggcatctccggcaaaagcggaaggtctgtatctgttctcggtggattaccctgaccggtatgatcttcccataccgcctatgggcccgctatttctgtcggacttacgagaataa

SEQ ID NO: 139141 - DNA, 1065 bp, Homo sapiens
tcagtagagtccacagccccgcaggtttttggcgatgatgacgtccgtcacagcatcaaagacaaactggatgttgttggtgtccgtggcgcaggtgacgtggctgtagatctctttgtgggctgacttgttcttgctctcgtactgggcctggatgtaagccacggcttctgtgaaggcgctggggcctgtatattcaggaaagcagatggtgagcggggacttcttgatcttctcttcaaatatgtccttcttgttaagaaacaggatgatggacgtgtctgtgaaccatttgttgttgcagatgctgtcaaaaagcttcagggattcgtgcatgcggttcgtggtttcgtcttcgtggagcacctggtcatagccgctgagcgcgacacagaaaatgatggccgtgacgtcctcgaagcaatggatccacttcttgcgttcagatcgctggcctccgacgtcaaacagcctgaagtggaggttcttgaatgtgaagtgggtttctacgatgccagtggttttgaccctggttcggaggatgtcctgctcagtgggctggtagtcggcggccccaatccgatccaggctgtccaggtagtatttggcagagtcgttgagttgatactcccgggaccggttgaagcactcttggattcctgagtcgccccagagccgcatcatggcagaaagcagctctgcagagaagggctcggtgtcttccatccgactcaccacatcacacaccatcttggcgtcagcctttctctccttatcaccatattcgatgcccaaagtgtccatggcccggacgatggctgccagggactggatagtgttgctgtagacaacaggcttgtactgtttcacgtcttctccggagaagccatcttcatggatgatcttcatctgcttcacaatggtgctttttcctgattctccagccccgagcaggagtaatttcacgtctttggcggcgctgatgccatcctctttgaggtttttctcaatcgccttgctccgctcgagggcggctctctcctctgcgctcagagtacatcccat

SEQ ID NO: 139142 - DNA, 1664 bp, Homo sapiens
gaaaccaatccagatactcgctactccttctcaaacaacagacgccaatcctttattccaatgagacagcataaatgccacatcctgctctacagagatataatggcttttcctgtggctgccttgtgtcaagggcagcctagcacagcaaagttactggctgacgccaagatggtgtgtgatgtggggaagtcaatagaaaacaccgagcccttctctgcaaaactgctttctgccaagaagcggctctggggccactcaagaatccaagagtgcttcaaccggtcccgggaatatcaactcaaccactctgccaaatactggtcgcgtctgtttcccgttttccgaccagcgagccatatgaaagctagcgccccatacctgccaggccagtggcgcaccgacgccaagcgaccgctaaagaccttattgacccgctggggcattcccggatattgccaacgactttggcgagaaaagtctgctgatgcctggcggcgcggtgattaacggcgacttcgaacaatgtgctgccagtggatttggttgatccgcagcaggtgcaggagtttgtcgaccacgcctggtatcgatatcccaacgatcaggtcgggcgtcatccgttcgatggcatcaccgacccgtggtacaaccccggcgatgtcaaaggcagcgataccaacattcagcagctgaatgaacaggaacgctactcgtggatcaaagcgccacgctggcgcggtaacgcgatggaagtggggccgctggcgcgcacgttaatcgcttatcacaaaggcgatgctgcgaccgttgagtcggtcgatcgcatgatgtcggcgttgaacctgccgctttccggtatccagtcaacgttaggccgcattttgtgccgcgcgcacgaagcgcagtgggccgcagatgccattgagaacaattacagcagaaacccaagtcaggggtacagcactgtgccccgtagcccacaccccaaagttgatcccatcctcacaaagcccagtggaccagctgggccagaaatgacgaggaaacagacccagagagaggacaggcctcgctcaaggcccagcatgacaacaagccccacctccaacctcaaaccctcggtgccagccttcaaaggcgtgggctacctggacagcctggatcggattggggccgccgactaccagcccaccgagcaggacatcctccgaaccagggtcaaaaccactggcatcgtagaaacccacttcacattcaagaacctccacttcaggacggagcaggcctcagtgcacgcatgttactgcaggctgtttgacgtcgaaggccagcgatctgaacgcaagaagtggatccattgcttcgaggacgtcacggccatcattttttgtgtcgcgctcagcggctatgaccaggtgctccacgaagacgaaaccacggttttgagcacgcgaattgtggacggacacagatattctgaccatagcaccattgcctgccctgccttcgggacttacactcttttggagctgaaggaactggctctttcttgctccacattgctccacattccccatcagcgttccccagcaggctctttcctagcagacaatctgaactgcacccaggctgcagtcatccctgaatttgggggcttctaa

SEQ ID NO: 139143 - DNA, 1344 bp, Homo sapiens
atgacttttggaggggaccaaatatttgaatcattagtttatcgatctgcatttcggcacgtctactctagaggatccccatggtatttacacaccaactctgatctttcatttgttgagagtaaaaaagaactgattgcagagcacatcttggagactttcccctggaatctgaagggccttacagagattccatggggtgatgcatccggtgaatccggcgctgtcggtttgggcgttctcgcagcggttcattatcacccgcaacgtcaaagcctgatggaaaaactggcgctgaacaaagatgccgtggtgctggttatcagcactgaaggcgacaccgaccaggtgattgagcggctggaaagcgatgccgtgctgcgctacggcattgaagatgtggtgacgaatctcgacgtgctggaacgtatgcagccttctgaaagcctgctacgcgctgttttgcacaccaaacatctgatgaaccccgaagtactggctgccgcccgccggatagtgtgccaggttgttgaagaaattatggctcgactggcaaaggaagttcgtcaggctttttctggtgtccgcgatcgccgtcgccgttcatttattccactggcgcgaaactttgatttcaaaagtactctgcgcgccaacctgcaacactggcacccgcaacacggcaagttgtatatcgaatccccccgctttaacagccgcattaaacgccaaagcgaacaatggcaactggtcttactggttgatcaaagcggatcgatggtcgattcggtgatccactctgcggtgatggcggcctgtttgtggcagttatcccggcattcgtacccatctggtggcgtttgacacaagcgtcgttgatctcacggcagacgttgccgatccggtagagttattaatgaaagtacagttgggcggcgggaccaatatcgccagtgccggggagtatggtcggcaacttattgaacaaccagcgaaaagcgtcattatcctcgtgagcgatttttacgaagggggttcatcatcattactgacgcatcaggtgaaaaagtgtgtccagagcggcatcaaagtgctgggactgggagcgctcgatagcaccgcaacaccttgctatgaccgcgatacggcccaggcgctgggtaatgtcggcgcacaaattagccgccctgatgccgggcgagctgggatcattggcttgggagaatcttctggcatggattcactagggccgggagtattagaactgacaccgcaggccccgccggcgttaagcaatgccggttttgttaagcgcagtcttaaggaactggaaaaaagcaacgt

SEQ ID NO: 139144 - DNA, 1913 bp, Homo sapiens
atgggcgcttacctgattcgccgtctgttgctggtgatcccaacattatgggcgattatcaccatcaactttttcatcgtgcaaattgcgcctggcggtccggtcgaccaggccatcgccgccattgagtttggtaatgccggagtattacccggcgcaggcggtgaaggtgttcgtgccagccatgcgcaaacgggtgtcggcaatatcagcgacagtaattaccgtggcggacgcggattagatccagaagtgatcgctgagatcactcatcgctacggttttgataagccgatccacgaacgttacttcaaaatgctctgggactacatccgctttgattttggcgatagcctgtttcgcagcgcctcggtgctgacgctgattaaagacagtctgccggtttccatcaccctcggattgtgttggtattttgtctgtcgtgcctgtgtagtgacacacgcgctcagtctctggcagagcgcaagcatagaagtaccccggacgtcggccacggcgaaagctcggaagacggaacccggaaggcagacaaagcggaaagtacgcagctcgcagacagtagcggcaagacagcgtatagctacgctgccccacagtatgacggtctgtaaccccggactcttccattctcaaatggcagacgccttggcccaccggtactacggatttaatatcgccgagccttgggacaacggcagcgaggcgatgttgcagcgggacatagggctaaaatctgagagtcgaggcctgatggctggtaaaaggtgcagttgtttgaagggtgagtgcggatggagcttggacatgcaagccagggtatccacatgcttctatgtgaggctgttgtgtgggacagagctggaggatcaccgcatctgcatcatcgacacgtgcgacaacaagtgtggaccacaacgtaggtatgtcatcaagttcagagaactatgtttagtgaattctactgtgactcttgttgatcaagagtacgaattgacagtgacagatccagaactatacgatggatcctcccaggcgttagcgggaatctctgatttgagctcgatctacgctacctgtgacccgggctactcctgtaccgaccgtgtgacgctggtagatgtgcgcaagcgccagtcaaaaaccgggccgtataaagagatcggacgctacggcattgatcgtaaccgttcgccgctgaaccctggctttcgcggaaaaccggacctgatgcccagccaatgtattgcctgcggtgcctgcgcctgtgcttgtccggcaaatgcgctgactatccagaccgacgaccagcaaaactcgcgcacctggcagctctatatggggcgttgtatttactcgacggacgttgtgaagaagtgtgcccgaccagagccatccagacttaccaataactttgtactgaccgtcaccaataaagccgatctctatacccgcgcgacgttccatctacaacgttgcagccgttgcgaacgcccgtttgccccgcaaaaaaccatcgcactggctgctgaattgttagcacagcaacaaaatgcgccacaaaaccgcgaaatgttgtgggcgcaagcgagcgtctgcccggaatgcaaacaacgcgcgacgctgatcaacgacgatacagatgtactgctggtggctaaggagcagctatgagtccagtgcttacacaacatgtcagccagcccatcacgctggacgagcaaacgcaaaagatgaagcggcatttgctacaggatatccgtcgctcggcttacgtttatcgcgtcgattgcggcggctgcaacgcctgtgaaatcgaaatttttgctgccattacaccagtattcgacgcagaacgttttggcattaaggttgtttcatcaccgcgtcacgcc

SEQ ID NO: 139145 - DNA, 866 bp, Homo sapiens
atgttgctgcgcgttgcgctcatcggcccgctgatttgcgccattaacagcgcacgctatctccgcactttaagtattttgcaatccagcggcgtccctctgctggatgggatgaatttgtccaccgaaagcctcaacaacctcgaaattcgccagcgtctggcaaatgcggcagagaacgttcgccagggtaacagcattcatctttcgctggaacaaaccgcaattttcccgccgatgatgctctacatggtggcctctggcgaaaaaagcgggcagctcggcacattaatggtcagagccgcagataaccaggagacactccaacaaaatcggatcgccttaacgctctccatcttcgagccagcactcattattacgatggcactgatcgtcctgtttattgtcgtgtcggtactccaacctcttcttcagcttccctccatgattaataaaggaagcataatgcgcgcaacggataagcaacgcggttttacattactggaaattatggtggtgatcgtcattatcggcgtacttgccagcctggcggataagcaaaaagccgtcagcgatattgtggcgctggaaaacgcccttgatatgtacaaactcgacaatcatcactatccaaccacaaatcaggggcttgaatccttagtagaagcgccgacactgccaccgctggccgcaaactataacaaggaaggttatatcaagcgtctgcctgccgatccctggggcaatgattatgtcctcgttaatcctggtgaacatggtgcatacgatctgctttcagcagggcccgatggtgaaatgggaaccgaggacgacatcaccaactggggtttgagcaagaagaaaaa

SEQ ID NO: 139146 - DNA, 2391 bp, Homo sapiens
atgcccgatacgttggtgattatcttttttgttgctattttaaccagccttgccacctgggtagttccggtggggatgtttgacagtcagaaagtgcagtatcaggttgatggtcaaacaaaaacacgcaaagtcgtagatccacactcatttcgcattctgactaacgaagcaggcgaacctgagtatcaccgcgtacagctgttcacgacgggcgatgaacgcccgggcctgatgaacttcccgtttgaaggattaacctcaggatcgaaatacgggacagccgttggcatcatcatgtttatgctggtgattggcggcgcgtttggcattgtgatgcgtacaggaaccattgataacggtatcctggcgcttattcgccatacccgcgggaatgaaattctctttattcctgcgctgtttattctgttttcacttggcggcgcggtatttggtattgctatgtcaactccacttcaaggaataaaagttctcgatttcaccggtgtgcaatctggcccatcttgtactcaaatgctggcctggtttggcgctgacgttattaaaattgaacgtcccggcgttggtgacgtaacgcgtcaccagctgcgagatattcctgatatcgatgcgctttacttcaccatgcttaacagtaacaaacgttctattgagttaaataccaaaacagcggaaggcaaagaggtaatggaaaagctgatccgcgaagctgatatcttagtcgagaactttcatccaggggccattgatcacatgggcttcacctgggagcatattcaagaaatcaatccacgtctgatttttggttcgatcaaagggtttgatgagtgttcgccttatgtgaatgtaaaagcctatgaaaacgttgctcaggcagcgggtggcgcggcatccactacgggtttttgggatggtccgccgctggtaagcgctgcagcgttgggtgacagcaacaccggaatgcatttgctgatcggtttacttgctgctttgctgcatcgcgagctcaatatgacggtcgcggagatcgtcgaaagggaagagtgggcgggatttcgcgccagagaaacggcggcgctggaagcggtaactgcgccatccaccgttatcgctacaggcggcggcattattctgacggaatttaatcgtcacttcatgcaaaataacgggatcgtggtttatttgtgtgcgccagtatcagtcctggaagatttccgccaacggacaatggaagtgctacggctggcgtttttatcctccggcattctcgaattttttacctcgctgtcaattgctctggtggcggtctactttggtttttcctatctcggcgagctggattttggtcactacgataccggtgtgacgctggctgcgggttttctggccctgatccttgcgccagagtttttccagccattacgcgatctcggtacgttttatcatgctaaagcccaggctgttggcgcagctgacagtctgaaaacgtttatggaaaccccgctcgcccatccgcaacgtggtgaggcggaattagcatcgaccgatccggtgaccattgaggccgaggagctgtttatcacgtcgccggaaggtaaaacgctggccggaccgctgaactttactttgccagcaggccaacgtgcggtgttggttggtcgcagcggttcagggagccgctactgcccgtatatcaaccatcgaaatgtccgtctgggcccaattgtaacagatgtgccgtgggaaaattcgggcgacaaatcattgccggaagccactgcgcaggtcatctcgagcgggtcaggggcgacaaaagttgaagacggtttgggcgacctcaacaagccggtgagtaatcagaacttagttactggaatagatacgccggtctataacgcgccgagtgcgggaagtgcgccatttggggtactggcggacaatatgcgctacccgattttgcataaactgaaagacaggttaaatcaaacctggtatcagatccgtattggcgatcgactggcctatatcagcgcactggatgcccaacccgataatggcctgtcggtgctaacctatcaccatattctgcgcgacgaagaaaacacccgttttcgccatacttcgacgaccacatcggtacgcgctttcaataaccagatggcctggctgcgtgacaggggatacgcgacactgagcatggtgcagctggaaggctacgtgaagaataagatcaatctccctgcgcgagcggtggtgattacctttgatgatggcctcaagtcggtgagccgctatgcgtatcctgtgttgaaacaatatggcatgaaggcgacggcgtttattgttaccacgcgcatcaaacgtgtttag

SEQ ID NO: 139147 - DNA, 2399 bp, Homo sapiens
ttaaatgtaggagctggtgaatgggattacaatttcccgcaggatttggcggattctatttgggatctgggtgggtgtccggtacttttgtactttccgtttcatggtgcgcctcttcctcttcgttggggcacggggcacatccaaagggtacatccggtatcttcccttgttgtcagttacgcggagataatccccggagaaagtcgacacacggctgtaagccatacccgccatcgcatacgcgctgaaccattcattcacgcgcacagacggccccaccatcacgctgaaccagcggttacgcacggaatcttcatgccagcgggtatcgctgtaacgggtaagctggcgattcttgtctcctgcatagctgaatggccgccctgcagtggacaacccaacaacaatatccgtcatttgtgcaggcaacatgcgcatagcaaaagccgtttgttttgccgacattccggttttgcttaattgtgattgagtaacctcaagctcactccgcatagcacgaagttttccagaaagctcctcatacatgtcaggagaaagcatccccttagcttttgcttcattgagctgtttctgttgttctaccagacgattaaaagcagttccgacaggatcaagttgagcaatcagacgttgcaaagcaacaacctgttcatcatgcgcttttgctgcttctcgctctgcctgagcctcttgatgaatactattgcattggatatgcccatagtgctgtctgtaggcatttccctgccaaaatcggacaaaatccatctgtgcttcaaagccaaaccacatatctgagttcataaccgaggccatgagtctcagcatctttttcgcggtaatccgcaaagccgtcagtccaaagatctcggagccgggttcgttcacctgttttttacccgcggtccacaccagaagctctttgctggacactttgctaagcgccacggtatcggaaacaacaccacccgtcgtcgcccgatacccaccaaccatcgcctcgacgaggtacagtccccggctcccttgctgcggctcgaacggtttagcctgccatagtggataacggaactgtttcaccaggggatattttttcagcggggaaaactggttgttctgtacataacgggaaggtttaataatggcattgccgagctgtaattcgggtaacgcctgagtcacattctgccgtgactgagaagagaaagtacgctgcatcacgcggcgagatttgccgtaccagttatcccacagccaggttagcgtattgttcagcccgtcgcccagatattgcggttgcaccacaatgcgatgcaggtttttctgctggcgcaaaaatgccatcgggtcaggaatacgatacaggcgaacgtccacgccgccgtactcttccatcgcggactccgctgttaaccggaggatatgcatcatgaaaaccgttagggagtccacaacgttgtacaactttctcggatcgcacaatccatactggcggttgacggaaagcagcgatgttttgcgcttttctaccaccgaaaccacagaacctgatcgtacattgcagttatctgccgaacaggctgctcgcatcagggaaatgacggtcatcacctccagcctgatgatgagtctgaccgtcgatgaaagcgatctttctgtgcatctggtaggacgaaaaatcaataaacgggaatgggctggcaacgcgtctgcatggcatgacacaccggcggttgctcgtgatttatcacacgggctttcctttgctgagcaggtagtttctgaagcacattccgcaatagtgatgatgaaccgtatattgttcgaccggtcgctgtcgcctggcgtgattatgttccgcaaccggcgcgtaacggtttgagcaactttactggcaaccttgaagaacctgcggtgatggttaactacttcttgcagggcgacccttatcaggggatggtccactttacccgctttttccaccagcacccgtctggcctcagctaatgggtcgcgggtaacatttttcagatcctctgtgctaaccagccagtccggaagcgcacccgggacaatgttcagttgttgcattccagagggcaacgtggcgtttttcgctgctcccgccgggtactgaccgggctggtggaccgcttcgggcgcacacagacgttccaccgcgaagccgccggtgaattcagcggcgaaatcaccggcgtgacggatggtgcctggcgtcacttccggctggtactgaccacgcaggcgcagcgggcagaagaagcccggcagcaggccatttccggcgggacggaaccgtccgcttttcctgataccctgccggttgacaccgaatatgtgatgaacttcattac

SEQ ID NO: 139148 - DNA, 1911 bp, Homo sapiens; identical to SEQ ID NO: 122822

SEQ ID NO: 139149 - DNA, 1158 bp, Homo sapiens
atgcgacacgggataactgggaaaactgtgcaatatatcagccacactagacgtgcccaatacgggcacaacgcgtggaaaccctatacgatcgggcatacagggaggtttttggttggaatccccgcggccccaccggcaggcccaacgcaaggcacactgggtaaagcaaagaaggcggccgaacagaggcggacgagacggacgcggcagactcagggcaacggggaatggaacagaggtctgaaatggataggaaacccactggcactaccggacaaaggtccgaaaagccccggcgcaccctggaatgcctcgcacttcacgaaacccgtatcttcctgccgcagcggaaggaaacgcactcctcggatgcacacgacatgccgggccctccgatgctgtagccaggatttgaaatgtcccgcgaccattactgagcagacggtcttgcggagagcagataccaggaatcgctatgctgcaggaaagctgggagccgaagtggcatacagtcggccccgatggatgaacgtgtgcgttgatgctgaaaaagtgattggtatttccggacatctgctggcacctgaggtgtgtattgttgttggcgcttctggcgcagcagcgttaatggcgggcgtacgcaatagcaagtttgtggtggcgattaatcatgacgccagcgctgcggtatttccacaggcagatgttggcgtggttgatgactggaaaggtggtgctggaggcactggtgacaaacattcacgcagattgccaataacgtgttgccggatgatcctgcctacggttctggcctggggacttgtaggcctgataaggacgcgtcaagcgtcgcatcaggcgctgaatgtcggatgtggcgtgcggcctacaaatcaaaccaaattcaattggttacgattatcccgtcaaagtaattttttcgctaacgtccagaccccggtattcgtggtggaaagcgccacgacacccgcgttaatcgcattacgcgcatcttcttcatcgcacaccagcccaccggcaatcagcggttggcggattttctctgtcacccagcccagcactttgggcatacagcctggcaggatctcaatacaatccggattcgattgcgcaacttgcttatcaatgttgtga

SEQ ID NO: 139150 - DNA, 4134 bp, Homo sapiens
atgatgactcaaggcaccttggtcgatgccaccatcattgaggcacccagctcgaccaagaacaaagagcagcaacgcgatccggagatgcatcagaccaagaaaggcaatcagtggcactttggcatgaaggcccacattggtgtcgatgccaagagtggcctgacccacagcctggtcaccaccgcggccaacgagcatgacctcaatcagctgggtaatctgctgcatggagaggagcaatttgtctcagccgatgccggctaccaaggggcgccacagcgcgaggagctggccgaggtggatgtggactggctgatcgccgagcgccccggcaaggtaagaaccttgaaacagcatccacgcaagaacaaaacggccatcaacatcgaatacatgaaagccagcatccgggccagggtggagcacccatttcgcatcatcaagcgacagttcggcttcgtgaaagccagatacaaggggttgctgaaaaacgataaccaactggcgatgttattcacgctggccaacctgtttcgggcggaccaaatgatacgactggcacaggcagatgacgccgccccggcagcgggcagtactctggacaaaatcgccaaaaacggtgtgattgtcgtcggtcaccgtgaatcttcagtgcctttctcttattacgacaatcagcaaaaagtggtgggttactcgcaggattactccaacgccattgttgaagcagtgaaaaagaaactcaacaaaccggacttgcaggaccaagaagacaacacagatgacagaccgatcatgagagagacgagacgaccagagcgagacacgacaagaagaagaagaaaggtagagggccattttggtgtgtcggtctccgagttttctcgggaggttgttccagggcccaaggaagttcatgcaaaaaaagggtggtttcggtgttggacccgagggccttctcagtactgcgctgtcctaaaaaaagtaatagggggcaacaaacttccacaagaggagaggcgcaacaaagagggaacaacctgcgcggtgctgacgccgcttattcagacgctgcgtgacattcccggcgtgaaagcgctgcgtgatgccacccgtggtggtgtaaacgcggtggttcatgagttcgcggcagcctgcggttgtggtattgaactttcagaagcggcactgcctgttaaacctgccgtgcgtggcgtttgcgaattgctgggactggacgccctgaactttgccaacgaaggcaaactagtaatagctgttgaacgcaacgcggcagagcaagtgctggcagcgttacattcccatccactggggaaagacgcggcgctgattggtgaagtggtggaacgtaaaggtgttcgtcttgccggtctgtatggcgtgaaacgaaccctcgatttaccacacgccgaaccgcttccgctcaatgaccttttgcaccgctttgcggtgctttcctggaagaacaaaatgtcatatacaccgatgagtgatctcggacaacaagggttgttcgacatcactcggacactattgcagcagcccgatctggcctcgctgtgtgaggctctttcgcaactggtaaagcgttctgcgctcgccgacaacgcggctattgtgttgtggcaagcgcagactcaacgtgcgtcttattacgcgtcgcgtgaaaaagacacccccattaaatatgaagacgaaactgttctggcacacggtccggtacgcagcattttgtcgcgccctgatacgctgcattgcagttacgaagaattttgtgaaacctggccgcagctggacgcaggtgggctatacccaaaatttggtcactattgcctgatgccactggcggcggaagggcatatttttggtggctgtgaatttattcgttatgacgatcgcccctggagcgaaaaagagttcaatcgtctgcaaacatttacgcagatcgtttctgtcgtcaccgaacaaatccagagccgcgtcgttaacaatgtcgactatgagttgttatgccgggaacgcgataacttccgcatgcgggttaccgggtgcttttgtctcacagctctcaagattctttccttcatcgtaacattaaatagcctgatgacaatgtgcctaggcgatgatctttttgcaatgaatttcccaggaaagaatgatacagagagacagaaagagagagagagagagactgaaaggcagacagatggaaaacatgcactcatggtggaagccagagtccttgctaacctaatttcagaagtggcataccatgctcccatgagattgtggtgtagcaaggccctctatgatccaccttcaggcagaaatgcaggcatttggagcacctacttgcctgaaccagcatccatctgccaggtgacttcgttagatattccaaccgtaagcgtgcgcaaatcccactggggaaatgcgctaacggcgacgctgcaaacagaaaaacgcccgctatgcctttccctggcgcgtcaggcgggagcagcgaaaaacgccacgttgccctctggaatgcaacaactgaacattgtcccgggtgcgcttccggactggctggttagcacagaggatctgaaaaatgttacccgcgacccattagctgaggccagacgggtgctggtggtggggcagggcggagagccagataaccaggaaatcgctatgctggcagaaaagctgggagccgaagtgggctacagtcgggcgcgagtgatgaacggtggcgttgatgctgaaaaagtgattggtatttccggacatctgctggcacctgagtttcatcggaccaaaaccgtcgattttgcaatcgatgttatggtcgccttcaaccaggcggatgtttttcactttggtgccaattttcagcatcgaagagctacctttcaccttcagatctttaatgatggtaacgctgtcgccgtcagccagcagattgccgttagcatctttaacgatcagctcgtcgctttcctgtgcaggttctgcgtcgttccattcgtaggcacattccgggcagatgtacatgccgttatcttcgtgtattcggagttgcattttgggcagtgtggtaatgacatgtggatttcctcaaaagtcagcagggcaaaagcgccaaaaaacggcagattgccgaaaaaggccgcaattatacacaaaatccctgagtttgtcggggtgaaggcaattctggccaaaggctacgacccggtgaaatggcggaagaaagataaggtgctggacgcagtattgaaagagctggaaagcggtaaatacagcgacggcgataagcatgccttcgaccagatgctgcacagtatcggcaaacagggcggcgatccgtatctggtgatggcggatttcgcagcctatgtagaggcacaaaagcaggtggatgtgctgtaccgcgaccaggaggcctggactcgcgcggcgatcctcaataccgcccgctgcggaagctcgatggaaagcaaacgtctggataatgccgcgctggcggcggggattagccccaattacatcaatgcccacggtaaaccgcagtcgattagcgccgaaaccaaacggcgtttgcttgacgcgatgcatcaacgtaccgccacgaaagtggcggtaacgccagtcccgaatgtcatggtttataccagcggcaaaaaaatgccgatggtggtggagggcagcggcgaatatagctggctgctgaccaccgaagaaggaacgcagtacaaaggccatgtaacggggggcaaagcgttcaatctaccgacgaagctgccggaaggttatcacacgctgacactcacccaggacgaccagcgcgcgcattgccgggtgattgtcgccccgaaacgctgttacgaaccgcaggcgttgctgaataaaccaaagctgtggggtgcctgcgttcagctttatacgctgcgatcggaaaaaaactggggtattggggattttggcgatctcaaagcgatgctggtggatgtggcaaaacgtggcgggtcgttcattggcctgaacccgattcatgcgctctatccggcaatccggagagcgccagcccatacagcccgtcttctcgccgttggctga

SEQ ID NO: 139151 - DNA, 2574 bp, Homo sapiens
atgaccatcatcggtctgtctcccccgctctgggtgtttccatttcgcctgcgtcatttaaacgtgttcagctcaacgaaatgcgctgggtgccgattgctgaagaggatgcggtttctgaaatgtggttggtctggccgaaacatcatgaacaaagtccggctgcgccctacagattatttcggagcgcgaaaatatagggagtatgcggtggttgctgaaaaccagcctgggcacattgatcaaataaagcagaccaacgcgggcgcggtttatcgcctgattgatcagcttggtccagtctcgcgtatcgatctttcccgtctggcgcaactggctcctgccagtatcactaaaattgtccgtgagatgctcgaagcacacctggtgcaagagctggaaatcaaagaagcggggaaccgtggccgtccggcggtggggctggtggttgaaactgaagcctggcactatctttctctgcgcattagtcgcggggagattttccttgctctgcgcgatctgagcagcaaactggtggtggaagagtcgcaggaactggcgttaaaagatgactgccatgctggatcgtattatttcccatatcatacggacagttcgtatgtctggttctgttgccgtgacacgcgccattgccgtgcccggattgctgttattactgattatcgcgacggcataagcctgctcattggggcaaaatcactccccgcttccgtagtgctggaggccttctccggcacctgccagagcgccgactgcaccatcgtgctcgacgcgcggctgccgcaacgcgactggaagtggctggaaaaagcgcctgtcatcaagataccagcggtcagaaacaagcgagtcagatggctggaaaaggaggaagcaaaacgccttattgatgagtgccccgaaccactgaaatctgtcgtcaagtttgcgctggcaactggtctgagaaagtcgaacatcataaatctggaatggcaacaaatcgacatgcagcgacgagttgcctgggtgaatccagaagagagcaaatcaaaccgcgccattggtgtggcgctgaacgataccgcctgtaaagtgttgcgtgatcaaataggcaagcatcacaaatgggtgtttgtacataccaaggcggctaagcgagcagatggaacatcaacgcctgcggtcaggaagatgcgcatcgacagcaagacatcatggctatcagcttgtcgtcgtgcaggaattgaagatttccgtttccatgacctcagacacacctgggcaagctggctgattcagtcaggcgtcccattatcagtgcttcaggaaatgggcggatgggagtccatagaaatggttcgtagagcatgcgaggaaaatagacgacattattgtataaggtaccgagctaccgataacgcctcgctgaacacacagcggcgcgtggcgctggcacaggcgcagcttggcgataccgcagcagcgcagcggacgtttaataagttgatcccgcaggcaaaatctcagccaccgtcgatggaaagcgcgatggtgctgcgtgatgcgatggcggcggacctctatcgccagcaggatcttaacgtcacccttgagcacgattactggggttcgagcggcaccggtggttactccgatctgaaagcgcaacagctagccatgttgcccacggtggatgcgccgtattctgacgggcggatgcttctctctcgccatgtcagtgccgcgttacctgcccgttatatgcaaaccatcgaaaatgctgcgttctgggcgcaaattggtgacaagatggtgaccgtggggaatattcgggccggacaaatcattgccgtggagcccactgccgcaagttattacgcatttaattttggctttggcaaaggttttatcgataaaggtcatctcgagccggttcaggggcgacaaaaagttgaagacggtttgggcgacctcaacaagccgctgagtaatcagaacttagttacctggaaagatacgccggtctataacgcgccgagtgcgggaagtgcgccatttggggtactggcggacaatttgcgctacccgattttgcataaactgaaagacaggttaaatcaaacctggtatcagatccgtattggcgatcgactggcctatatcagcgcactggatgcccaacccgataatggcctgtcggtgctaacctatcaccatattctgcgcgacgaagaaaacacccgttttcgccatacttcgacgaccacatcgggccactttttccggttcgcgggcatcgcgtaccagatcgttaagcagacgaccgttggcactactgtagaaatcactctgcgcaggtacgtcgttgatggcaaccgcattccaccacggcaggatcggcagggcgatgcctttttcggtttcgccacccatacccagcagtggcatcaggtttttaaacgccagcgcgatatccagatcgttaccgccaatacggcaaccactgtgacccagcaggctggcttcacgatcgagacgcgaacgccactgcggccccatcagcagcaatga

SEQ ID NO: 139152 - DNA, 1941 bp, Homo sapiens
atggcgatccacgaaatgatggtggtgacgccggaattacgggccgctattcatgaaaatgtggatgaacaagcactggagcgactagtccggcaacaacacaaggccttaatcaaaaatggcctgcaaaaagtgataagcggtgacacctcctgggatgagtgccacgctggagagcgaagcatgaattatcgctatcgcgccatgacccaggatggtcaaaaattgcaagggatcattgatgctaacgatgaacgtcaggcacgactgcggctgcgtgaagaagggcttttcctgctggatattcgcccccaaaaaagttcgggagtaaaaacacgtcgcccgaggatcagccatagtgaactgacgcttttcacccggcagttggcaaccttaagcgcagcggcattacccctggaagagagccttgccgtaatcggtcaacaaagcagtaataaacgactgggtctgagcgacacgttgcaacgtaccggcccgacattattagcgacagtgtttattgtcgctgtaggtttctggctctggttaaaacgcggcaataaccgccaccgttttcatgccatgttgctgcgcgttgcgctcatcggcccgctgatttgcgccattaacagcgcacgctatctccgcactttaagtattttgcaatccagcggcgtccctctgctggatgggatgaatttgtccaccgaaagcctcaacaacctcgaaattcgccagcgtctggcaaatgcggcagagaacgttcgccagggtaacagcattcatctttcgctggaacaaccgcatttcccgccggcctgccacactgttaaccgccaggaagacatcggccacatggttacctatgaccacctgaaactggccaccgctttccaccaccataataataccgggggtctttttcagtacctctgcttgcgcttgctttcatcctttaatttaaaacagcaagtcgatgaccaaaaaactcatattaaaacctggggctgtcagatgaacgagtacgattcatcgaagatggccgatctgctggatgccacccacggctatcaactgaccgacgtggcggaagaagcggatgtgctgctgctgaacacctgctcaatccgcgagaaggctcaggaaaaagtcttccatcagttgggtcgctggaaactgttaaaagagaagaatccagacctgattatcggcgtcggtggctgcgtggcatcgcaagaaggcgagcacattcgccagcgcgcccactatgtcgatattatttttgggccgcaaacgctgcaccgtctgccggagatgatcaactccgtgcgtggcgaccgcagcccggttgtagatatcagcttcccggaaatcgagaagtttgaccgtctaccggaaccgcgcgccgaagggccgaccgcgtttgtctccatcatggaaggctgcaataaatattgcacctactgcgtggtgccttacacccgtggtgaagaggtaagccgtccgtccgacgatattctgtttgagattgcccagcttgcggctcagggcgtgcgtgaagtcaacctgctcggtcagaacgtgaacgcctggcgtggtgaaaactacgacggcaccaccggatcgtttgccgatctgctgcgtctggttgctgcgatcgacgggatcgatcgtattcgctttaccaccagccatccgatcgaattcaccgacgatatcatcgaagtgtatcgcgacacgccggagctggtgagcttcctgcatctgccggtacagagcggttccgatcgcattctgaacctgatgggccgtacccatacggcgctggagtacaaagcgatcatccgtaaactgcgtgcggcgcgtccagatattcagatcagttctgatttcatcgttggcttcctggcgaaaccaccgaagacttcgagaaaacgatga

SEQ ID NO: 139153 - DNA, 287 bp, Homo sapiens
ccgccaggcaggccatgaaggcgatgttctgattctcaaacagcacgccgaggataatcgcaatcacgccgaggatcagtacggcgatttttgatacccgcaacacttcacgttcggtcgcgccttctttgatagacgttagcgtacaagtcatgcgaaaccgcggatgcgcccgccagcgtcagacccgcaaccaccgcgaggatagtggcgaaagcaaccgctgaaataaaaccgaggaacaggttgccgcccactgcattctctcaggaaggccgccagatcgc

SEQ ID NO: 139154 - DNA, 3345 bp, Homo sapiens
atggatagagcgggggacggacccatccgtccgttgtcaggacctacagacgtgtacggtgacaccgtgtacctccgcgaccccgggccgaaccatggaaaaaccaccaacgggcctttacggttcgtgcccttgctgccctttggtcaacaggtttttccgcgcgtaaccccgaatttctggaatcccgtgtccagtgccgcgttacctgcccgttatatgcaaaccatcgaaaatgctgcggtctgggcgcaaattggtgacaagatggtgaccgtggggaatattcgggccggacaaatcattgccgtggagcccactgccgcaagttattacgcatttaattgtggctttggcaaagcttttatcgataaaggtcatctcgagccggttcaggggcgacaaaaagttgaagacggtttgggcgacctctacaagccgctgagtaatcagaacttagttacctggaaagatacgccggtctataacgcgccgagtgcgggaagtgcgccatttggggtactggcggacaatttgcgctacccgattttgcataaactgaaagacaggttaaatcaaacctggtatcagatccgtattggcgatcgactggcctatatcagcgcactggatgcccaacccgataatggcctgtcggtgctaacctatcaccatattctgcgcgacgaagaaaacacccgttttcgccatacttcgacgaccacatcggtacgcgctttcaataaccagatggcctgggctcgcgtggacaggggatacgcgacactgagcatggtgcagctggaaggctacgtgaagaataagatcaataaccgcgcgaccgaacgtgaagagctgcgggtatcaaaaatcaccgtactgatcctcggcgtgattgcgattatcctcggcgtgctgtttgagaatcagaacatcgcctttatggtggggctggcgtttgccatcgcggcgagctgtaacttcccgatcattctgctttctatgtactggtcgaaactgaccacgcgtggcgcgatgatgggtggctggctggggctgattaccgcagtagtactgatgatcctcggcccgacgatttgggtacagatccttggtcacgaaaaagccatcttcccgtatgaatacccggcgctgttctctatcaccgtggcattcctcggcatctggttcttctcggcaaccgataactcagcggaaggcgcgcatttgcgaccaatacgaaggaaaaaagtgtaccggttcaactacttgcgctcggatggtccgtaccaagggtgggtcagcgaaagattattgatcctgagggcgatatcccctggttgtagcaagctggtgcattttcccacgcttttcgattcgctctatcgtaccctggtaaaagcgggcgaaaagagcgggctgctggccccggtgttggaaaagctggctgattacaatgaaaaccggcagaaaatccgcagcaagctcattcagtcactgatctacccctgtatgctcactacggtggcgattggggtcgtgattattctcctcactgctgtcgtgcccaaaattaccgaacagttcgtgcatatgaagcagcaactgccgctgagtacacgcattcttttaggtctgagcgacacgttgcaacgtaccggcccgacattattagcgacagtgtttattgtcgctgtaggtttctggctctggttaaaacgcggcaataaccgccaccgttttcatgccatgttgctgcgcgttgcgctcatcggcccgctgatttgcgccattaacagcgcacgctatctccgcactttaagtattttgcaatccagcggcgtccctctgctggatgggatgaatttgtccaccgaaagcctcaacaacctcgaaattcgccagcgtctggcaaatgcggcagagaacgttcgccagggtaacagcattcatctttcgctggaacaaccgcattttcccgccgatgatgctctacatggtggcctctggcgaaaaaagcgggcagctcggcacattaatgggtgcgcaatcccactgggaatgcgctacggtgaacgctgcatccaggatacgcccgctatgcctttccctggcgcgtcagccgggagcagcgaaaaacgccacgttgccctctggaatgcaacaactgaacattgtcccgggtgcgcttccggactggctggttagcacagaggatctgaaaaatgttacccgcgacccattagctgaggccaagacggggtgttgttggtggggcaaggccgaaaaagccagatacccaggaaatcgctaatgctggcaaaaaagctggaagccaaagtgggttacagtcgggcgcgagtgatgaacggtggcgttgatgctgaaaaagtgattggtatttccggacatctgctggcacctgaggtgtgtattgttgttggcgcttctggcgcagcagcgttaatggcgggcgtacgcaatagcaagtttgtggtggcgattaatcatgacgccagcgctgcggtattttcacagacagatgttggcgtggttgatgactgaaaagtggtgctggaggcactggtgacaaacattcacgcagattgccaataacgtgttgccggatgatcctgcctacgtgttctggccctggcggacttgtaggcctgataagacgcgtcaagcgtcgcatcaggcgctgaatgtcggatgtggcgtgcggcctacaaatcaaagcaaattcaattggttacgattatcccgtcaaagtaattttttcgctaacgtccagatcccggtattcgtggtggaaagcgccacgacacccgcgattaatcgcattacgcgcatcttcttcatcgcacaccagaccaccggcaatcagcggttggcggattctctctgtcacccagcccagcgctatgtgggcatacagcctggcaggatctcaatacaatccggattcgattgcgcaacttgcttatcaatgttgtgaaacgaaattgaatcaacaataaacaggcgatgaatacagaaaaaaccttccgctcttgccgctttcaacattgaggctttggtactgataatgccgtccgcctcggtcaccagtttcaaaaactgaataacgacttctttatttgacgcgccttccagcaaatcaacatgaataaaagcatatttcccggcgttcttaatctttttaacgatattactgatggtgcagatattgccgtacaacacggaaataaattggcattcagaatcgattgccagttgcaggctggcattatctttaacggcagcaatcaccggattctggcggagcaggtgtaagaggggcat

SEQ ID NO: 139155 - DNA, 828 bp, Homo sapiens
atgattgaatgtttcctgaggtttcccaagaagcagaagctgctatgcttcctgtacagcctgcagaactcatacttacagcgcagaaaaacattaacccgggctctggcaaaactcgcaagagcaacatcaaatgaaaaattaagtcaggcttttcatgcgcacctcgaggaaactcatggacagattgaacgtattgatcaagttgtggagtccgaatcgaacctgaaaattaagcgcatgaaatgtgtggcaatggaaggtcttattgaagaagctaatgaggtcatcgaaagtaccgagaaaaacgaagtgcgtgatgccgcactgattgccgcagcacagaaagtcgagcattatgagattgccagttacgggacattagcgacgctggctgaacaattaggttaccgtaaagcagcgaagcttctgaaagaaaccctggaagaagaaaaggccaccgacatcaaactgactgatctggccattaataactcattttataaagaggacattttcatgaatcgtattgaacattatcatgactggttacgtgacgcccacgcaatggaaaagcaagccgaatctatgcttgaatccatggccagccgtatagataattatcctgaactacgcgctcgtattgaacaacatcttagtgaaaccaaaaaccagattgttcaactggaaactattcttgatcgtaatgacatttcacgttcagtcattaaagattccatgagtaaaatggctgcgcttgggcagtcaaccgctgacacaacaaagaactcaacacacagacagagcaacacacgacaaggaaactga

SEQ ID NO: 139156 - DNA, 322 bp, Homo sapiens
tggcataattggtttgcatttacaacagcaagaagcggtagcggttgcgatcgtgcggggcgcaacaagaatgctttttgcaacgctggtggcggttgccgctggagaacgacattatcaaagatgggcggattgttgatgcgcagcagctggctaaaacgttgttaccgtggagtcgcgaactgccgcagcgtcatcacattatgttggcgtttcccgccagtcgcacattacagcggtcatttccgcgcccgtcgatgtcccttggtgagcgggagcaaacggcctggctgtcagggacgatggcccgcgagctggatat

SEQ ID NO: 139157 - DNA, 973 bp, Homo sapiens
cagcaaaaacacccttgagattgtgcaggaaggtgttgaagcgcgtaaaaccatgcgttttgccgacggcagcgaactggaagtcgactttatcgtcttctctaccggtatccgtccgcgcgataagctggcaacccagtgtggtctggacgttgctccgcgtgggggtattgtcattaatgattcctgccagacttccgatccggatatctacgccatcggtgaatgcgcaagctggaacaaccgtgtatttggtctggtagcacctggctacaaaatggcgcaggtcgccgttgaccatattctcggtagcgaaaacgcctttgaaggtgctgaccttagcgccaagctgaaactgctgggcgtagacgtaggcggtattggtgatgcgcacggtcgcacgcctggcgcacgtagctacgtttacctcgacgaaagtaaagagatctacaaacgcctgattgtcagcgaagacaacaaaaccctgctcggtgcggtactggtgggcgataccagcgactacggtaacctgctgcaactggtgctgaacgctatcgaactgccggaaaacccggattccctgatcctgccagcacactcgggtagcggcaagccgtctatcggggttgataaactgccggacagcgcgcaaatctgctcctgcttcgacgtcactctgcttgtgctctggcagcgggcgaatcacaatcttcttgcccggctggttgagtgccgaaatcggggtaatacaggccagaccattcttgccgttcatgttcagaccgtcggaaccgcacacaccttcacggcaggagcggcggaacgacaggctgggatctttctcttttagctggataagcgcatccagcagcatcatgtcgcgaccttcatccgcttccagggtgtaatcctgcatacgcggagcatcatcaacatccgggttatagcgataaattgaaaactcgagtctcat

SEQ ID NO: 139158 - DNA, 574 bp, Homo sapiens
gtttcgcaacttgataggagacttcggtcatgttgccgtagttgccagagaatttgatgctgtcgaacgggaccatcatcgctgcggtcgctttgttcagttcttcgactttagtgccatccgggagcgtgacggtgtaacgcccgctttttgatgactgggtttcaaagaagcgaccgacttcagaacttggtgatgcggtagtcgcaacacccgggatctcaactttcttcgcggcttcgccaccggcagccagagctgcacgtcctgcttcggaatctgccgggatcacatccgggctctggacgatacgtttcttagcatcttttttatagatgaatgcagtaatacgctggttgccgccctggttggcatcgatttgacgaacgatgtagaaagagtaggcacctttcgcttttgccgctttggtgatggcatcattgacttctggctggctacgatagaagcctgtcgtgctcgagagccgtggcgcgcatagccgcttcgacttcccggatcgtgatgatgaaaactggctgtgccactccctgtatctgccagagtcggaatccat

SEQ ID NO: 139159 - DNA, 639 bp, Homo sapiens
atgctcatacttccggctttggagacaaagaatcagaaaaagtcagccctcagcgaaagctgcatgctatgtcaagaactttcttctgggagaattctgaggtgtcatggaaacttaggatctcctacatatgcttttcaaatatctgctattgacagagtgaacttcgccctggtagtggggttacacctaagacatgattaccgcaatgagaaacttggacggtctggtagacattatcaggcgccagtaggaaaccgcagcagtgctgatggcatgcatcgggacccatgttctcaattggatatctgttgcattctgctgggagcaggctcgatttatggcctataccgctacatcgagccacaactgccggatgtggcgacattaaaagatgttcgcctgcaaattccgatgcagatttacagcgccgatggcgagctgattgctcaatacggtgagaaacgtcgtattccggttacggacggaccagtgatgtggtttccattcatgataataacgacttgtgtaaaaggaaactttgctttaaataatcagtttagagaagatatgttaaattacaatacagagggtatttatgggaaaaacgtgaatttcgaaaacaataaacaaacataa

SEQ ID NO: 139160 - DNA, 2839 bp, Homo sapiens; identical to SEQ ID NO: 127735

SEQ ID NO: 139161 - DNA, 1452 bp, Homo sapiens; identical to SEQ ID NO: 118134

SEQ ID NO: 139162 - DNA, 1326 bp, Homo sapiens
gttccggctgtaccggcaattccgcagcagtaattcacggccaaaacgccggagaattttcactccggcgttttcatgttgcaacaacatcgacttgatatggccgatggcgcgcgtcgggttcagccccttcggacatacactgacgcagttcatgatgctgtgacagcggaatacgctgaatgcatcactcaaaccgtcgaggcggctgtcagtctcggtatcacggctatcaatcaggaaacgatatgccgctaacaagcctgccgggccgataaacttatcgggattccaccagaaagacggacaagaggttgaacaacatgcgcagagaatacattcatacagcccgtcgagtttttcgcgctgctctggcatctgtaaatgctcgcgagctggcggattttgtccattattcaacaggtaaggcttaattttctcatattgcgcatagaattgtcccatgtctaccaccaaatcgcggatcaccggtaaacctggcagcgggcgaatcacaatcttcttgcccggctgcggtttaccgccggaaagggtgtgaaaacgttttggacgcttaatacgcgtcatatacttggaccacacgcgttctgcttctgtcactggctcacgttcgccacggcatactgctacgaagagtttctcttcctcggtaaccggctcgcgtttgccaagatccaactcattgaaggcataaccatgacgctcaagcagttgtgcctctcgcgacatagcgagttttctatctgtgccagcggctcgttgtggtaatgtatgcttaatcatcgacatatcgaccatggtgatcggcgtggaacgaatggcgacgatcagcgggttagtgcctatgcgacactcttttggcacccacggcggcattacggcgatggagttggtccagcaaatgccaatatagcctttttccgccgcctgccagccgttactgccgccgcgcatccagtggttggcattacgtagtgccaccagaccaataccgtgatcggcagccagttcaatggcgcgatccatcatctttttcgctgtcaggttaccgatcgaacgctgggcgtcccactgttcaattgcgccgaggctggttatacgtttgggttgggcatcaggaatgatatcgccgttttccagttgttgaatgaaacgagggaaacgattaacgccgtgagaataaacgccggattcggtggtgcgggcgaacatctctgcacaggcgtcagccgtttcgctgtcaacgccgcgtgaaattaagacccgattaaaggctgcttttaactgctcaaatgtcactttcat

SEQ ID NO: 139163 - DNA, 1540 bp, Homo sapiens
ctatacgttttgccagaaggccgataaccgcggccaggtgagtgattccgttgaaggcaacagtaattgcgccccggttaagcccgcgccgatccccaccgagcgcataccgctggcgttaatggcgtcaatgcccgcctgcgcatcttcaatgccgatacatgcctgcggcggcacgcccagccctgcacaggcggcgagaaagatttccgggtccggtttcgagtttttaagttgggaagcatccgcgcagaaggtgaaaaactcgcgcagctccagcgccgctaaaatcgtcggcgcattcagggagacagaagccagcccaaccgagatgtgctgtgcccgaagatctgccaagcaaagagcgaatgccgggtagaacagcgttgaccgtcaactcgcgtagtgagtggacatagagcagatttttgcgatacgccagttgcgccctctcgtctgatgtaatcaactccgccagcaactgataaaccttcatcgtttctgccggttcggcatcgccgctatcgctgatatacccttcatcacgcagtgtcagcaccagagaactgaacaccgccttgtcgaagaactccggcgcgttgatgccgtgcagcacggagagacgttgcgcgacggtgcggctctctttctccaagctaccgcggttgatcgacgggttggcactcaacaaccagaaggtgatggcataacgttgcagcgttttcgccgccccttcggccaagaactggtacctcccggggaaagtggccattcctgggaaaattgccgccttaaccaagggcgcccaactttgggcaatgtgttgccaaggagggtataacacccttggccagcagcccccacgaaaatgaccggtcatggctttggttgcagaaatcgccgggctcttatcgccgaacacttcacggatagctgccagctctttcacgtcgcccaccggagtcgaagtaccgtgggagttcaggtaatcgattggggtatcaacgccatgcatcgccatcttcatgcagcgtactgcgccttcgccagacggagcaaccatgtctgcaccatcagaggttgcgccgtagccaacgatttcagcatagatgtgagcaccacgcgccagcgcgtgttccagctcttcaaccactaccataccgccgccgccagcgataacgaaaccgtcacggtgagcgtcgtaagtacgggaggctttttcccggggggtcgttgtatttagtagacagcgcaaccattgcgtcgaattcgcaagccattttccaacacaaaaaacttttttccttttaccccggcccaaaatccaccagcggacggctgatatgccaggcttcatcggcggtgaccagcagcatttcaaaacggtcactcctttcatgccatccttgattagattgatgaagcccactttcttgccgtggcggaggattttcttgcgcatcagttccggcgcgctgccatcaatggtgaacaggtcacgcgccacacccaccgccagctccgggtagccgctaaacat

SEQ ID NO: 139164 - DNA, 1350 bp, Homo sapiens
atggcacgagactccgtgctgctactggaaaaactcggctgtcgcgtaaatttcccggagaaacagggatgctgcggtcagcctgcgatcaatagcggttatatcaaagaagcgattccagggatgaaaaatctgatcgccgcactggaggataacgacgatcccattatttcaccggctggctcttgcacctatgccgtaaaaagttacccgaacttgaagcttgatgaatcacttgcgcaacttggcttgcgacctacacaaggccgttggtggttgacttgcgaaggccggcgattaggtctggcgaaatacaaagcggcggcggggaagcaaaccatactgctggattattcacgcgcagaagtgaacgagatgcagatcctcaaacaagctgatgtggtgatgctcaattacatgctgccggagcagttctcagcggcatcgtgtcttgccaatctgcaattttatgaaccgcgcactattcacgactcgtcattaagtaaagcaatccacggcattgttgccgcacgctgtggcctgctgacccaaagttatcagttctggcgcgaggggactgaaatcgatcttggtgctgatccgcatagttgtgatgatggtatccatgctgccgcaactggcgctatctggctgggggcgattcagggttttgccggggtgagcgtgcgtgacggtgaattgcatctcaatccggcgttacctgagcagtggcaacagttgtctttccctctgttctggcagggctgcgaattacaggtcactcttgacgcgcagcgtattgcgattcgaacttctgcgcccgtttcactgcgtttgaacggtcagcttataaccgttggcctgaacgcatctggtttttccggtaggactgaactgaaacctgacaaggcggtcaattttcggatcctggatggctgtaatcaaccgataccgcgcatctgcatttcccaggcgtggcagcagattgccgctgaaattggcatcagcattgatgcgcagtttaacgaatccctaaaagggatcagccgcgatgagtctctgccggcgcattctgcaacaccggggcgcaaaaggacgtggccggaactctttaacctccgccaggagagggcgcaactggcgtatcgcaaaaatctgctctatgtccactcactacgcgagttgacggtcaacgctgttctacccggcattcgctctttgctggcagatctccgtgcacagcagatctcggttgggctggcttctgtctccctgaatgcgccgacgattttagcggcgctggagctgcgcgagtttttcaccttctgcgcggatgcattcccaacttaa

SEQ ID NO: 139165 - DNA, 1198 bp, Homo sapiens
ctcggtacccgctacatcgagccacaactgccggatgtggcgacattaaaagatgttcgcctgcaaattccgatgcagatttacagcgccgatggcgagctgattgctcaatacggtgagaaacgtcgtattccggttacgttggatcaaatcccaccggagaaggcgagaagcctttatcgtgacagaagacagccgtttctacgagcatcacggcgttgacccggtggggatcttccgtgcagcaagcgtggcgctgttctccggtcacgcgtcacaaggggcaagtaccattaccccagcagctggcgagaaacttcttcctcagtccagaacgcaccgctgatgcgtcagattaaagaagtctttctcgcgattcgcattgaacagctgctgacgaaagacgagatcctcgagctttatctgaacaagatttaccttggttaccgcgcctatggtgtcggtgctgcggcacaagtctatttcggaaaaacggtcgaccaactgacgctgaacgaaatggcggtgatagccgggctgccgaaagcgccttccaccttcaacccgctctactcgatggatcgtgccgtcgcgcggcgtaacgtcgtgctgtcgcggatgctggatgaagggtatatcacccaacaacagttcgatcagacacgcactgaggcgattaacgctaactatcacgcgccggagattgctttctctgcgccgtacctgagcgaaatggtgcgccaggagatgtataaccgttatggcgaaagtgcctatgaagacggttatcgcatttacaccaccatcacccgcaaagtgcagcaggccgcgcagcaggcggtacgtaataacgtgctggactacgacatgcgccacgctatcgcggcccggcactatgtgctgtggaaaccaacggcaaacatccgcgcccgttataaagcacagggaattgagttgcctgcggtagtgccggctggaccggataacccaatgggccatcatgcgattcgtctggcggcctatggcggcgtttatttgcttcatggtacgaacgccgatttcggcattggcatgcgggtaagttctggctgtattcgtctgcgggatgacgatatcaaaacactctttagccaggtcaccccaggcaccaaagtgaatatcatcaacactccgataaaagtctctgccgaaccaaacg

SEQ ID NO: 139166 - DNA, 3290 bp, Homo sapiens
tcctgcagttggcagtttctaggtctaaaatctgagcaagcgtgtacaacagctgcgtatattgcaacagccgtatgctgtttggtctggcacaacagggtaatgcgccaaaagccgtggccgtctgtcgataaacgtggtgtaccagtgcagactgaggattggcgctggtgacgtggcgcatgtcgtagtccagcacgttattacgtaccgcctgctgcgcggcctgctgcactttgcgggtgatggtggtgtaaatgcgataaccgtcttcataggcactttcgccataacggttatacatctcctggcgcaccatttcgctcaggtacggcgcagagaaagcaatctccggcgcgtgatagttagcgttaatcgcctcagtgcgtgtctgatcgaactgttgttgggtgatatacccttcatccagcatccgcgacagcacgacgttacgccgcggacggcacgatccatcgagtagagcgggttgaaggtggaaggcgtgttcggcagcccggctatcaccgccatttcgttcagcgtcagttggtcgaccgtttttccgaaatagacttgtgccgcacaccgacaccataggcgcgtaaccaagtaaatgcatcagcgtgcgttctggactgaggaagaagtttctcgccagctgctgggtaatggtacttgccccttgtgacgcgtgaccggagaacagcgccacgcttgctgcacggaagatccccaccgggtcaacgccgtgatgctcgtagaagcggctgtcttctgtcgcgataaaggctttcaccatctccggtgggatttgatccaacgtaaccggaatacgacgtttctcaccgtattgagcaatcagctgcccatcggcgctgtaaatctgcatcggaatttgcaggcgaacatcttttaatgtcgccacatccggcagttgtggctcgatgtagcggtataggccataaatcgagcctgctcccagcagaatgcaacagaccgtcagagtgacgggtgataaggagatcatcacaatggcatttaagatctggcaaattggtttgcatttacaacagcaagaagcggtagcggttgcgatcgtgcggggcgcaaaagaatactttttgcaacgctgcagccggttgccgctggagaacgacattatcaaagatgggcggattgttgatcgcagcagacctgcaggatccggtgcaggatatggaaatgtggcagttccacccgaccggcattgcttgcggggcgtactggtcaccgaagttgccgtggtgaaggcggttatctgctgaacaaacatggcgaacgttttatggagcgttatgcgccgaacgccaaagacctggcgggccgtgacgtggttgcgcgttccatcatgatcgaaatccgtgaaggtcgcggctgtgatggtccgtgggggccacacgcgaaactgaaactcgatcacctgggtaaagaagttctcgaatcccgtctgccgggtatcctggagctttcccgtaccttcgctcacgtcgatccggtgaaagagccgattccggttatcccaacctgtcactacatgatgggcggtattccgaccaaagttaccggtcaggcactgactgtgaatgagaaaggcgaagatgtggttgttccgggactgtttgccgttggtgaaatcgcttgtgtatcggtacacggcgctaaccgtctgggcggcaactcgctgctggacctggtggtctttggttcggcccgacaggttctgcatttgcaagagtctatcgccgagcagggcgcactgcgcgatgccagcgagtctgatgttgaagcgtctctggatcgcctgaaccgctggaacaataatcgtaacggtgaagatccggtggcgatccgtaaagcgctgcaagaatgtatgcagcataacttctcggtcttccgtgaaggtgatgcgatggcgaaagggcttgagcagttgaaagtgatccgcgagcgtctgaaaaatgcccgtctggatgccacttccagcgagttcaacacccagcgcgttgagtgcctggaactgcataacctgatggaaacggcgtatgcaacggctgtttatgccaccttccgtaccgaaaggcgtggcgcgcatagccgtcttcgacttcccggatcgtgatgatgaaaactggctgtgccactccctgtatctgccagagtcggaatccatgacgcgccgaagcgattacaccctggaagcggatgaaggtcgcgacatgatgctgctggatgcgcttatccagctaaaagagaaagatcccagcctgtcgttccgccgctcctgccgtgaaggtgtgtgcggttccgacggtctgaacatgaacggcaagaatggtctggcctgtattaccccgatttcggcactcaaccagccgggcaagaagattgtgattcgcccgctgccaggtttaccggtgatccgcgatttggtggtagacatgggacaattctatgcgcaatatgagaaaattaagccttacctgttgaataatggacaaaatccgccagctcgcgagcatttacagatgccagagcagcgcgaaaaactcgacgggctgtatgaatgtattctctgcgcatgttgttcaacctcttgtccgtctttctggtggaatcccgataagtttatcgggccgggaagcttgttagcgggatatcgttccggattgattgccgggataccgaaatgctcagctcggtacctgtctggagaaaagcgaagtgtggcgtggcagcagattgccgctgaaattggcatcagcattgatgcgcagtttaacgaatccctaaaagggatcagccgcgatgagtctctgcggcgcattctgcaacacgggggcaaagagggcgactttaactcgcaggagagggcgcaactggcgtatcgcaaaaatctgctctatgtccactcactacgcgagttgacggtcaacgctgttctacccggcattcgctctttgctggcagatctccgtgcacagcagatctcggttgggctggcttctgtctccctgaatgcgccgacgattttagcggcgctggagctgcgcgagtttttcaccttctgcgcggatgcttcccaacttaaaaactcgaaaccgggcccgggaatctttctcgccggctgtgcaaggctgggcgtgccgccgcagggctgtatcggggttggagattcccagcggggcttggagcgcttacgcccgcggatgccccctggacggggaaagagaatggccaatataagtccataa

SEQ ID NO: 139167 - DNA, 2235 bp, Homo sapiens; identical to SEQ ID NO: 124941

SEQ ID NO: 139168 - DNA, 1014 bp, Homo sapiens
atggattcttatgtcgatcaactgcaagcgcagggcggaagtatgatcatgctggcgaaaggcaaccgcagccagcagggtgaaccgtggcaaacgattcgtttaatttctgaattttacccggaagacagcggtctgttctccccgctattgctgaatgtggtgaaattgaaccctggcgaagcgatgttcctgttcgctgaaacaccgcacgcttacctgcaaggcgtggcgctggaagtgatggcaaactccgataacgtgctgcgtgcgggtctgacgcctaaatacattgatattccggaactggttgccaatgtgaaattcgaagccaaaccggctaaccagttgttgacccagccggtgaaacaaggtgcagaactggacttcccgattccagtggatgattttgccttctcgctgcatgaccttagtgataaagaaaccaccattagccagcagagtgccgccattttgttctgcgtcgaaggcgatgcaacgttgtggaaaggttctcagcagttacagcttaaaccgggtgaatcagcgtttattgccgccaacgaatcaccggcgttttatatttcgccaaattacctctcgcacctgtttcaaaaaacgggggccattggttttaacgaatacctgaatcacacgcgactggagcacgctaagacgttattgaaaggctatgacctgaaggcacaacttttccagggtaccgagatgatgtgtatcagtcaatattaccgtccccgccatgtggcaaatggaaggtcacggcaaactgcaatataccgacgaaggttttcgccaacatcgcccgtaacggatcgagcagctcctggctgtgcagcggatattacgctctacgagccgcgcggcgactaccagataatcgttgagagtatctggaagtcgggcgcaatccagagagcttttatcgctaaatcagggggatttgctgtggtaatgccggatgccattctgaagcatccggcatgggagatttaa

SEQ ID NO: 139169 - DNA, 3747 bp, Homo sapiens
ccggttgccttttaagtatccagttaaagtaaagcctttacctgccccttttagtaaaattttattaaactccccagcaattccacaacttcccatcaccatgaatggttccgatttctctctaccggaaggccctatgaatcggtgggaaaacattcagctcacccccgaaacccgacttgcgccgcgtgcgtactttttttcatatgattctgttgcgcaagcgcgtacctttgcccgcgaaaccagcagcctgtttctgcccttaagcggtcagtgggaatttccacttttttgaccatccgctgcaagtaccagaagccttcacctctgagttaatggctgactgggggcatattaccgtccccgccatgtggcaaatggaaggtcacggcaaactgcaatataccgacgaaggttttccgttccccatcgatgtgccgtttgtccccagcgataacccaaccggtgcctatcaacgtattttcaccctcagcgacggctggcagggtaaacagacgctgattaaatttgacggcgtcgaaacctattttgaagtctatgttaacggtcagtatgtgggtttcagcaagggcagtcgcctgaccgcagagtttgacatcagcgcgatggttaaaaccggcgacaacctgttgtgtgtgcgcgtgatgcagtgggcggactctacctacgagaaagaccaggatatgtggtggtcagcggggatcttccgcgatgtttatctggtcggaaaacacctaacgcatattaacgatttcactgtgcgtaccgactttgacgaagcctattgcgatgccacgctttcctgcgaagtggtgctggaaaatctcgccgcctcccctgtcgtcacgacgctggaatataccttgtttgatggcgaacgcgctggtgcacagcagcgccattgatcatttggcaattgaaaaactgaccagcgccagtcttgcttttactgtcgaacagccgcagcaatggtcagcagaatccccttatctttaccatctggtcatgacgctgaaagacgctaacggaaacgttctggaagtggtgccacaacgcgttggcttccgtgatatcaaagtgcgcgacggtctgttctggatcaataaccgttatgtgatgctgcacggcgtcaaccgtcacgacaacgatcatcgcaaaaggcgcggcgttggaatggatcgcgtcgagaaagatctccagttgatgaagcagcacaatatcaactccgtgcgtaacgctcattttgtcgattatgtgaacagcggtttttataacaacactacctttcaccgcgtcattcctggctttatgattcagggcggcggtttcaccgagcagatgcagcagaaaaaaccaaacccgccaatcaaaaatgaagccgataacggcctgcgcaacacgcgtggcaccatcgcgatggcacgtaccgctgacaaagacagcgccaccagccagttctttatcaacgttgccgataacgccttccttgaccatggtcagcgtgatttcggttacgcggtatttggtaaagtggtgaaaggcatggacgttgccgataagatttcccaggtgccgactcatgacgttggtccgtaccagaatgtgccgtcaaaaccggcttctgttcgttatgacgttaacgatcaacgtctggatatagacgttcctcaagcctgggtaatgaaaaattaccaaaactatgttgatccatcgttatgggaaaacggcattaatgcggccatgttgtcatacaacctcaacggatatcatagtgaaacccctggtcgaaaaaatgaaagcatttatgctgcatttaacggtgggatgaatttaggtgcatggcgactgcgtgcctcgggcaactacaactggatgaccgattctggcagtaattatgattttaagaatcgcaagccggggcgtcggcgttatctgacgctggtgatgatctttattacggtagtcatttgttatgtcgaccgcgccaacctggccgtggcttccgcccatattcaggaagagttcggcattaccaaagcggaaatgggctatgtattttcggccttcgcctggctttatacgctatgtcagatccccggcggttggtttttagatcgcgtaggttctcgcgtgacttattttattgcgatatttggctggtcagtggcgactttattccagggctttgccacgggcttaatgtcattaattggtctgcgcgcgataaccggtattttcgaagcgcctgctttcccgaccaataaccggatggtgaccagctggttcccggaacatgaacgcgcttctgccgttggtttttatacgtctggtcagtttgtcggtctggcgtttctgacgccgctgctgatctggattcaggagatgttgagctggcactgggtgttcattgtcactggtggtatcggcattatctggtcgctgatttggtttaaggtttatcagccgccgcgcctgaccaaaggtatcagcaaagctgaactggattacattcgtgatggcggcggtctggtggatggtgatgcgccgggacagctgccagaacgaatgagcccagctctcctgcccgcagccagccgcgtgtgggtgcaactggcgaccagccactggaatgggaagatgcgcggttttggttttgttcagttcaaaaacctcctagaagcaggtaaagctctcaaaggcatgaacatgaaagagataaaagaccatcgaccctacgtcgttggatttgccgccgatacaaataatgtggaagaatacgcccggcaaaaacgtatccgcaaaaaccttgatctgatctgcgcgaacgatgtttcccagccaactcaaggatttaacagcgacaacaacgcattacaccttttctggcaggacggagataaagtcttaccgcttgagcgcaaagagctccttggccaattattactcgacgagatcgtgacccgttatgatgaaaaaaatcgacaactggctccgggtgacactacgctggttccgaccgggctggcgattcatattgccgatccttcactggcggcaatgatgctgccgcgctccggattgggacataagcacggtatcgtgcttggtaacctggtaggattgatcgattctgactatcagggccagttgatgatttccgtgtggaaccgtggtcaggacagcttcaccattcaacctggcgaacgcatcgcccagatgatttttgttccggtagtacaggctgaatttaatctggtggaagatttcgacgccaccgaccgcggtgaaggcggctttggtcactctggtcgtcaaaaaacaaactgcgaaaaggaaccgtcgcgaggaaatacttcagtctctggcgctgatgctggaatccagcgatggaagccaacgtatcacgacgcacccatcggcacgctttctggtggcaatcagcaaaaagtggtgatcggtcgttgggtctatgctgccagccagattttgttgctcgacgagccaacgcgcggcgtcgatatcgaagccaaacagcagatttaccgtattgtccgtgagctggctgccgaaggaaaaagcgtggtgtttatctccagtgaagtggaggagttgccgctggtgtgtgaccgcatcctgttattacagcacggcacgttctcgcaggagtttcacgctccggtcaatgtggatgagctgatgtccgccattctgtctgtgcactga

SEQ ID NO: 139170 - DNA, 2646 bp, Homo sapiens
atgcccatagaagaaccggcgctgcgcagctggcagcgcccgttccttaaatgggctggcggcaaatattcgctgctgccggaactggatcgtttgatccccgcaggtaaacgccttattgagccttttgtgggtggcggctcggtgttccttaactcagacaagcacgaacgcttccttctggctgacgtcagcgctgacctgattaacctgtatcagatgctggcggtggtccccgattcggtgatctatgaggcaatgaaggcattcaggcatcttaatgatgccgaaaactatacgttaattcgtgaagcattcaacgcgcagcggctggatgcggtcgagcgtgcagcagcattcctttacctcaatcggcactgcttcaacggcctgattcgttacaacctggacgttttttttaacgtcggctttgggaagcataagcaaatgacaaataatgaaagcaaagggccgtttgaaggcttattagttatcgatatgacacatgtccttaatggacctttcggaactcaacttctttgtaatatgggcgcaagggtaattaaagttgagccgccgggtcatggtgatgatacccgcacatttggtccctatgtggatggacagtcactctattacagttttattaatcatggcaaagagagtgtggttcttgatttaaagaatgatcacgataaaagtttcggacataccggtccgctaaaagatgctcctgcctacgataccatcattcaggcaatgagcgggataatgatggaaacaggatatcctgatgctccgccagtgcgcgttggtacatctcttgcggatctatgcggcggtgtctatttattcagcggaatagtgagtgcactttatggccgcgaaaagagccagagaggggcgcatgtcgatatagcgatgtttgatgccacgctgagttttctggagcatggtctgatggcatatatcgcaactgggaagtcaccacaacgtctgggaaatcgccatccctacatggcaccttttgatgttttcaatactcaggataagccgattacgatttgttgtggtaatgacaagcttttttctgcgttatgccaggcactggagcttacggaactggttaatgatccccgatttagcagcaatattttacgcgtacaaaaccaggctattcttaaacaatatattgagcggacgttaaaaacgcaggcagctgaagtttggttcacgccattctccaacaagtacaatgggcatcgtattgcccgaacagataaagctagcatgccaacggtatacagcgagtcgctctttgtggaggggatcatccgagcgtctacgtcaatgaccacaaagcagggaccttcactgcggaccggaagaacgctgagaaagttctgtccactctcggagactgcagcaacgactgatagtagtatcttccccagcaaattcaccccgacagctagcaggctgccggggttttcttttatcaggagcccgaaaatgacccaatccgtgttgctgccaccggggcctttcacccggagacaagcgcaagcgttcactaccacgtacagcaatatcacactcgaagacgaccagggcagtcacttccgtctggtggttcgtgatactgaaggccggatggcatccgtacagacacggccacccgctgatcgcgaagcatttacccgcattcacctccccgaacacactttatatccccatacgccagccatcgccgctggcgtttttattgacggagacatacccatgacaacacagacgcagcacgacctcgcacccgctaaccaacccgaatttgaactgaccgtcacgccggtccccgatgaacagcgtatcgatttctggccacagtactttggcgctatcccgcagtggctactcctggagccgcatatcttcgcctggatggaccgcttctgtgagggctacagcggtggtatctggtcgttctacaccctcagcaatggcggcgcatttatgtcccccgagcctgacaacgatgagacatggcgtctgtttaactgcctgaacgccaccatgccgccgtacagaatgacgtgcgggacggtgatttatgctatccagatgagtatcttcctcgcccgcatctcccgtggtcgtactgtgcgtgaactgtgcttcggcatggtgctggggctgacagcgtcaacctggatcctgtggactgtactcggtagtaacactctgctgttgatagataaaaacatcatcaacattccaaatctgatcgaacagtacggtgtggcgcgcgccatcattgaaacctgggccgctctgccactcagcaccgccaccatgtggggcttcttcatcctctgctttattgccaccgttacgctggttaacgcctgctcttataccctggcgatgtccacttgccgcgaagtacgcgatggtgaagaaccacctctgctggtgcgtatcggttggtcaattctggttggcattatcggtattgttctcgtggcgctcggcggcctgaaaccgattcaaaccgccattatcgccggaggatgcccgctgttcttcgtcaacattatggtgacgctctcctttattaaagacgcgaaacagaactggaaagattaa

SEQ ID NO: 139171 - DNA, 2935 bp, Homo sapiens
ttaggtttttgtccccctcccaagatcaacgaaaccgccggtattgcccagcgtaaacgaagcatcccctccccctgttttcaccagcgtcatcgcgtcgtcagactgtgggctgacgccggtatcctgaacaaagattttaaaattaccagtggcgttgttgttgacgaccagttgatcgccccgggagcctgcaacgttggtatgcaggtagaaattaccgctaccggaaagttcattggttgtcagcgtattgtagataccgttagttgtggcaggcgctgctgtttgtgctgacaaataaacatcaccgtcgttgagtagcaaactgtttactctatattcgcagttgctggtacctgcacaggaattattgctgttaagccagacactgccccggctggcagccgtcaggtcggcaagcgtggtatcgacgccatttcccagagtcaatgtcgcgctatcggtaatccggaccgccccttcgagtttaactggcgtaacattatcccgtggcgtcattaacgacaggcttcctgtcgcgccactgaccgatgcatccgccagcgtacctgcgtagacgattgccgtaccgccagcgacctggagatcttctgcccgggccagagcctgaaactcatcttttgaccgcccaagggtatattgcccgccagagttaacctttgtggcggagtcctgacccaggttttgcattgccccacccttgccaaccgtggagtcgcgagcttcggtacctgctaataccaataaattaccgccattttccagcaacatattggtcgctaaattgccggaaatggaaaaagtaccgtactgatgagtaccgctgatttcaataccgttagccgtgctcgtctggagagcggcaccgctgttctggacgatatctgtcgctttgccattatcgttgactgtcagcgtaccgcctaagggttgaaatgtacaccctcgagaagtggcccattctccttttgtagtggagtattgaggtttaatttctcttatggagccttcccagattagaggggtttgaagtgtgttgatgtcttgaggctttcttgccgctgacctagctacctgactggctaatctatttccttcggctacctcatctgttcccttctgatgtcccctacaatgcatttctgtgatttctcgtggaaggaaaactgaggaaagtaaccttttaatttcctggtgatgttttataggagatccattggtggtaagaaaatgcctttccttccaaatggctgcatgagcatggagaactaggaaagcatactgggagtcagtgtaaatattagctacctttcctttgcttaattcaattgctcttgtaagagctattagctcagctaattgagcgcttgtgcctggaggaagagacacacttttaatgacgtcatttagagtgactactgcgtatcctgccttgtggatccatgctctacaagagagctcccattgaaaatgaaagcccttgccgatgcgggattcccccaggccgtgatcccgccgcacgagcgtccgtttattccggtgctgcgtcagttgggattcagtggtagcgatgagcaggtactggaaaaagttgcacgccaggcaccgcactggctttccagcgtcagttccgcttcgccaatgtgggtagccaatgcggcaacgatcgcgccatctgccgatacgctggatggcaaagtgcatctcaccgttgccaacctgaacaataaatttcaccgttcgctggaagcgcccgtcactgaatcgcccgcaataatccggcaggaacaccaccttcaacttatcgccaaccagcggatcgttgttgatcacgtcagccactttgttgatcgcaaagataatattcttcgccaggtagtagcccggtgccgctttcgcgccgaagaggaagacgcgcggtacgcgatcagcctgcgggttttcacgaatttctttgtacaacgccagaatatgcagcagattcaggtgctggcgtttgtactcatgcaaacgtttgatctgaatatcgaaaatcgcctgtggattgatctcaataccggtacgaactttcacaaactccgccagacggactttattcgcctgcttgatctcgcgatattgctgacggaatttcgcatcatcagcgaatttttccagattgatcagctgatcgagatcgttagcccactctttttgcagtgatttatccaacagagccgccagtgccgggttgcactgtttgatccagcgacgtggggtaataccgttggtgcactgggctcctccatgttgccgggttgataacaacgcctgcgctattccggtgggcttatggatattcgtgatgggaatttggggggcagtgttaacagctttggtagggcgtaggtaataagtgccgtcatggccggtctctatgttgacggagcgtatggggtcggtgatatggccgtctattggcggtttaatggtgacgatcaggtggcgtagcttgtaactgtgcggtgtcggcgtcgtgcatgttagtaaccgtgttgccgtggttaagccttccggtgttgtgtttggtttatgggatggttttttcgcatcgcttggcgttacggcgctattggcggcgacaccagcactggtagggcgtgaaaacttaatgcaggccggggcgatcaccatgttgaccgtgcgtctggggtcggtgatttcgcccatgattggcggtttattgctggcgaccggtggcgtagccttgctaccgttgttaagccttccggcgttgccaccgccaccgcagccgcgtgagcatccgttgaaatcattactggcaggatttcgttttctgcttgccagcccgctggtgggcgggattgcgctgctgggtggtttattgacgatggcgagcgcggtgcgggtg

SEQ ID NO: 139172 - DNA, 1557 bp, Homo sapiens
tcatggtttcaacagcgccggcatactgatcacgggggacttccagttgcatggggccattatttcccatgtaacgatactgtccgttttgtccgtcgaatgccgcaccgacgctacgggctgcagttgaacaatatttcgtctggatttctgttccgctgaccagtctgtctgctccatttctggcattatatcaccgagatccgtgcgtttttcagacgactgtctgtggcacgccgaatggacgctaaatttctcttcgtcgttaaaaatcgcttttaacagcgattcagtgacgggcgcttccagcgaacggtgaaatttattgttcaggttggcaacggtgagatgcactttgccatccagcgtatcggcagatggcgcgatcgttgccgcattggctacccacattggcgaagcggaactgacgctggaaagccagtgcggtgcctggcgtgcaactttttccagtacctgctcatcgctaccactgaatcccaactgacgcagcaccggaataaacggacgctcgtgcggcgggatcacggcctgggggaatcccgcatcggcaagggctttcattttcagtaagccctgcttcgccgccagtcgcgggttagacaccacctcatcggaaaaatccagcccggggttaagcgtggcgggcaatgttaacgagtccgactccaggctcgccatcggccatgcgcagtaatctgcggcataccaggcgctggggcgatggttaccggaagcaccaatgccgccgaatggcgcggtactggcagcaccggtaagcggtttgttccagttaacaatccccggccgcgcctccagcaacagttgatcgaacttttcccgctcgggggaaaccagaccgcaagagagtccgaagcgagtgttattcgcccatcgaatcggcttctgcacagtttcatagggccgaagcgcaataagggtccgaaacctctttttttgtgttgccgcgagacccgttttttcatgggtcccgcgggtcgaacgagttctcgcttttaaaacgcggggccgcggggttcgcccccttctcatggtgctcctgacccgcggtgggcgtcgaataacgcgcaagggcgtgtcccgcgccgtttcgtgtggacagaaattctccctccgagggggggtgtgaccatcggtcattagttgtcggtcaaattccgggaacatatcggtccaggcttccacgtcatacaacgcccccaggttacgaccataatcgaaagaacccaaatctttatatttcaacccggcaaaagcgagacgcgttttttgctgtgcagtatcactctctgctttattaccggcaaactctgcttcccaacgaccataaccagtcagttgatcgttaatttgtgtttcgcctttgaaaccaaaacggatataactctggtcgccatctttactggcgttatcactcatataatgcatggctttaactttgccatagacatccagtttattaccgtctttattatatatttctgcagcctgtacagatgcagatgccacaatgcccat

SEQ ID NO: 139173 - DNA, 1842 bp, Homo sapiens
atgaactacttcaccgattcggtggggatgttgctgatgtatctgccgcgcatgttgttctataccgatcccatcgctaaaggcggcttcccgcagggctggaccgtgttctactgggcatggtgggtgatttatgctatccagatgagtatcttcctcgcccgcatctcccgtggtcgtactgtgcgtgaactgtgcttcggcatggtgctggggctgacagcgtcaacctggatcctgtggactgtactcggtagtaacactctgctgttgatagataaaaacatcatcaacattccaaatctgatcgaacagtacggtgtggcgcgcgccatcattgaaacctgggccgctctgccactcagcaccgccaccatgtggggcttcttcatcctctgctttattgccaccgttacgctggttaacgcctgctcttataccctggcgatgtccacttgccgcgaagtacgcgatggtgaagaaccacctctgctggtgcgtatcggttggtcaattctggttggcattatcggtattgttctgctggcgctcggcggcctgaaagcgattcaaaccgacattatcggcggaggatgcccgctgttcttcgtcaacattatggtgacgctctactttattaaaaacgcgaacacagactggaaagcttcattaacccacaaaatatcaaaaccccgcacaggtgaagcccagcgcgtcagtacggtgcggctcaataccgttcgggaactgcttctcggtgcgcttacggattttgtccgccagctgcgcctgcatcatattgccggtacgtttttccagcagttctggcagcgaaataccgtcaaccatatccagtgggtcgataacgttacccttggatttggacatcttctggccttcgtcatcacgaatcaggccggtcatgtaaacggtgtggaacggcacctgcggtttgccattttcatctttgatgaagtgcatggtcatcatgatcatgcgggcaatccagaagaaaatgatgtcgaaaccagataccatcacgctggttgggtggaactgacgcagggcgtcggtattttccggccagccaagggtagagaaggtccacagcgcagaagagaaccaggtatcgagaacgtcttcgtcctgacgcaggacaacatcagcaccgaggttattttctttacgcacttcgtcttcgttgcggccaacataaacgttacccgcttcgtcataccatgccgggatacggtgaccccaccacaactgacgagagatacaccagtcctgaatatcgcgcatccaggagaagtacatgttttcgtactgcttcggtacgaactgaatgtcgccgttctcaaccgcttcaaccgccggtttcgccaggacatcggcacgcacgtaccactggtcggtcagcattggttcgataactacgccgccacggtcgccgtaaggaacggtcaggtcgtgcggtttaatttcttccagcaggccaagcgcgtcaactgcggcaacgactgctttacgtgcagcaaaacgctccagtttctggaactctgcagggatttcgctggaataaacgtcagattcgttacctttggtatcgaacacctgggcgctttcacggatatcgccgtcaaaggtcaggatgttgatcatcggcagggcgtgacgtttacccacttcatagtcgttaaagtcgtgcgccggagtgattttcacgcagccggtgcctttttccatgtcggcgtgttcgtcgccaacgatcggaatacgacggttaaccagcggcagaatgacatatttgccaatcagatctttgtaacgcggatcttccgg

SEQ ID NO: 139174 - DNA, 1344 bp, Homo sapiens; identical to SEQ ID NO: 132310

SEQ ID NO: 139175 - DNA, 1360 bp, Homo sapiens
ttcaaaaacagaggctttttcctctgctgtaaatgttcgtctcattcaaaaaacctccgcaaccccatgttttcacataactgttgcgttgaccaattgaatctacaattacagtatgatggccacggctggctgacagacatcagccacctgagcgaaggccaccgtgttgccgtccactatggctatgacgataaaggccgcctgaccggcgaatgccagacggtggagaacccggagacgggggaactgctgtggcagcatgagacgaaacacgcatacaacgagcaggggctggcaaaccgcgtcacgccggacagcctgccgccggtggagtggctgacgtatggcagcggttacctggcgggaatgaagctgggcgggacgccgctggtcgagtatacgcgggacaggctgcaccgtgagacggagtatcgcgacattatcaaactgctggggcgtcagagcgtcggcccggatgcctccggctgggtgttccgcctgacgccgtatgtgatggtgggcgtcatgctgactatcgctactgcgctgccggtggtgaccgtcggttctccgctgccgcaactgggtgatttgatcaccttactgtatctctttgccatcgcgcgtttcttctttgccatttctggtctggataccggtagcccgtttaccgctatcggcgcgagccgtgaagcgatgcttggcgtgctggtcgaaccgatgctgctgcttggtctgtgggttgccgcacaggttgccggttccaccaacatcagcaacatcaccgacaccgtttatcactggccgctgagccagagcatcccgctggtactggcgctttgtgcctgtgcgttcgccacctttatcgaaatgggcaaactgccgttcgacctggcggaagccgagcaggagctgcaggaaggcccgctctctgaatacagcggcagcggctttggcgtcatgaaatggggtatcagcctgaaacagctggtggtgttgcagatgttcgtcggggtgtttattccgtggggacaaatggaaaccttcaccgccggtggactgctgctggcgctggtgattgccatcgtaaaactggtggtcggcgtcctggttatcgcgctgttcgaaaacagcatggcccgtctgcgtcttgatattactccgcgggacatgatacgaatcgagctcgacagctgggaacaaaatggtgaggcaatcaaacgcaccgggcaaccgctattgctaagtttgttggtgcgaaatttgctggataacgccgtgcgctacagtccacagggcagcgtggtagacgtcacgctgaatgctgataatttcatcgtgagggataacggccccg

SEQ ID NO: 139176 - DNA, 1828 bp, Homo sapiens
  misc_feature (1)...(1828): n = a,t,c or g
ttacatatctttcttaattttgtcccattcgcctttaactttatctttaaagttggcttgtttatcctgagtacaagcctgaacgatagctggggttacggttgcaataccctgaacatctaaaaccgcatcttctggtttatctttgttgttcagcgcttcagcaaaaccaactgcagttggcggtggactgctgctggcgctagtgattgccatcgtaaaactggtggtcggcgtcctggttatcgcgctgttcgaaaacagcatggcccgtctgcgtcttgatattactccgcgcattacctgggctgggtttggctttgcatttttagcgttcgtctccttgctggcggcgtgattaaagagagtttgagcatgtcngtcttgctcgagaatctctccgagccgcccaaccaacacgatattatcgaaatcctcactgttcagcgtaaagaagaggaaacagcattgagctgtcggcttgttttgcgaaagctgacagaaacagaaccggtgattattttcgaaggtatcgaagcgccggcaacgctgcctgcagatgaagtgccggtaggtaaagacgaaaatgacaacgttgaagtcagccgctggggtaccccgcgtgagtttgactttgaagttcgtgaccacgtgacgctgggtgaaatgcactctggcctcgactttgcagctgcagttaagctgactggttcccgctttgtggtaatgaaagggcagattgctcgcatgcaccgcgcactgtcgcagtttatgctggatctgcataccgaacagcatggctacagtgagaactatgttccgtacctggttaaccaggacacgctgtacggtacgggtcaactgccgaaatttgctggcgatctgttccatactcgtccgcgccacgaatgcttcagacatattggcagtctgggccttgccacgccgctggtgaccgagtgtatgcaatggttgtttggcattccgcataccctgcaactggacgctatcatcattacctgctggattatcctcaacgccatttgcgtcgcttgcggtctgcaaaaaggggtacgtatcgccagtgacgtgcgtagttacctgagcttcctgatgctgggttgggtgttccattgtcagcggtgccagcttcatcatgaactacttcaccgattcggtggggatgttgctgatgtatctgccgcgcatgttgttctataccgatcccatcgctaaaggcggcttcccgcagggctggaccgtgttctactgggcatggtgggtgatttatgctatccagatgagtatcttcctcgcccgcatctcccgtggtcgtactgtgcgtgaactgtgcttcggcatggtgcaagaatttggctgcaaatcctccaccaaaatcgataatgccgactttaatcaggcttaagccgatcatcagtaccacaataccgctgacggtaggcgtaataacccgacgtaaatagggcaacataaatgaagatccgaccaccagaaatgcgcccacgaaggagacgccgagaagcgacgacatgattaactcttcgtgaaaaccgtcgcttttcatgctgtgaaaatgaaagcccttgccgatgcgggattcccccaggccgtgatcccgccgcacgaacgtccgtttattccggtgctgcgtcagttgggattcactggtagcgatgaacacgtactggaaaaagttgcacgccaggcaccgcactggctttccaacgtcagttccgcttcgccaatgtgggttaccaatgcgggaacgatcgcgccatctgccgatacgctggatggcaaaatgcat

SEQ ID NO: 139177 - DNA, 978 bp, Homo sapiens
tcattcagctttcttttccgttgtcttgcggacctcacggtaccagcgcgggtgatgtttcttcgcccaggcgctggtaacccatccttccaccatggcggtaatcgtgcctttcacccaaagggcggcgtagatatgcaccatgataaccacaattaacgccactgcggcaaatgaatgcagcattaacgcgaatcggatcaccgggattgagaaagcaggcgcaaaataaggacgccagataatcacgccgctcaccagcagcagaaccaggaaaataatcgccgcccagaaaacgcatttctgaccgaagttataacgcccggtgtcacctacttcctcgttgacgacgatcttacgaatattcttcgcccaaaagatatcatcccgattgattaggttgtgatgccagtaacggaaaaacatgatgatgaacgaggcaaacataaccacgccgacaaacgggtgcagaattcgcgccagctgcggtgtgcccatgatttgcatcaaccagttgaaggacgggaacaaaaagcccagcccgctcaccgccgccaggatgaagcagaaggcggtgatccagtggttgatacgttccggcgcggtgtagcgcacgatggtgtcacgtcgtttcatttgcgctcctcgtctttcgacacccacgtagtggaagatactggccgcaaaggtagccgcaaagccaacagccgcgagcggtttccagatgcctttccagaatttcacggtttcgctgatttccgggttctccggcaagccatgatacagatttggcttgtcagcatggtgcagcacgtacatgacgtgtgtaccaccgacgcctgccggatcgtacagacccgcattgtcgtaaccgcgggttttcagctcagcaacgcgctcgctcgccagcgttttcatcgactctttcgtaccgaagtgaatcgcgcccgttgggcaggtcttcacgcaggctcccat

SEQ ID NO: 139178 - DNA, 894 bp, Homo sapiens
atgagcgtggaaaactgctcgccatctcgcttatgcggtgacgtttacccaccaagcggcggcggagatcgtcttcgtctcgggcacctgatgggcccgagcccagcgggttattgtgggtcgggccccttccacgggctggcggcccccgttttgctgcggtgcgccccatatggacgcccaatctgccgcaggactttccagatcctcgacagtgaagacccagctaccgccttgcttaagcgtctgatcaaagccatgaacctcgacgagaagcagtggccgccgcggcaggcaatgtggtacatcaacagccagaaagatgaaggcctgcgtccgcatcatattcaaagctacggtaatccggtggagcagacctggcagaaggtgtatcaggcgtatcaggaagcgtgtgaccgcgcgggcctggtggacttcgccgagctgctgctgcgcgctcacgagttgtggcttaacaagccgcatatcctgcaacactaccgcgaacgttttaccaatatcctggtggacgaattccaggataccaacaacattcagtacgcgtggatccgcctgctggcgggcgacaccggcaaagtgatgatcgtcggtgatgacgaccagtcaatctacggctggtaccgagatctacgctcaataagcgcagcaattgcccggcatgtccgactggcaaaactcgcaagagcaacatcaaatgaaaaattaagtcaggcttttcatgcgcacctcgaggaaactcatggacagattgaacgtattgatcaagttgtggagtccgaatcgaacctgaaaattaagcgcatgaaatgtgtggcaatggaaggtcttattgaagaagctaatgaggtcatcgaaagtaccgagaaaaacgaa

SEQ ID NO: 139179 - DNA, 3264 bp, Homo sapiens
atgtcgaaaagcaatccgtctgaagtgaaattggccgtaccgacatccggtggcttctccgggctgaaatcactgaatttgcaggtcttcgtgatgattgcagctatcatcgcaatcatgctgttctttacctggaccaccgatggtgcctacttaagcgcccgtaacgtctccaacctgttacgccagaccgcgattaccggcatcctcgcggtaggaatggtgttcgtcataatttctgctgaaatcgacctttccgtcggctcaatgatggggctgttaggtggcgtcgcggcgatttgtgacgtctggttaggctggcctttgccacttaccatcattgtgacgctggttctgggactgcttctcggtgcctggaacggatggtgggtcgcgtaccgtaaagtcccttcatttattgtcaccctcgcgggcatgttggcatttcgcggcatactcattggcatcaccaacggcacgactgtatcccccaccagcgccgcgatgtcacaaattgggcaaagctatctccccgccaatcattctcggcgagcaagtgcgcgatacttccgcccggataccgactatctgctgactatctccaacgatgcgtggtttggtaaatctattggtccatggcaacacttccagatggcgcgaatgcgtgcgctggagctggcgcgcccactgttgcgcagcaccaacaacggcattacggcggtgattggcccgcagggtgagattcaggcgatgatcccgcagttcacccgcgaggtgttaaccactaacgtgacgccgaccaccggactcacaccatacgcacgtaccggcaactggccgctgtgggtgctgacggcattgtttggttttgctgctgtgttgatgagtctgcgtcagcgacccaaactaaatgtacctaaggaaggtgcgaacaagtacctgatagagagtcatggggcgcgagtgaaggggctggcgtcacattttgtctacggttacggcaaaggcggcaaagagagcgtcagccatcagaactatccgcaggtcatcaaacatacgccgcggatgaccgcgatggcgaatattgctctgtttcgtctgtttaatcgcgatctgtttggcaatttcaatgagttatatcgcaccattactcgcacagcgggtccggtggtcctgcattttcatgtgctgcacagctactggctaaatcttaagagcgtggtgcgcttttgcgaaaaagtgaaaaaccataaaccggacgtcactctggtactggacgctgcacgaccactggagtgttaccggacgctgcgcctttaccgacgttacgaaggtggaggaccaccacgaaccacaaacccaaacgcggggtctggtgatgactaccagctgagcaacgacatgaaagttgacggtcagtcttacgacagcatgcgttatgaactgggtgtagatgcaggttataccttcacctacagcgaagatcaggctctgactccgtacttcaaactggcttacgtctacgacgactctaacaacgataacgatgtgaacggcgattccatcgataacggtactgaagggtctgcggtacgtgttggtctgggtactcagtttagcttcaccaagaacttcagcgcctataccgatgctaactacctcggtggtggtgacgtagatcaagactggtccgcgaacgatttgacgggcattactgcaaaggacgcgcaaatgttatctgtagttaaacctcttcaggaatttgaactgttcgttctggcggcacttgagtctcgcggcacgctggccgacatcctgaaagcagcaggggcgaccaccgccaacattactcaagcgattgaacaaatgcgtggaggtgaaagcgtgaacgatcaaggtgctgaagaccaacgtcaggctttgaaaaaatataccatcgaccttaccgaacgagccgaacagggcaaactcgatccggtgattggtcgtgatgaagaaattcgccgtaccattcaggtgctgcaacgtcgtactaaaaataacccggtactgattggtgaacccggcgtcggtaaaactgccatcgttgaaggtctggcgcagcgtattatcaacggcgaagtgccggaagggttgaaaggccgccgggtactggcgctggatatgggcgcgctggtggctggggcgaaatatcgcggtgagtttgaagaacgtttaaaaggcgtgcttaacgatcttgccaaacaggaaggcaacgtcatcctatttatcgacgaattacataccatggtcggcgcgggtaaagccgatggcgcaatagacgccggaaacatgctgaaaccggcgctggcgcgtggtgaatggcactgcgtaggtgccacgacgcttgacgatatcgccagtacagtaaaaagatgctggaccagccaccaacaccaaactaagaacagaacccgcagaacaacaacccgcaacatccgctttcctaaccaaatgattgaacaaattaacatcgctcttgagcaaaaagggtccgggaatttctcagcctgggtcattgaagcctgccgtcggaggctaaccaccggtggtccacacgtcatgtacgtgctgcaccatgctgacaagccaaatctgtatcatggattgccggagaacccggaaatcagcgaaaccgtgaaattctggaaaggcatctggaaaccgctcgcggctgttggctttgcggctacctttgcggccagtatcttccactacgaacgcgtcatttttctgactggccaggttgaagaccacatggctaacctgattgtggcgcagatgctgttcctggaagcggaaaacccagaaaaagatatctatctgtacattaactccccaggcggggtgatcactgccgggatgtctatctatgacaccatgcagtttatcaagcctgatgtcagcaccatctgtatgggccaggcggcctcgatgggcgctttcttgctgaccgcaggggcaaaaggtaaacgtttttgcctgccgaattcgcgcgtgatgattcaccaaccgttgggcggctaccagggccaggcgaccgatatcgaaattcatgcccgtgaaattctgaaagttaaagggcgcatgaatgaacttatggcgcttcatacgggtcaatcattagaacagattgaacgtgataccgagcgcgatcgcttcctttccgcccctgaagcggtggaatacggtctggtcgattcgattctgacccatcgtaattga

SEQ ID NO: 139180 - DNA, 3256 bp, Homo sapiens
ctctcggtacccggagatcttacgaattttcttcgcccagaagatatcatcccgattgattaggttgtgatgccagtaacggaaaaacatgatgatgaacgaggcaaacataaccacgccgacaaacgggtgcagaattcgcgccagctgcggtgtgcccatgatttgcatcaaccagttgaaggacgggaacaaaaagcccagcccgctcaccgccgccaggatgaagcagaaggcgattattctcttcctcatccgcacggttcggaccgacacccacgtagtggaagatactggccgcaaaggtagccgcaaagccaacagccgcgagcggtttccagatgcctttccagaatttcacggtttcgctgatttccgggttctccggcaagccatgatacagatttggcttgtcagcatggtgcagcacgtacataacgtgtgtaccaccgacgcctgccggatcgtacagacccgcattgtcgtaaccgcgggttttcagctcagcaacgcgctcgctcgtagcgatgcgacggtgggtttaccgcgtgaggcggatacaataccgccgaacgactcaaacagccgtgttccacagcacccatggaaattaccgcgaaggacagcctgtcgggactctaatcgatgatcgctataaagctaacgagaatgtggaactggtgcattacgcacagccgctgctcaacgaagcagattcactggcaaaagtgatgccttccgacatcccgctgaaacaacgtcgctggctgggcctgcaaatgctggaaggcgatatctacagccgcgcctacgccggtgaagcgtcgcagcatctggatgccgccctcgcccgtctgcgtaatgagatggacgatccggcgctgcacattgccgatgcgcgttaccagtgcattgctgccatctgtgatgtggtaagcaacaccctgacggcagaacccagccgtttcaccactgcggtagataaaatcgtgctcaaccgtttcctcggtctgccgattttcctctttgtgatgtacctgatgttcctgctggctatcaacatcggcggggcgttacagccgctgtttgacgtcggctccgtggcgctatttgtgcatggtattcaatggattggctacacgctccacttcccggactggctgactatcttcctcgcccagggcctgggtggcggcattaacaccgtgctgccactggtgccgcagattggcatgatgtacctgtttctcttctttcttgaagactccggcgctggcttgccgggaaatctttgtgccgctgatgcggcttcgtgtgaacctccgttggtatccccctgtgctctaaagaatatcctggtggacgaattccaggataccaacaacattcagtacgcgtggatccgcctgctggcgggcgacaccggcaaagtgatgatcgtcggtgatgacgaccagtcaatctacggctggcgcggggcgcaggtggagaatattcagcgtttccttaatgatttccccggtgccgaaactattcgtctggagcaaaactaccgctctaccagcaatattctgagcgccgctaacgccctgattgaaaacaataacgggcgtctgggtaaaaaactgtggaccgatggcgcggacgtcgcgggtgctcccagaggcgttattgaggccagtatgccgcaccgtatttacggcgggatgcgcttcttggatcgccatgaaatcaaagatgcgctctcgtatctgcgcctgattgccaaccgcaacgacgacgcggctcttgacgcgtggggaatacgcgcacgcgggggtggtggtcgcttcagtagcgccagccaggaaggactcgtcaccctcgtaaatgacccagtatgtcaacccaaccaacaaaccaccaccgataatgttgccgatcgtaaccggaatcaggttatcagtgatgaaattcatcacggtccaggtgagaaaaattttcggtgcagaccgactgcgtgcaaaatttcgggattcgaaatcgcggatacaatcccatcggaacaaacaagttgcgatctgtgctcaaaccgtggaaaaacatgggacgggagacatatgacgcttgtcattagctgggcagattactatgaccgtgttactaggtgtataagctggctcatttcgacccacgcgccgcagtacatgccgacctttgaactgaataaagccattgtgcaaaaagcggagcactaccatttcgatttcgccctgtcgatgatcaaactgcgtggctttggcggcaaaactgagttctgggatcacaaccttgagtcgttcaccttgatggcggggctggcggccgtgacctcgcgcattcagatttacgccactgctgccaccttaacgttacctccggcaatcgtcgcccgtatggccgcaaccatcgactccatctctggcgggcgttttggcgtcaacctcgtgactggctggcaaaagcccgagtatgagcagatgggtatctggcctggcgatgactatttctcccgtcgttacgactatctcaccgaatatgttcaggtgctgcgcgacctgtggggcacggggaaaagcgattttaaaggcgattttttcaccatgaatgattgtcgcgtgagtccgcaaccgagtgtccccatgaaagtgatctgcgccgggcaaagcgacgctggcatggcgttctccgcccggtatgccgatttcaacttctgtttcggcaaaggcgtaaatacacccacggctttcgccccgaccgctgcgcggatgaaacaggccgcagagcaaaccggacgcgacgttggctcttatgtgttgtttatggtgattgccgatgaaaccgacgatgccgctcgcgccaaatgggaacactacaaagcgggcgcggatgaagaggcgttaagctggctaaccgaacaaagtcagaaagatacccgctccggtactgacaccaacgttcgtcagatggccgatcccacttcggcggtaaacatcaatatggggacgttagtcggttcttacgccagtgtcgcgcgcatgttagatgaagtcgcaagcgtgccctggtgccgaaggcgtgctgttaaccttcgacgattttctgtcgggaatcgaaaccttcggcgagcgcattcaaccactgatgcaatgccgcgcccatctacctgcgctgactcaggagcaactcatccagaatagctttggcgaccgaggcgctcggtaccgttttcgacaac

SEQ ID NO: 139181 - DNA, 942 bp, Homo sapiens
tcagtgggttaaaggtatctccttcatatggattaagtctgcatccctccagctttgccagattatcatcctgcatatcaagaaagctttcactgtcagcgaactggcattgatggcagataaatccgccgccagcggcaatacggctgaaggtcggacttccgccatggcagaaaacaggatcgtgttatcgatcagatcgattttggcatcaaagacaccgtcgaaattctgcatatggggcagatgcagagcctgacagttatcacattcatataaactcatccccaggtcatcgagccattgacgcagcgtatccagaccaggaacgaccagcgatgtcataattttgtacaacctctttcgataaaaagaccggcacagctccatcaccaacggcccgcgattagcacgcagaatatccacaccagcaacgtccagcgccatcgttcgcgcggcttttatcgcgatttcacgttcctgtggtgtgatactggcgacgcttgccgcgccgccacgatgcaaattggaacgaaaatcgccctctttcgcccgccgttcaatcgcagcgaccacgttatcgccaacaaccagaggaatcctgaggtgtagcctgatgtggactggctgatcgccgagcgccccggcaaggtaagaaccttgaaacagcatccacgcaagaacaaaacggccatcaacatcgaatacatgaaagccagcatccgggccagggtggagcacccatttcgcatcatcaagcgacagttcggcttcgtgaaagccagatacaaggggttgggccaggtcgagattgttactacctgaaaatgcatcgctggcgatcagatttaatgaaccattcgggccaaatccaaatccgttgttggaaatattagcggtattcaactgaacacgaatatgagcgtcctgatcgcattgcat

SEQ ID NO: 139182 - DNA, 2666 bp, Homo sapiens
  misc_feature (1)...(2666): n = a,t,c or g
ttatagccggatgcgatgctggcgcatcttatccggcctacggggagccaggccgaataaaatcgtatgccggataaggcgtttacgccgcatccggcctattttaaggctgcgttttccccggcattcgcgggtcgtctttaaaatacgtactaataaaatatttgtaatggcaacagtgaaacccaagcacttcatagagggccggagtgagtcgtccaggtacatgagggtcttcttgtgtctgccttctccccaggcgaagcgcatccagcggcgttcatcaacaccacggccagcaaccgatttagccaatcctggccacagaccatgtacggtcagaaaatcagctttgttggtcgtttcggtttgcaggcgacattcatctcgttcgttacgatttcgatcgtgttgactctggcaaaatccggtttgccaggagagggccaggacatagcgatcaaaatcgccatactgttttgcctgcaacgcattagcagagatataggcataagtgaggatatagagaacgaaggcaacggtaataccgctgataatgttccaggtgttaccgattaaatctttggtgatggtgttaaaactggagccgacgggataatttaaatttgcttgccagaagaaagagagctgcttttcgatcagcttttcgaagatgtcatatttttgctgatcgtagcgagccacgttgaccggctgaccaaagaacatcggttctttgagctgatcatttttcgtctgtgaaaaggtggtatatgccatgagtgtgtcctgttgggagtttaatgccggataaggcattttacgccgcatcctcgtgcctgatgcgacgctggcgcgtcttatcaggcctacaaatccgagccgtaggccggataaggcgttcacgctgcatccggcacccggagcctgatgcgacgctggcgcgtctttatcaggcctacaaaccgagccgtagccggataaggcgtttacgccgcatccggcatctcaatatcagatcttacatgcgccgctttcgcagccatccaactgctgcatcggcactttctgacgggaagcgtgacggatggcagcagctgatgccgcgtgtcgctctagaggatccattcggcaggtggaaatcgaagctgatggagcgcccgattgtggtcgcgaatggcaaagcgcggataggtcgtccaccggagcagggcagaaggtttacagttggagcccgagaagcgtgtcgatctagaggatccccgacgaaggtgtttacctggcaccgtcagcgtttgaagcgggctttatgtccgtggcgcacagcatggaagatatcaataacaccatcgatgctgcacgtcgggtgtttgcgaagttgtgatccagcatggtttgtcggatgcggcgtgaacgccttatccgacctacgattcggggccgtttgtaggcccgataagacgcgccagcgtcgcatcgggcatccgttgtcgcgtaaacgctttatccgtccaggcataaaatatggcgcgccgataaaggttgacagcagccccgccgggatctggaatggaaacagcaccatccgcccacaccagtcagcgaacaccagcagtaaaccacccaccagcgccgaaattacgatgtgtggcatcgtccgtcgaaagcccatcatccgcgcaatatgcggtgccattaaaccaacaaaactcaacggtccaatagtcatcgtcgcggtcgccgtcaggcaagccgctaacagcagcagcgcaattcgcgtcggcgtcagcgccattcctacggctcgggcggtatcaccacccagcggtaaaatggtcagccagccggcggcaacaagcgggggtaaatcgcccaaggcaaaaattccacccaatccaacaaattcccggtgcgccagacctgcgcatcggtcgcgtngtcgaaccggaaatccaggtcagcacttgcgccattcgcgggtcaccacttgcctgcaacatcatcaaaagcatgtgaacgcgtgcttaagcaaaatcaacagacaacagacgacccgcgaatgccggggaaaacgcagccttaaaataggccggatgcggcgtaaacgccttatccggcatacgattttattcggcctggctccccgtaggccggataagaacacatctattgttgttgttggtggtggtggtggttatgtaggcttgctgggcgaggatatcggcggcggtgatccagcgcagcgggatgcccggtgtgcgcgtatgcgggcggataaaaagctgctcgaaggcggtacgctgtcagcggcatgtctttgcaacatgtgtctggaacggacgtcaagtcacgtccggcgcaggaacgtggtcaacaatcgcctggtacagcggggtcatgtcttccgccatatcttcgtggtccagacccgcgataccgttcagcgcagaagcgtaaacgatcgggaagtccagctgctcgtcggtcgcgtcgaggttaacgaacagatcgaatacctgatccacaacccaatcaggacgcgcgccagggcggtcaactttgttgataacaacaatcggcttcaggccgtaagcaaacgcttttttggttacgaagcgcgtttgcggcatcgggccgtcaaatgcgtcaaccaccagcagcactga

SEQ ID NO: 139183 - DNA, 1071 bp, Homo sapiens
ttacttcttcgcctctgcaaccactttactacccacgccgcggttattgtattcccacatgcggttgtagttagtgtcattcagattgcgctgtatttcgtcgttatcatctacgctgccggtattacccgcaaacggacgattagagatcaccgcatcggcccacggtttagccgtgttaaaccttcgtgatgcgcaaccgatgccggtccggggcaccgattgccggatgcggcgtgaacgccttatccggcctacagtcagcaacggttgttgttgcttagaactgcgattttcctgctggtgagatacgaaggtatagccatctttcgcggcggcaaattccggctgctgcactttctcaacgtagtgcttcataccctcgcgctgggcataggcgtttgccaggtcaaacatgttgaaccacatgctgtggatacctgccagggtgatgaactggaacttgtagcccatatccgacagctgctgctggaagctggcaatagttttgtcgtcgaggtttttctgccagttgaacgacggcgagcagttataagccagcagtttgcccggatatttcgcgtggatagcttgtgcaaagcgacgcgccagttccagatccggcgtggaggtttcacaccagaccaggtcagcatatggcgcatacgccaggccacggctgatcgcttgctcaatgcccgcatgagtacggaagaagccttcactggtacgctcgccggtaataaattcgctgtcatacgggtcgcaatcggaggtgatcagatccgccgcatcagcatcggtacgggcaaccagcagggttggaacgcccgtcacgtcagcggcgcccccgggctgcacggtgtcgtatacaacgtcaattgcgcggtgtgcggcaaaaggtgcagggccagcgggtaggcgaagtgccggcgttgtcagcttaccaaattgggtgtatacgggtatagcggcaagtgtgcaggggccgcagcaccagggtgcgtctaggcggcgggctgtacctcggtgggcccgcacagccgtaccccgggtcgcagtgtacaacat

SEQ ID NO: 139184 - DNA, 2649 bp, Homo sapiens
tttccgacggcaaaaaactgcccagaggcgttgcgattgaagatagtgaaggcaactatctgacaacatcagtggatgacggtgttgtattcctcaataacatcaaaccggacatggtgctagatataaaagatgagcagcaatcatgccgtattcaccttacattcccagaagatgcaccaaaagatgtgttctatgagacagcaacaggagagtgccaatgaaacggataataacaggatgcctgctgctgaacttcgccatggccgctcaggcagagtgtaatatctccagtagcatacaaaatatcgactatggcaaacgaagtgctgccatgcgccaagttgaccggggtatgccagcccatttagcaggcagaccactcgcgttggtaattcaatgcgatcaggacgctcatattcgtgttcagttgaataccgctaatatttccaacaacggatttggatttggcccgaatggttcattaaatctgatcgccagcgatgcattttcagtcgttcacgtgcagaataacctcgacgacaatactattgccagcttccagcaacacctgtcggatatgggctacaagttccagttcatcaccctggcaggtatccacagcatgtggttcaacatgtttgacctggcaaacgcctatgcccagggcgagggtatgaagcactacgttgagaaagtgcagcagccggaatttgccgccgcgaaagatggctataccttcgtatctcaccagcaggaagtgggtacaggcgtttacgccgcatccggcaattctctgctcctgatgagggcgctaaatgccgcgtggcctggaattattgattgctcaaaccattttgcaaggcttcgatgctcagtatggtcgattcctcgaagtgacctccggtgcgcagcagcgtttcgaacaggccgactggcatgctgtccagcaggcgatgaaaaaccgtatccatctttacgatcatcacgttggtctggtcgtggagcaactgcgctgcattactacacggccaaacggtgtaggcctgataagacgcgccagcgtcgcatcaggcaaccggctcgggcgttggatgtcggatgcggcgtgaccgccttgtctgacctaccggggtgccgcacttcacagcggtgtaggcctgataagacgcgccagcgtcgcatcaggcaaccggctcgggcgttggatgtcggatgcggcgtgaccgccttgtctgacctacggggtgccgcacttcacggcagtttagcgaactaccgcgttgtcaattttctcttccgccttccagacgcgatgattctctctgtccttcttcgttcgtgtccttttgtattccctcttctccgccgtttgcgtgctggtgcccccgtgggtccgtattgcactgggactcccatcactcctttgccatccacacggttgtttgccccattgccaaaccggtgttcgatggccggaatgtacggcggcctacaaccggtgccgcatccggcaattggtgcacgatgcctgatgcgatgcttgacgcatcttatcaggcctacaatgggtaccggatcgatggctgaagaggctctggggacgagtttcaagaggttatgtgcgcattatagccggatgcgatgctggcgcatcttatccggcctacggggagccaggccgaataaaatcgtatgccggataaggcgtttacgccgcatccggcctattttaaggctgcgttttccccggcattcgcgggtcgtctttatattcggcggtggcaaacccaccccgcggaaaaaaaggtcaaacgggcgaagaaagaagaaaaatgcccttagccccagcacggaaccaaatgctgcgccagagggggatttgctgcatgccttgtcttcgaatacgtagtggtcttctggacctcgctacccgactctttttgccgaaagagttttccaacccgtattcgcggatcaatggtcccctcgctgtgggatttcccacccggggtcgatggccgtaaagggaagaccagttggaacggggtcccggggccgtgtgtcacttgtggtctgggcttaacgtgccctgaatctccgtgttgtcccgggctttccctgggggatgggtaccctgaaaaggtgtctgtgggaccaccaatcccgctaaaatttcaggccattctgcaggcatttcacgagatcttcggcgaaggatcctgccatattgcatccgttgccgtcgagagcggtgtaccggaacagccctttggcagtgaggaaacgcgcgctggcgcacgaaatcgggtagccaatgcccgccgtttacttccagaggctgatttttgggtggcgattgaagctggcatcgatggtgacagcactttcagttgggtggtgattgaaaacgccagccagcgcggcgaggcgcgttcggctactttgccgttgcctgcggtgattctggaaaaagtgcgtgaaggtgaggcgcttggtcccgtgatgtcgcgttataccggtattgatgagattggtcgtaaggaaggggcgatcggcgtgtttaccgccgggaaactcactcgcgccagcgtctatcaccaggcggtgatcctggcgctgagtccgtttcataatgccgtgtattaa

SEQ ID NO: 139185 - DNA, 1828 bp, Homo sapiens; identical to SEQ ID NO: 127947
  misc_feature (1)...(1828): n = a,t,c or g

SEQ ID NO: 139186 - DNA, 2564 bp, Homo sapiens
cgccccacgtgccaattctcggcgcccgggcctccggcctgccccgtcccgccattccgatttcacggggttcgccgccgcgtttccccttttcgtcgggccgtttccgcgagcgcgcgaaacccggcgccccccccagtgaagggggcccgtttcccttccgggcgcggttttccgaatgcccacttgcgtcccatccgggggcgcatttccgaagaaatgggcgtttgggggaacccgttgaaatcccgcggttcccaaaccgtggtgccaggcgtttaccaccgccgcgtttgttatccagcgcattaataaagtgtcgctgatcgtctgttctgcattgaaaaacccctatcgcgacttgctgcgtgaaggtaatccgaatctctctttcatctatttgaaaggcgattttgatgtgattgaaagccgcctgaaagcgcgcaaaggccatttctttaaaacccaaatgttggtgacgcagtttgaaacgctgcaggagccgggtgcggacgaaaccgatgtactggtggtggatatcgatcaaccgctggaaggtgttgtggcaagcaccattgaggttattaaaaaaggcaaataagtagtgactacattaacgcttgttttaacagcagtagggtctgttttactgctgctgtttttagtcatgaaggcgcgtatgcacgctttcctggctttaatggtggtgtccatgggggctggccttttttctggtatgccgctcgataaaatcgcagcgacgatggaaaaagggatgggaggcaccctcggcttcctggcggtggttgtcgccctgggagctatgtttggggagatcttacatgaaaccggcgcagtcgatcagattgccgtcaaaatgctcaaatccttcggtcacagccgcgcgcattatgccatcggccttgcggggctggtctgtgcgctaccgctgttctttgaagtggcgatagttctgctgattagcgttgctttctcaatggcgcgccacaccggtacgaacctggtgaagctggtaatcccattatttgcaggcgtggcggcagcggcggcatttctggtgcctggaccagcgccgatgctgctggcatcgcagatgaatgccgactttggctggatgatcctgattggcctgtgtgcggcaattccgggaatgattattgccgggccgctgtggggtaacttcatcagccgttacgttgagctgcatattcctgacgacatcagcgaaccgcatctcggcgaaggcaaaatgccatctttcggattcagcctgtcgctgatcctgctgccgctggtgctggtagggctgaaaaccattgccgcgcgttttgtgccggaaggatcaactgcttacgaatggtttgagtttatcggtcatccgtttaccgcgattctggttgcttgtctggtggcgatttacggtctggctatgcgtcagggcatgccaaaagacaaagtgatggagatttgcggtcacgcgctgcataccggcggggatcattctgctggtgattggtgcgggcggcgtgttcaaacaggtgctggttgactctggcgtaggtccggcactgggcgaagcgttaaccggcatgggcctgccgattgctatcacctgcttcgtgctggcagctgcagtgcgcatcattcagggttctgccaccgtagcctgtttaacggcggtaggactggtgatgccggttattgaacaactgaactactccaaaagaagaggcttcactgggagggttgaagagaactttggggtttgcaaagggcctagcaaatatcattctcagcatgatgccattaatagacaaggcagagaggccagcgatgctcacggcacgctggaaaatctgccgttgccgcttgtcccgcaaccgaatgccgcaacagcgctggcggcactgcgtgccagcgggctggaagtcagtgaaaatgccattcgcgacgggattgccagcgcaattttgccgggacgtttccagattgtgagcgagtcgccacgcgttatttttgatgtcgcgcataatccacatgcggcggaatatctcaccgggcgtatgaaagcgctaccgaaaaacgggcgcgtgctggcggttatcggtatgctacatgataaagatattgccggaactctggcctggttgaaaagcgtggttgatgactggtattgtgcgccactggaagggccgcgcggtgccacggcagaacaactgcttgagcatttgggtaacggcaaatcatttgatagcgttgcgcaggcatgggatgccgcaatggcggacgctaaagcggaagacaccgtgctggtgtgtggttctttccacacggtcgcacatgtcatggaagtgattgacgcgaggagaagcggtggcaaactctgccagatgcacgtcaatgtgcaggataaaatcgatgaggaaataaatcaggtccatatttgcctatgccttgtactcgtcatcgtttcaggctgtaaatacgttggctacagcctgaaatgttccgagcattattactcgttagtccgccagaaatag

SEQ ID NO: 139187 - DNA, 1428 bp, Homo sapiens
atgctcggtaaaacgtataccaaagcagaatgcaaagcactcttgaataaagaccttgccactgtcgccagacaaattaacccgtatatcaaagtcgatataccggaaacaagcgcgcggcgctctttactcattcgtttacacgtgggtgctggcaattttagaacatcgacgcttcttcgcaaaataaaccagggcgacgttatcgcggtatgcctgcccctctgcgctgactcgcagtatcaaccagagagcattaatcgcgtagaacagtcatgtctctctagtgatgtatcagaaaagaaccttaacaaccgattaccaaaaaaacttaataacaccgttaatagtacacagatttatcggcacagagccaaaatacaaaaaaccatatggagacaacaccccaaggaaacaacaaaacaaaatagccgaccaaaaagaacaaaattacccagggagcaacgcgacaaaaaagaaagaaaaagaaccaacaccaaatatggggaaacaataaacacagaaggagacaaacaaaagatgctcgccattggtcggctggtatccggctttccgcatggcgcattttttggcgtcggagcgatcgtgttatcaaaaattatcaaacccggaaaagtcaccgccgccgtggcggggatggtttccgggatgacagtcgccaatttgctgggcattccgctgggaacgtatttaagtcaggaatttagctggcgttacacctttttattgatcgctgtttttaatattgcggtgatggcatcggtctatttttgggtgccagatattcgcgacgaggcgaaaggaaatctgcgcgaacaatttcactttttgcgcagcccggccccgtggttaattttcgccgccacgatgtttggcaacgcaggtgtgtttgcctggttcagctacgtaaagccatacatgatgtttatttccggtttttcggaaacggcgatgacctttattatgatgttagttgggctagggatggtgctgggaaatatgctaagtggcaggatttcaggacgttattcaccactgcgcattgcagcagtgactgactttataattgtactggcactgctgatgctctttttctgcggcggcatgaaaacaacgtcgcttatttttgcttttatttgttgcgcgggattatttgccctttcagcaccgctacaaatattgttactacaaaacgccaaaggcggagagttattaggtgccgcaggtgggcaaatagcgtataacctcggtagcgccgtcggggcatattgcggaggtatgatgctgacgctggggctggcatataattacgtgacgctgactgccgccctgctatcgtttgctgcgaagtctactgctgctctggcggtgctcagcaatccacactggtgcggcaaggcaacgtaa

SEQ ID NO: 139188 - DNA, 3912 bp, Homo sapiens
ttaaaaacgctgctctttgagcaccattttgcagtaaatcgaataaagatgcttctcgcgaccactgacgcggcacggtattcccgcttcctgcaaacgcccttcgatttcagaaagaatcttctggatcatctctttacggttgccgcgcgcggctttcaccacttctttgattacgcgataacggttgggatacagcgcctcaaaacccagctcttcgagttcggttttaatgtggtggatacctaaacggtgcgccagcgggctataaatttcgagagtttcacgggcgatgcggcgacgtttgtccgggcgaagtgagcccagcgtgcgcatgttgtgggtacggtcggcaagtttgatgaggatgacgcggatatcctgcaccatcgccataatcatcttgcgaaagttttcggcctgcgcctctttcttatcgcggaacttgagtttatcaagtttcgacaccccctctaccagctcggcgacgcttttaccaaaaagctgttccatatcctgatcctggtagttggcgggagtatcttcaatcacgtcatgcagcagcgccgccatcagcgtttcatagtcgagtttcatctcggccagaatgcaggcaaccgctaccgggtgcgtgatatagggttcaccgcttgaacgtgtttgcccctcgtgagcatcacgtgcaacgagatacgcctgccgcagacgcttgatttggtcaatcgccagacccgcagcaaaggtcagcgcgtgttgctcggcaattgccacgtcgaagtagcgatccgggaatttacgtgaaaactcgaccatgccggaaccttcacgcatcgccggagtaatcgccatcagcttgttgtctttcgcggaaagcagctgtgccagatggttgttgagcgcgccgacattttcggaaatcgacatttcattgtcgttgagaatcaccagcatatcaggacggatatcgcccgcgtgattcatcgcttcaaacgccatgcctgcggtaatcgcgccatcgccaatgacacagacggtgcggcgatttttgccttctttttcggcagcaaccgcaataccaattccggcactgatggaggttgatgaatgcccgacgcttaatacgtcatattcgctttcgccgcgccacgggaacgggtgcagaccgcctttctgacggatggtgccgattttgtcgcggcgtccggtcaaaattttatgcggataagcctgatgccccacatcccaaatcaattggtcaaacggggtgttgtagacatagtgcagcgccacggtcagttcgaccgtgcccagcccggaggcgaagtgcccgctggaacggctcacgcccagttcggtgaggcccgcgctattcgtcagtattgcttgttttctgcgccaattgacatccctccgattcttccgggggcaaacgtttaacggccttctcgaccagccattcagcgacatttcctgcctggcattagcgtattggttgcggataacgtaagtattgattaagatgcggtagtacccaggttgttcaccaactgatgtcattatagtatttaagcacataatcacgaccatatcgaaatcagcgaagagtagatcaccgaatgtgcccccgcggatcgtcatattgctggtctgcgccagtgacatccctcgagtctccggggcaaacgctacggaaatcaacaagccaaacagcgagatacccgcccccattagcatcgtgttactgataccgtaattattgataaagatcggtagtgcccaggtcgaaacaatggtgccaatacgacttaaggacataatcacgcccacggcagaggcgcggatatctgtcgggaagagttcattaggatagagccactgcaaattacccggcccgccagagaaaaaggcatacaccgcaaaggccatcactaccagccagatccccatatccgggattagccccaaaaccgccagcgccagcgtcatcatggcaaagctgccaatcaacaatggacgccgtccggcagtgtttaaccacagcatcggcggaatacagccgagcataaagaacacggcacgatgcagcgccacaacgcctgccgtcagattgtagtagtcgacactttcgaatccggcatcctgcatcatggctttcagggtatcctgatcgggatgcatacggatggattctgccagataacggtagctgtcggcgtcgttcgcgaccagtgagccgatacgcggcagcacatggaaggagtatgcatcataggctttgctcagcggctcgataattggcttcgagaactcaagcaccagcaggcggccgccgggtttcagcacgcgatacattgaacgcagtgctttatctttgtcggtgacgttacgcagaccaaacgaaatggtgatgcaatcaaaggtgttatccgggaacggcagcgcctcagcgttcgcctgaacatactcaacgttgccaatcacaccgatattacgcagcttctcgcggcccattttgagcatggattcattgatatcagcaaggaccactttgccagtttctccgaccaggcgggagaatttcgctgtcaggtcgccggtgccaccagccagatccagcacggtctgcccacggcgtacgccgctgcaatcaatcgtgaatcgcttccacaaacgatgaatacgtgcctgacgggtatgacatcgcttctggcgcatcgctcggcgctgtttttcaagacggcatccgcccgatcctgccgcaactgattgaagcctatatgaaccgtcgcgagtcggggagtatcgcttttggtcgatatcctcggcgtcctggcgataaacagcctgatggcgtttggtcttggcgctatctggggcgtgttgatccttacttgcctgttgccagtaaaccagctgctgaccgcgcagtttggctggaagcaaagtctgatcgccgccgtggtggtactgatgacccgtgtggtagtcgtgcgctatttcccacatcttaacccctatccccagaggcaaatcataatgtagccagaaacgacgggcagcatcgcggaaatgatcgttccactcggcaaacagcggcgggaaatttcccacctgataaccaccaggagcgatatcccacggttcagcaattaacttcacctgcgagagcaccgggcagttctggatagcggtaaacaacggcgcatcctgacggaactctggcgtacggcccatgactgccgccagatcaaagcggaaaccatcgacgtggcaggtttctacccaataacgcaggcaggcgctggcataatccaccaccgccggatgactcaaattgagcgtgttgccgcaaccggtccagttgtgataatcgccgtcttctcttatccaataatagctacggttatcgatcccacgcagcgagaataacgggccgtcgaggtccagttccgcactatggttgagcacgatatcaagaatgacttcgatacccgctttatgcagtgctttgattgcatcgcgaaactcatccagcgccgtttctggcgagcaggcatacgccggatgcagcgcaaacatcgccaccgggttgtaaccccagtagttacttagccccatgcgttgcagacgtggttcactggcaaactgcgccacagccagcacgaccacatcgggtgcgtacatgtcgatttcatgaatcaactcccggtcataggcttcacgactgtcaaacgcgctggcgatgagcgtatgcgttgcaatacccgcctggcgggcgcgttcaaggccgaacgcgtcggccttattgctgaaaactgcccgtacggtgcctttaattttgttggttttacaggcgtcaataattgcctgtaaattacttccgttgccggaaataagcaccacaatattcat

SEQ ID NO: 139189 - DNA, 2076 bp, Homo sapiens
  misc_feature (1)...(2076): n = a,t,c or g
ttagctagcaaatgaattttgtcctttacctgtattacaagaaaataaccaaactgtcatcccatctttataattcccatcaaatttaattagatatgctagatctttagctgtcatgatactggccgttgcggattcaatagatgtgggggtaccatgccccccgattgtgaaaacgcctgggatattaatctcatcagctacagaatggataagatcactttcggggtataaatttatatcaaccaaaccttgcggatctacatttatgaccggattcaacggatactgataaaaattccatccccccttcagtccaatcggatcctgagtgatataccgccccagcagcgggtcataatagcggtggcggttgtaatacaggccggactcctcatcatactgctgacccggcaggcgaatgagctgctgcagatgatgcgggttctcatcactcagcaggttgccccattcatcatattctgcgcaccacgctgttgccccttccgtgctgatgagcgccagcggcaggccgcgatggtcgcagtggtacaggtggatttttcgcgccggcgtgtacaccgggtccatctggtttttcatctgctccacggtcaggccgcacgatgccagccagcggcggctttcctcactcacccggtcagccaggatttcactttccagccggtcgancatcagttgtgggctggaggtaaaccaactgcgggcatcaccgtggggaaacagtagtggtaaccgttcataaaattcactgtcccaggcgacgatagcggtgacgggcgcggtcagggttttttgcagattgccgctggaaagtgccgggcgcagacgttcttttccttctgccgtgcgggtaaacacgatccgtgccggagaacagttagctgatgtcggcccccatttcatcagggcataaatctcccgtaacgtctcatcgctgacgggtgtctcccgccagccgttgtgagtgcgggcatcggtgaacagggtgagggcggcttcacggtgatgtaacaggctggcaagcccgttgagtaacagagcattaaacgtttcgggatcggtcacgttgcaggcgtgtccggcatagggcatcaccattttctggctatcgggcagggcggcatgaagttcactggaacatgctgttggcaccagcagattatcactggcggagatgatttgcaccgggcagcggatggattcgaatcggagctcggtatcggggatctctagagtcccgctggataaaactccggcgcgcccattacaagcccgctgccgcagatattcccgtggcgagcgataacccagcgcactatgcggatgccattcgttataatgctcgaacgcctctgcaaggttctttgctgccgttaacccgtctggtttgggcatgatactgatgtagtcacgctttatcgttttcacgaagctctctgctattccgttactctccggactccgcaccgccgtgttcttcggttcaagtcccaacatccgggcgaactggcgtgtttcattagcccggtagcatgaaccattatccgtcagccactccactggagacgacggaagatcgttgccgaagcggcgtttccaccgctcccagcatgacgtctgtactgtttcacaatactgaccggtatcggggatcccagccacgttttttcgcttcggtttcaatggcttcagcgccataaaggtgtgtgctacgccagtcgggcaagcagtcaccgcaactacgcgtttcggaccgctggcgccaactggtgctgtcgcagcgaccggcgcagtgtaaggtttcgcatggcctttgcgttcactcaggaacagctcagggtgcgcaactgcccgggaaatatcgcccagccagacatttttaccgttcagcgcgctgtcgttcgggatggaatcaccgagaacaatcgccatttcagcgtcgttcggattgtcgatgatttccagttttgcttttcgcgccgccgcgccagcagggtcttcgccatataggcgcgtgccgagattagcgtcaataatcagcagcgttttcat

SEQ ID NO: 139190 - DNA, 1962 bp, Homo sapiens
ctggtcctcagtggctccctgagcccccgtggtggcaacagcttggccaccatgaggcgcagtctcaaccgcttccccacctgtcaagtcaggcagggaggccttgtgcttggcgaggcgttgggctctcaggtgattgctcttcagcgtgctgcccgtaaaaaaggcgtcgtccacgtgttgacggtcaaagcccgacatcgggccggtatccagtcccagcgcccggcaggcgacgatcagatagcccgcctgcatggaactgttgcgaaacgctgtttcttcggcaagttgtgggctggaggtaaaccaactgcgggcatcaccgtggggaaacagtagtggtaaccgttcataaaattcactgtcccaggcgacgatagcggtgacgggcgcggtcagggttttttgcagattgccgctggaaagtgccgggcgcagacgttcttttccttctgccgtgcgggtaaacacgatccgtgccggagaacagttagctgatgtcggcccccatttcatcagggcataaatctcccgtaacgtctcatcgctgacgggtgtctcccgccagccgttgtgagtgcgggcatcggtgaacagggtgctaagcgcacctgggctaacggcttcgttcatagcaattcggtgatgtaacaggctggcaagcccgttgagtaacagagcattaaacgtttcgggatcggtcacgttgcaggcgtgtccgccatagggcatcaccattttctggctatcgggcagggcggcatgaagttcactggaacatgctgttggcaccagcagatcatcactggcgcagatgatttgcaccgggggatcaacggagttcactgcagacagttccagattatttttatcatccgataaccagatcacgccatcatgaatcgttgcctgcagcgtcatggtacgatcggcaaaggcgcttactttcgccagttgttcatcgtccagataccagacggaaagattggcaaactgcacacatttgctctgattttgctgccaccagatttgcgccgcccgactattataggtaaacagcgccacttctgcggcctgggtgcaggctttcttaatccgccgctcatccggcagccccagctcaatccacaaatcaatgcccaggtgatcgttacgcagccacgcttccggctcatcatcggcacacaaaccacgggtaaattgcagacgttcatcagcatatttcagccacgccagcaagcgcagcatcatacgctcctgggtttctgaaggatggcgcgccagcgtcagagaggcatcgagaaactggttgcggtcgagatcggccacattaaccgtcgctttataaattgtcggggatcctccgtccgtatcaaccagcgtcatttcctgggtagcagcagcgcgcggttctttcggcgcgatagcttctgccagttcaatgttcgctgcatagtcagaggtgtcggagaagaccacatcgtcttcaccgctctgcgccagcacctggaattcgtgagaggcgctcccgccgatagaaccggtgtcggcttgtacggcgcggaaatccagccccatgcggctgaagattttgctgtaggccgcatacattgcatcgtaggtttcctgcagggattcctgagaagtatggaaagagtaagcatctttcatcaggaattcgcgggaacgcatgacgccgaaacgcggacgcacttcgtcgcggaacttggtctggatctgatagaagttcagcggcagctgtttgtaagagctaagctcgttacgaatcaggtcagtgataacttcttcatgagttgggccgagtacgaacggacgctcgccacggtcaacaaaacgcagcagttccggaccgtactgttcccaacgaccactctcttgccacaaatcggctggctgaaccaccggcatcgacacctcgatcgcaccggcgttgttcat

SEQ ID NO: 139191 - DNA, 4174 bp, Homo sapiens
ccagtgccaaagccttgcatgcctccagttcgactctaaaggatttcagccacatggtgggcgttaaccggctccgcaaaccattttcgcccatcaataaagataaaaatgcgccgatcttccagtacgcggattacggcattgttggcgacgccgtgaagatccttccggcgctgaccgcagctttagcgcgttgatccactctggcagggctgcattttggccctgccgctgacagggagctcttatgtccgaagatatctttgacgccatcatcgtcggtgcagggcttgccggttcggttgccgcactggtgctcgcccgcgaaggtgcgcaagtgttagttatcgagcgtggcaattccgcaggtgccaagaacgtcaccggcgggcgtctctatgcccacagtctggaacacattattcctggtttcgccgactccgcccccgtagaacgcctgatcacccatgaaaaactcgcgtttatgacggaaaagtcagcgatgactatggactactgcaatggtgacgaaacctcgccatcccagcgttcttactccgttttgcgcagtaaatttgatgcctggctgatggagcaggccgaagaagcgggcgcgcagttaattaccgggatccgcgtcgataacctcgtacagcgcgatggcaaagtcgtcggtgtagaagccgatggcgatgtgattgaagcgaaaacggtgatccttgctgatggggtgaactccatccttgccgaaaaattggggatggcaaaacgcgtcaaaccgacggatgtggcggttggcgtgaaggaactgatcgagttaccgaagtcggttattgaagaccgttttcagttgcagggtaatcagggggcggcttgcctgtttgcgggatcacccaccgatggcctgatgggcggcggcttcctttataccaatgaaaacaccctgtcgctggggctggtttgtggtttgcatcatctgcatgacgcgaaaaaatcggtgccgcaaatgctggaagatttcaaacagcatccggccgtttgcaccgctgatcgcgggcggcaagctggtggaatattccgctcacgtagtgccggaagcaggcatcaacatgctgccggagttggttggtgatctgcacgagcgcagccttatctttgttgccagcggtccggccgggaactcaaaggagactgccagtgataaactggaggaagccctaccaaccaaaaactgggaagtaccaggagccaattggaacacccctgggaatggaataccaagtgtaccagagaagttgaagggaatgttaagtgccccgaactaccgccggatggtcctgcctgcaccgctacaaatattgttactacaaaacgccaaaggcggagagttattaggtgccgcaggtgggcaaatagcgtttaacctcggtagcgccgtcggcgcatattgcggaggtatgatgctgacgctggggctggcatataattacgtggcgctgcctgccgccctgctttcgtttgctgcgatgtcgtcgttgctgctgtatggtcgctataagcgccagcaagcggcggatactccggtgctggcgaaaccactggggcagctcgacaatgcgcccttccggtgtgaaaacgtaaatctcatccgggaagagatcggatttaacgctctcgataaattcaaacgaactaccggcgctctgttgcagctccagcaggctttgcatccagcgctgggcgcggatttgtgcggtagtactggtttcgccgtgctctttataagcccagtgcgcggcaacacccatctccgccatctggtccatatcttcggtacggatctggacctcaaccggcactccgtgcgggccgatcatcgaggtgtgcaaagactgatagccgttcgcttttggaatggcgatatagtctttcacgcggcccggacgcggcttgtacaggctgtgcatctggcccagcacgcgataacaggtgtcagaatcattgacgatcacgcggaaagcgtagatgtccatgatcgagtaaaaacgctgctctttgagcaccattttgcagtaaatcgaataaagatgcttctcccgaccactgacgcggcacggtattcccgcttcctgcaaacgcccttcgatttcagaaagaatcttctggatcatctctttacggttgccgcgcgcggctttcaccacttttagggttttttgcagattgccgctggaaagtgccgggcgcagacgttcttttccttctgccgtgcgggtaaacacgatccgtgccggagaacagttagctgatgtcggcccccatttcatcagggcataaatctcccgtaacgtctcatcgctgacgggtgtctcccgccagccgttgtgagtgcgggcatcggtgaacagggtgagggcggcttcacggtgatgtaacaggctggcaagcccgttgagtaacagagcattaaacgtttcgggatcggtcacgttgcaggcgtgtccgccatagggcatcaccattttctggctatcgggcagggcggcatgaagttcactggaacatgctgttggcaccagcagatcatcataatacgcccagaaattcggtagtaacagggcggtcatccgctgcttaaagcggttgagtactggataactccgccgcttttcgaaaaagatttgggaaccagttgtcggcatcccgtgcaaatcaccatcggcaaaccggaggagctgcaacgggtcagccaggtcattacactggagccggaagggcaggtggtagcggatgcgcttattacgtttgtttgtattgatcgtcatggtgcgcacgccgtccactaaaacaggggtaccggtaggcgcgtggcgcggataaccgtcggcgtaccctgcggcgacaatgccgattcgctgttcatcgcgcgcagtatagcgaccgccgtagcccacacgctcgcccgcttttagcgtctggacaccaataatctcactgcttagcgtcatcaccggacgtaatccggtattggcgatatcacgccactgaccggacggcgaagcgccatacaaaataatgccaggccgaacccagtcaaaatgcgcttccgggtgccacagagtcgccgccgaattggacaacgaacgccgacactccagcccctccgccgccttgttaatacgcgccatcgcgccggaaattccatcaagatgttccgctttgggcaaatgcgacattagggtcatttcgccaacattcgccattgcccgcaactgctgccagacggtaagcacgcgatcgggctggaagcccaaccgattcatcccactgttcacttttaggataaatattccaacggtgcttttagccgcgcattttgcagtgctttgagctgccagttgctgtgtacgcaggtggtcaggcggtgctggtcataaatctccagatcctgagcatggaaaaatccttccagcatcaggatcggtcctttccagccgcgctcacgtaacgttattgtcgtgtggggcggcgtgtggtggtgctttttgtggctttggtgttgcgtttttttcccttcggtttgggccaaccactttttttccccgttgcgcttgttttgtctggtttgtttttgtcgtgttgtttgttgttctttctgtttgtggggtttgggtggttttggtgtccagggctggtggatccggtcgtcatgcgtgccctctttatggatgcactgggccttgttacccttactggggcttttgtgccgttgtggctgggatggggcccgtgtgtgtcccgttgtctgctggcctggtctggttgtgtttcccgggttgattgcaccgggttgaattaccctgcggagcagcaggtcaggcgtcccgggtagaccgggttcgcctagccgttgttcttggtaaacccgtgatgccccgggtagccagaacatagcaccgttcatgggcggctgtacagcgggttgtttggccgtggtgttcgggtccttggcatatacgtatgccaggcatatttttgacaacacgatccacatgccatgcatttgctggtcagccgagcccatcccaagcatggccattccactccgtgggccattccacatccgttcatgccactggcatatcctcatcattgtacccacgggttcggtcat

SEQ ID NO: 139192 - DNA, 1935 bp, Homo sapiens; identical to SEQ ID NO: 138383

SEQ ID NO: 139193 - DNA, 1203 bp, Homo sapiens; identical to SEQ ID NO: 127965

SEQ ID NO: 139194 - DNA, 2559 bp, Homo sapiens
atgtgcaccggaaccgagaaggcccggattgtcatggacgatgagatacaccggaatatcatggacatattctttaaagcgccctttatcttcaaatgcggcacggaaaccggaggctttgaagaactcaaggaagcgcggcacgataccgcccgcaataaacacgccgccaaatgtcccgagattgagcgccagattgccgccaaaacggcccataatgacgcaaaacagcgacaatgcgcggcggcaatcggtgcagctgtcagccagcgcgcgttcgaaagtgtagccagaaaccctcacgcggacttctcgttattggcaaaaaaatgtttcatcctgtaccgcgcggttaaccgctgcggtcagacgctgcaactgttgcgggagaataatatagggcggcatcaggtaaatcagtttgccaaaaggccggatccagacaccctgttcgacaaagaatttttgcagcgccgccatattcaccggatgagtggtttcgaccacgccaatggcccccagtacgcgcacatcggcaaccatttcggcatcacgggcgggggcaatcgccagattcgagaatcgccaggctggcgttgctgccgcacaggccagcggattgcccataaaagtgacaatgcaggaggggaccgatgtcagtttacgcgtggcaatcgctgcatcttcgataatatttccctgaccgtgccgcgagggaagatcacggcgatcatggggccatcgggcatcggtaaaacgacgctactccgtctgattggcgggcaaatcgcaccagatcatggtgagatccttttcgatggtgagaatattccggcgatgtctcgttcgcgcctgtatacagtgcgcaaacggatgagcatgttatttcagtccggggcgttgttcactgatatgaacgtatttgacaacgtcgcctatccactgcgcgaacatacccaacttcccgcgccattgttgcatagtacggtgatgatgaagctggaggccgtggggctgcgtggagcggctaaactaatgccttctgaactttccggtgggatggcgcggcgtgcagcgctggcgcgtgcgattgcgctggagccggatctcatcatgtttgatgaaccttttgttgggcaagatcccatcaccatgggcgtactggtgaagctgatttctgagctgaacagcgcgctgggcgtgacttgtgtggtggtttctcacgatgtgccggaagtgttaagtattgcggatcacgcctggatcctggcggacaaaaaaattgtcgctcatggcagtgcccaggcgttgcaggcgaatcctgatccgcgcggagttaagccactcatgctgttaaatgcgctggcgtcgctcggacataaagggattaaaaccctgagaacgttcgggcgggccgggttaatgttattcaatgcgctggtcggcaaaccggaatttcgcaaacatgcgccgctgctggtgcgccagctctataatgtcggcgtcctgtcgatgctgattattgtggtttctggcgtgttcatcggaatggtgttggggctgcaagaaatcggcctgatgcgcgctacagagcaactctccagtatgtggcgcaagctggcagtcaactgcgtgattaatccactgactgccatctggaattgcccgaacggtgaattacgtcatcatccgcaagaaattatgcagatatgcgaagaagtcgcggcggtgatcgaacgcgaagggcatcatacttcagcagaagatttgcgtgattacgtgatgcagacggcagcgtgctgttgtaaacgcagaaaacgcttcgccagcaagcgacgaatcgtcaagggggccagccaggcaccgtacattgcgaagccaaaaaccagcatcagcgaggtgaaatggataaatcgcagcgcgatccaggttccgggtttcagcgaatcggccagtggaacaatcagttgcttttggtcctgctcatttcgcttcgccggtaatgttttaatattttcgttttttggccccgtgatttttgcaccactgaatcctgtttcaacaccttccgagaagtttaaagtgattgcctgcggtgcagctggtcacttggcgcgtgtgccggcagccagatcgccgtcgggtgatgggcaaaatcgtcatataccggacgccattcgcttcaccacgcaactccagacggcgacgagcattaataaacgaacccagcgcgtagcggcatctgccggcgctacaccaacatggcgagccgctgcaatcgcatcaggccattgtgcatatatgttcgcctaccagcgaccatttcacttcgcccactttttcgccatccagcaaaacttcccattcggaagcatcggtggtcagctttttcgcctgccagtgaccctgctcacccaccagctcctgctcgctccagcagccatcgccatggttgatgtcattttccggccagataatacggccctgccccggaacgatacgcaccagatggtggaactgtttctggatcgctttcaggtcgtcaaagaatcggcgtga

SEQ ID NO: 139195 - DNA, 1401 bp, Homo sapiens
ctatacggggttggtaaagcgctgagcgccaacgttgatatactcacattgcactcccaggatgatcggattggcatgctcaacttgtacaacgatggcgtcagccagcacctgcacacggccaatgttggcattcgcaaaaatacgggctagcggaacatgcatcgagctgaaacctttggctagcatataggcaatcaatttatcggttggcatcggaaggatggtggacatatcaaagaacaacggattacgcgacaagcctttgcaaacgccgatttcaccgaacaacacggtgcgcactagatcgacattcggggacatggcatagatcaagtcagcatctttagcggtctgctcctggctggctgcgggagtcgcgcttttgactaccaaatgccggacactgtcggcggcggtaccgctcatcactttgacggcaacatcgaagggaagattcagggcttcgcacaaaacggcggcttctgccgaaagcgcattgagcgcgatgctcatgtagttgttgatgagcttaacgcggatccccatgcccggaccgccagcgttgatcaactcactgcccatcgccatcaggatcggtgtggcacgttcaacttgttcagcggtgccgccagccagcagtaacagagtaccggtaatggcatttgcagaagtacggcctaccggaacatccatcatgctgaagcctttggcttgcatatcggcaatcaatttatcggtttgcagcggatggatggtggacatatcaatgaccagcgcatcggtagataagccttcgcaaacgccgttttcaccgaacaacacgttgcgcaccagatcgccattcggcaacatggtaatgataaattcggcatctttagcggcctgcgccgggttggcggcgggagtcgcacctttgtcggacgccaatctctgacatgtgggcagcacctcgtccggcgacccgtacagaaggtagagcgtcctggccggcaggccgctgtgaaaagaggggcccacacacgaaacgcaccgactagaatatgagaccactaccacaaaaacagcatgtgttcgccatttgacacacttgtagcgatacaacgtggaacagacgtacatctgggagatcacgcgacataccgcaaaagttacatgacacagacgtatgacaactacctcggggaacgcaaccattcgccaacagccgcagaacacattacgcaacacccgactacgcccgccgccgccagcttcgcgctgccaactatcttcgacaaattctgcgccatcgacggcggtcagctgctgacaaatcgtatcctgaaggttgagcagaaactgtttaaatgactccggcagaatatcttcaacgtcgttgagcttaaaacgctcgctcat

SEQ ID NO: 139196 - DNA, 3505 bp, Homo sapiens
  misc_feature (1)...(3505): n = a,t,c or g
atggcgcggcgtgcagcgctggcgcgtgcgattgcgctggagccggatctcatcatgtttgatgaaccttttgttgggcaagatcccatcaccatgggcgtactggtgaagctgatttctgagctgaacagcgcgctgggcgtgacttgtgtggtggtttctcacgatgtgccggaagtgttaagtattgcggatcacgcctggatcctggcggacaaaaaaattgtcgctcatggcagtgcccaggcgttgcaggcgaatcctgatccgcgcgtacgtcagtttctggttagtgcgtgggcgtcgtggggtggcgctcgggactcgccgcggccgagtgagatcaatctgctccttaacgcacgtgtccttttggccagagcgtcggtgaccccgcttggtgtggcggcggtctgccgctatcgatatcgccactgcagcttaaggctaccgtggaactttcggcgaattctcaggttctccgctgtggacccgtggaggaaccagtgggccacagtgattgcagagcggcgcggcttatccggcctacgggtaggtatatccggctttggtggaggcgcgctccaaatccaggttgaacaaaacatacacaaaaaatatagatctccgtcacatttttgcgttatacaggaagctcgccactgtgaaggaggtactgctatgacgtcactctctcgtccgcgcgtggagtttatctccaccattttgcagaccgtactcaatcttggtgatcatcaacctgattacaacgatattttgtcgcaacgtattcaaagtagccaaagggcgctgggactggaagtcaatctggcggaagaaaatgaactgacgatggactctcttaccgaaagcctggaatgggccgatgtggtggtgattggtcccgttaaaataggaaagcagccacacgttaatgcaatcaaaaatggctttattcgcttaatgaatatggctatccgcatttggtttagtactttccgtctgaaagacgacgttgttatttcatctgtgataacggcgcttgaacttggttatcgcgcaattgataccgcacaaatctatgataacgaagccgcagtagaaccgatggcggctgcttatgttcagccttctcgtcgcccgaccgatggtcgctacggcgaaaagggcccaacagctgcagtcacccgggtagaccgatcatcccagggcaccacacgggtacacgcacaccacgcggagttgcggcgcccaacagtacggccgcgaaacgcgcccaaaaacaccggctcgctttccggcaatttactggctgatttcgtacgcggaaatcctgaagaaagttttccgcccgacgtcgtggctggcattcatatgcatcgacgtatcgacgtattgactgacaatctgccggaagtccgcgaagcacgggagtggtttcgtagtgaaacgcgccgcgttgcgcctattacgctggatgtcatcgcagtgacaatgccgacaacatgttgcacattgaaaatatcgcccttatgccgggaattaattttaaccctggcaaacaggacgacgactcagcgtgctgagccaatgacccgcagattaattcaggtcctgtttgatgaactccctcagcagccacaacaacagctgcacctgcccgtttcttctcatcctaaaatccgcacgatggtggagatgatggcgaaagggcctgtcgagtggggggcattggggcaatgggctggcttttttgcgatgagtgaacgcaatcttgcccgactgatagtaaaagagacggggttgagttttcgccagtggcgtcagcagttacagctgattatggcgcttcagggattagtgaaaggcgatactgtacagaaagttgctcatacgctggggtatgattcaacaacggccatttattactatgttaagaaagcctgggaaaacggcaggtaccagcttataccatcggcgctacggcgtttcacttctgagttcggcatggggtcaggtgggaccaccgcgctactgccgccaggcaaattctgttttatcagaccgcttctgcgttctgatttaatctgtatcaggctgaaaatcttctctcaatccgccaaaacagcttcggcgttgtaaggttaagcctcacggttcattagtaccgagtcaaacggaagaacgacactcgcacggacaccacgccaaggatcgtcgatcaagtggctgtgtacgaaccccggtagcccgacatgccctaccggacatggtggaccaccgtagacacatcgcaggccacccggaaaggcaccacgtgtcggtaccgcttggtatcgcggagcctgaacgcgaccggtccacttattcacctttcgggacctccggagcaaccccaaaagggaaagcaaccgaatgtgaactagctccctgttcagataggagctttacaggttatctctcagacggaaacagagggtacgagagcatacagctcgttgggattccgataggcaccaaggacgtaggcgactgtcacatcganactctgagcccaagcggcgccggaggaagacggcgagttatgcagttattaggtgccgctacttcctgctatcactacgctacactggactcgactgcgactcaggtcagttcagagctgcaggcgacgcgagtaatcagctcagctcacaaggcgagtaagtacgggttataccacagcaatcagggcgatacacgcacggaaacgaagcatggtgaagcacacagggccagcaaaaagggccaaggaaaccggtacaaaagggccgacggttgcgacgggcagagattatcggacgttattaggggcgaccggcattcatattacccggtctttacccctatcgcacatacaaccgtttggacctcttcgggccttgtgcagacccttctggaggatctggcatttccggggacattgagcgtgaaggccgctaaagatgccgaatttatcattaccatgttgccgaatggcgatctggtgcgcaacgtgttgttcggtgaaaacggcgtttgcgaaggcttatctaccgatgcgctggtcattgatatgtccaccatccatccgctgcaaaccgataaattgattgccgatatgcaagccaaaggcttcagcatgatggatgttccggtaggccgtacttctgcaaatgccattaccggtactctgttactgctggctggcggcaccgctgaacaagttgaacgtgccacaccgatcctgatggcgataggggcaagagaagagaggatggggtctcctgtgcgctcggtcgacaattccgccgtgttgtcttcagaattgccaatctggttcctggaagcgcgtggaccgtgcgcaccgtttgcacttaatacagcctttcggggcacaacgggcgcaatcccccaagggatattggcaacccgaattagtaaagacaaggctgcgccgtacacaaatagggaacccattatatga

SEQ ID NO: 139197 - DNA, 1422 bp, Homo sapiens
atgagtacagatagcattgagggcagcaatatttgtgatatcggccatcgcgactgggcacctgtaccgctgctctcatcgtttatcagcgattgtctggaaaaaggccgcgatattaccgatggcggcgcgcgttataacttctccggcgtacaggggatcggtatcgccaacctgagcgattctctccatgcgttgaaagggatggtttttgagcaacagcgtttaagttttgacgaattgctgtcggtattaaaagccaacttcgcaacgccagaaggcgaaaaagtccgcgctcgcttaattaaccgcttcgagaaatacggtaacgatatcgacgaggtggataacatcagcgccgaactgttgcgccactactgcaaagaagtggaaaaataccagaacccgcgcggcggctacttcacgccgggatcgtataccgtttctgctcacgtcccgttgggatcggtggttggcgcgacgccagacggtcgttttgccggagaacagctggcagacggcggcttgtcacccatgctgggccaggacgcacaagggccaacagcggtactgaagtcagtcagtaagctcgataacacgctgctgtctaacgcgccttctttgtcgaactgtcgaaggagatccaggatgacatcatccgccggacagcgcatcagctgtaacgttgtggaaacgcgccgcgatgatgtggcgcgcattttcaacattcagcgttattcactgaatgacggcgagggcattcgtacggtggtcttttttaaaggctgtccgcatctttgcccgtggtgtgctaatccggagtcgatctccggcaaaatccagacggtacgcagagaggcgaaatgtctgcactgtgcgaaatgtttgcgtgatgcggatgaatgcccctccggggcgtttgaacggattggtcgcgatatcagccttgacgctctggaacgggaagtgatgaaagatgacattttctttcgcacgtccggcggcggcgtcacgctttctggcggcgaagtgttaatgcaggcggagtttgctacccgttttttacagcgactgcggctgtggggtgtgtcatgcgccattgaaactgccggagacgcaccagccagcaagctattaccgctggcgaaattgtgcgatgaagattgttcgggggatcctctagatcgacctaaagcagcagctgcaacattgcctatctcggcgcacgtctcgacgaacgtactatcatcaaacagaagggatacgaacaggcgatgctggatgcaggcctggtgccatatagcgtgtatggttgagcaatcttcttcttactcttccggtattgaactgattcgccaggcgcggcgggaatatccgcagctggatggcgtggaggggagtgcgcggggtacagtaacttga

SEQ ID NO: 139198 - DNA, 379 bp, Homo sapiens
gccttcgggattttatcaagcaggagggctagggtcatgttcaccacatcccgcgcatgagtcgcgtccataatttttaaatcgaacaacgcttcatcgcacaatttcgccagcggtaatagcttgctggctggtgcgtctccggcagtttcaatggcgcatgacacaccccacagccgcagtcgctgtaaaaaacgggtagcaaactccgcctgcattaacacttccccgccagaaagcgtgacgccgccgccggacgtgcgaaagaaaatgtcatctttcatcacttcccgttccagagcgtcaaggctgatactgcgaccaatccgttcaaacgccccggaggggcattcctccgcatcacgcaaacatttggccc

SEQ ID NO: 139199 - DNA, 1455 bp, Homo sapiens
atgaatgagttggtgcagatcctgaaaaatacccgtcagcatttaatgacgggcgtttcacacatgattcccttcgtggtatcgggcggtattttgctggcggtttccgtcatgttgtatggcaaaggcgcagtgccggatgccgtagccgatccaaatctgaaaaaactgtttgatatcggcgttgcgggcttgacgctgatggtgcctttcctcgcagcgtacatcggttattccattgcagagcgttctgcgctggctccgtgcgctatcggtgcctgggttggtaacagctttggtgcgggcttctttggtgcactgatcgccgggattatcggcggcatcgtggtgcattacctgaagaaaattccggtgcataaagttctgcgctcgcggatcggcagcggcgaaaggaatcgccccttcagtaacgccaacacagcccatcaccagtgccgctttgccggtttcgcgctcttctgcggagaaatttttacgaccaatcagcgtcgccagccccatccccagcggcgggatacaaatacccacggcagcgatggccaccacggtataactgatacgaatcgagctcggctacccgaaagcgaaacccactttcggaacgcgatggaatattccgctatcggtatggcgttagtgggcaccgagggacaatggctgcaaaccaacaaagcgctctgccagtttctcgggtacagtcaggaagagctgcgcggactcacctttcagcaactgacctggccggaggatctcaataaagatctccaacaggttgaaaagctgataagcggtgaaataaacacctattcaatggaaaaacgctactacaaccgcaatggcgatgttgtctgggcgttgcttgccgtctcactggtgcgccacacggatggcacgccgctctattttatcgctcagattgaagacattaacgagctaaaacgcaccgaacaggtcaatcagcaactgatggagcgcatcactctggctaacgaagcgggcgggattggcatctgggagtgggagttgaagccgaatatttttagctgggataagcggatgttcgagctgtatgaaattcctccacatatcaaaccgaactggcaggtgtggtacgagtgcgtgctgccggaagatcgccagcatgccgaaaaagtgattcgtgattcgttgcaatcacgctcgccctttaaactggaatttcgcattaccgtaaaagacggtattcgccatatccgcgccctcgccaaccgggtactgaataaagaaggcgaagtcgaacgtctcctcggcatcaatatggatatgaccgaagtgaaacagcttaacgaggcattgtttcaggaaaaagagcgcctgcacattacgcttgattccatcggtgaagccgtggtctgtattgatatggcgatgaaaatcatgataccctcgcattag

SEQ ID NO: 139200 - DNA, 1516 bp, Homo sapiens
tcaaccgtaaacagcagagcgcccaaatctatcggcgtacgctgcaactctactaatcataaggatcgtgatgcctgaatcgttgatggtcatacgttcttcctcgacgctgcgtaacattgggaatggatgacgttctccgcagatagcgtatcttcggtacatacgctcacggacgatcttccgctggagtcgctggccgatcagcccggtgccggaaatgttcatcttttgatccaccagagggccttttatatcgttcctgttcaccattgatggcagcgcgccggaactgatgcgcaagaaaatcctccgccacggcaagaaagtgggcttcatcaatctaatcaaggatggcatgaaaggagtgaccgttttatgacttctcccgtcaatgtggacgtcaaactgggcgtcaataaattcaatgtcgatgaagagcatccgcacattgttgtgaaggccgatgctgataaacaggcgctggagctgctggtgaaagcgtgccccgcaggtctgtacaagaagcaggatgacggcagtgtgcgcttcgattacgccggatgtctggagtgcggcacctgtcgcattctggggctggggtcggcgctggaacagtgggaatacccgcgcggcacctttggtgtggagttccgttacggctgatgttggtttgatacgtaacgccgcactgactctcattgcgaaaacagggatatgcagacatttcgcctctctgcgtaccgtctggattttgccggagatcgactccggattagcacaccacgggcaaagatgcggacagcctttaaaaaagaccaccgtacgaatgccctcgccgtcattcagtgaataacgctgaatgttgaaaatgcgcgccacatcatcgcggcgcgtttccacaacgttacagctgatgcgctgtccggcggatgatgtcatcctggatctccttcgacagttcgacaaagaaggcgctgtatccggcaacgcgcaccaccagcccggcataatcttgtgggcgctgttgcgcttcccgcaacgtgtcggcgttcaccacgttaaactgaatatgttgtaacttaagctgggtaaacgcccgtaagaagtcggccagtttgcgtaatcctgcttcaccttccagggtcgccggagtgaatttcacgttcagcaacgtaccgttagacagcagcgtgttatcgagcttactgactgacttcagtaccgctgttggcccttgtgcgtcctggcccagcatgggtgacaagccgccgtctgccagctgttctccgggaaaacgaccgtctggcgtcgcgcaaccaccgattccaacggacgtgactttgtcatacagccagtcaaatccccaggcgttgtaccaccaggtgcccagcagacggcccggcgcactgttggcgatggaggtcaccagagtacgtttacccagccacagccaggctgccagcagaatgccgaccaccgcgaccacgccagaggtaatttccagggtcaacat

SEQ ID NO: 139201 - DNA, 1377 bp, Homo sapiens; identical to SEQ ID NO: 124869

SEQ ID NO: 139202 - DNA, 370 bp, Homo sapiens
atgcacgatcaacaggttattgatgcataccatcctgacctgcgtcgcacccgggcagccagccagtcgatcattccggtcgatactaaactggccgccggtatcacacgattttttccgcaatttaacgatcgctttgaagcgattgcggtacgtgtgccaaccataaatgtgacggcaatcgatttaagcgtgacggtgaagaaacctgtaaaaaccgatgtgggtggtgccggaacggtcaaactgaatcgctgccagatcgctcggataagtcggcaggatgtaataaccccacctggctgcgttttcgagaaggcgctgacgttattgatcgccagcggaagaaatgatacactagcacgtcaaa

SEQ ID NO: 139203 - DNA, 1119 bp, Homo sapiens
ttaaaatctgaatgtcatatcgaattcaacgtataagttgtgttctctgtcaccgtcataaggtcgtttttcccagcgtagcgttgcgccagcatcaattatgtcattccaaataatgcgttgcccgtagccgagttgggtaaggacatccgtgccataatgtttttgccaggaggcaccaacacttgcgctgaatatttgctcccagctattttcatagctttgccataacaaatggcttgcctcaaatgccggaacaatatccaacgtttttataggcctgtagccccgggtatcgtgtctctgtattttgttcgtaatacagatgtagaacagattaaaataatcaataaattgtgtctgctcattggtgtctccggtaggaggcttgacggtgtaaccactcattcgactgtaggcactgtcggataagttataaaaaccttgcgtagaatagcgatatcccgggatacgaccagcagtgtaggtacgctcctgatagttaacggtcagtgggaagaagtcttgacctggtctggcttttttctggccaacaacggtaacgaataccgcggtgtcatccatgctaaccataacagcggcagtagcctgacgagccatcatgccggtttccagagtcgcggtgtgttggccgtactggaatttacgaacgatcggattaagcaatgtaatatcctttctctttcttagacagtaccttacggcactggtgttaatacccgatcttctgcgcatcctcgcgactaatgacaaccctaacccagctctatgtgggtaaagcctctcattagccgcgcgaacctccaggcgctcgatgaggtgggtgtaacgtgctacgtctttacgtttcaggtagtcgagcagtttacgacgctgagaaaccatgcgcagcagaccacgacggctgtggtaatcttttttgggtaccgagctaaagtgtgtcagaacgtgctgaaaagtctggcgcgtaaaaatgggtcttcgactgatgaaaaagaagacgaccaaagatatcggcatcaagtttgaagagcgttttgctggcaagaccatcgtgcgcgtcaacatcagcgatgcagtaaaacgtgctgacgccat

SEQ ID NO: 139204 - DNA, 786 bp, Homo sapiens
atgactttcttacggccggttgcggtcggcgatgtggtgtgctgctatgcatttggccagtcgcgcgaccacgtagccatcgccgccgttattaccatgaccgcacagcaccagccagtggcgggcgtcaggatacgccgaacgacacacctggaatgcggcctcgccagcgcgaagcatcagctcatagagtgtgagccccagcacatctgccgcctcgcgttctccgcggcggatatcgtcggcgtacaacttcctcttatgattatagattttcttttatcatttagagacaaaaagaagtctccaatagtagctgaaagttttcagagctgtagagaacaaccatcttttgacaatgaaatgggtgcgcagtgctatgcaggctggggtggtctgattgtgctgccggtggttgaaggcaagctgggttatatctcagcagtggctgtcggagcagtggtgacggctgtttgtgtgaacgtgctgaaaagtctggcgcgtgttgcccatacctatatggcagcagaggcgctggaaagtgccgcgaaagcgaaaggctgggaagtgaaagtagaaacccaggggtcaattggtctggaaaatgaactgactgcggaagatgtggcgagcgctgatatggtgattctgaccaaagatatcggcatcaagtttgaagagcgttttgctggcaagaccatcgtgcgcgtcaacatcagcgatgcagtaaaacgtgctgacgccattatgagcaaaattgaagctcacctggcgcaaaccgcttaa

SEQ ID NO: 139205 - DNA, 2186 bp, Homo sapiens; identical to SEQ ID NO: 127851

SEQ ID NO: 139206 - DNA, 4106 bp, Homo sapiens; identical to SEQ ID NO: 129994

SEQ ID NO: 139207 - DNA, 706 bp, Homo sapiens; identical to SEQ ID NO: 135758

SEQ ID NO: 139208 - DNA, 1372 bp, Homo sapiens
atgtgccccattgaggaaactgcgtcatccttcggcggcaaaccgctgtcgatggtactggttattcagatgtttatgctgctgaccggggcgctgattattatcctgaccaaaaccaatcccgcgtctatctcaaaaaacgaagtcttccgttccggtatgatcgccatcgtggcggtgtacggtatcgcatggatggcagaaaccatgttcgcaccggcttgctacggttattacatcctgccgacttatccgagcgatctggcagcgattcagtttgaccgttccggcaccacccacatcggtcgcttcgtcatcaaccacagctttattctgccggggttgattggtgtgagcgtatcgtgcgtcttcggctggatcttcgccgcgataaagcgtgacgccgccgccggacgtgcgaaagaaaatgtcatctttcatcacttcccgttccagagcgtcaaggctgatatcgcgaccaatccgttcaaacgccccggaggggcattcatccgcatcacgcaaacatttcgcacagtgcagacatttcgcctctctgcgtaccgtctggattttgccggagatcgactccggattagcacaccacgggcaaagatgcggacagcctttaaaaaagaccaccttcgacaaagaaggcgctgtatccggcaacgcgcaccaccagcccggcataatcttgtgggcgctgttgcgcttcccgcaacggtcgccggagtgaatttcacgttcagcaacgtaccgttagacagcagcgtgttatcgagcttactgactgacttcagtaccgctgttggcagcattgttatgctggcggtgatcatgggtctgatgctggcgttcgatatgggcggtccggttaacaaagtggcctatgccttcatgctgatttgcgttgctcagggtgtttataccgtggtggccatcgctgccgtgggtatttgtatcccgccgctggggatggggctggcgacgctgattggtcgtaaaaatttctccgcagaagagcgcgaaaccggcaaagcggcactggtgatgggctgtgtttggcgttactgaaggggcgattcctttcgccgctgccgatccgctgcgtgtcattccttccatcatggtcggttcagttggtggtgcagtaactgcggcgctggtcggtgcgcagtgctatgcaggctggggtggtctgattgtgctgccggtggttgaaggcaagctgggttatatcgcagcagtggctgtcggagcagtggtgacggctgtttgtgtgaacgtgctgaaaagtctggcgcgtaaaaatgggtcttcgactgatgaaaaagaagacgacctggatttggattttgaaattaattaa

SEQ ID NO: 139209 - DNA, 789 bp, Homo sapiens
atgaagattattgccggtattacccctgctgatagcggtacgctggagattgagggcaacaactacgtcagattaacgccagttcatgctcatcagctgggtatttatctcgttccccaggaaccgctgcttttcccaagcctgtcgataaaagaaaacatcctgtttgggctggcaaaaaaacagctctccatgcagaaaatgaagaacttgctggcggcgctgggctgccagtttgatctgcatagtctggcaggatcgctggatgtcgccgatcgccaaatggtggaaatcctccgcgggctgatgcgcgactcgcggattctgatcctcgatgaacctaccgcctcgcttacccctgcggaaaccgaacgcttgtttagtcgcttgcaagagctgcttgctactggcgtgggtattgtttttatctcgcataagctgccggaaattcgccagattgccgatcgaattagcgtgatgcgcgacggaaccatcgccttaagcggcaaaaccagcgaactgtctaccgacgacattattcaggccatcaccccagcggtacgggaaaaatcgctctctgccagccaaaaattatggctggagttacctggtaaccgcccacaacatgccgccggaacgccggtgctgacactggaaaatctgaccggcgaaggtttcaggaatgtcagcctgacgctcaatgccggagaaattctgggcctggctgggctgaactggccgagacgctctatggtctgcgtactttgcgtggcggacgcattatgctga

SEQ ID NO: 139210 - DNA, 1335 bp, Homo sapiens
atgggttttatgcagccagagccagaaaacgaggagacatatcaggaagataatcagcggaacggggagtcccagcacatccaggttagcgaaatctgtaaacgccatcgggaatccaccaataccttcgtaccccgtcgctccagccataccggaaagcagcagagcgctttcggcaaacagatacagcgtgccaagcgtaatcaccagcgggacgctggcggcgataaattattacagcagagaagggacgctctcgcgaacagcagctggccatactccacactgaacctggccgatatgcggcagttgcagcagcagcatagtcaaacgagactggccgataccgccgccgatggtctgcggcatttcaccgcgcagcagcgcctgatgccactccagctccaggcgatcttcgtcaccggtcagcgccagttgatgcttcagcgtgtcggcatctacacggatccccatggaggaaagctcaaacgcatcttccagtaccggcttgccgccaatcccgacaaggaataccgcgccaagatctttcgctatcgcccgctcacgccctttggcatcaagatccggataacgagacaaggatccccgattattgccggtattacccctgctgatagcggtacgctggagattgagggcaacaactacgtcagattaacgccagttcatgctcatcagctgggtatttatctcgttccccaggaaccgctgcttttcccaagcctgtcgataaaagaaaacatcctgtttgggctggcaaaaaaacagctctccatgcagaaaatgaagaacttgctggcggcgctgggctgccagtttgatctgcatagtctggcaggatcgctggatgtcgccgatcgccaaatggtggaaatcctccgcgggctgatgcgcgactcgcggattctgatcctcgatgaacctaccgcctcgcttacccctgcggaaaccgaacgcttgtttagtcgcttgcaagagctgcttgctactggcgtgggtattgtttttatctcgcataagctgccggaaattcgccagattgccgatcgaattagcgtgatgcgcgacggaaccatcgccttaagcggcaaaaccagcgaactgtctaccgacgacattattcaagccatcaccccagcggtacgggaaaaatcgctctctgccaaccaaaaattatggctggagttacctggtaaaccgccacaacattgccgcgggacgccggtgctgacactggaaaatctgaccggcgaaaggttcaggaatgttcacctgacgctcaatgccggagaaatttcactcggtacctactag

SEQ ID NO: 139211 - DNA, 2556 bp, Homo sapiens
ttactccacttcctgccagtttttccgtttactggttttaccgatccccggattcatgctgttggtcggatcgttctcgcgatagaacttctgcaacgtctccggtgctttatacaaatgaccgacgttatgctcggcagggtactgcgcgccgcgctgctgtagcagttccagcatctgttcttttaacgcatgcacatccacgccttttttcactatgtaatcctgatggaagacatagcacataaaatggccgtaatagagcttgtgcaccagctggctgtcgatctccggcggtaaatgctcataccactcggtgtcgttacgccgcagagcgatatccaacgccagaatgtcttcgacttcatcggaatgcaccgcctgataacgaattgctgcgcccgcagcggcgaaacggtgtaaaaacgctttgctgccttcctccggcgtacagacaaagaaatcgccttcggcctgtttgaaataatccaccagccacgatttggcttcgcccacgccatcgcccgccatttttaacagcagatgatgctcgtatttatcgcgccagtttttcatgcgcggcggtaaatggctgcgcttgcgcagccgatttctgtcacgatggttacgcttgctgatctcgaaccgccacaagccgttcagccgccaccggagccggtggtagagccagaaccggaacttgagccgatccccgaaccgccaaaagaagcaccggtggtcattgaaaagccgaagccgaaaccagtgtggcttcaggaccacgcgcattaagccgtaatcagccgcagtatccggtatctggcgcccagcaacaaccaccaccggttcatcgtgcacgacgggcgctcttcccgccagtggctccgtcgatcgccatcccgggctaaagcacttcatatccatcgtcgatgaggctccagtgctcggagccgcaatttcttcactttctgcgacgaccgcagcaacacgatcgccgacgtgacgcattttcttgccgaacatacggcggtcaagcggtgccggttccggtgcgctctgaccacccggggtatagtagatatccgggcaattcaggtgagtaataacgtgaacgacgcccggtaaggcttcagctttgctgacatccagatgagtaatcagtgcgtgagcgtgtgggctacgtaacattttaatgacgcaggcgtcagccgttacgcggtcttcaacatagcagggtttcgcctgcaccattttcgcggcatcagttttaggataatgcttaccaatgacttctaggtcgtcacggaaagtcggagcgatatcaatggtggcctgcggattatttttacgtgcaaccgccagttcaatgacctgatagtattgctgccagccagcatcgcggctgaacaaaccagaaagcgcgtcgtcgatctcttcgcgggtaggtgcggcgatgcgatcgagaagatcggtgataatcagagctgcagctggatcgttataaccagactgcaccacgccaacatcaaccattgcctgttgctttagaaagctggcattggtatgatagcggaaataatgcaaggcctttaaatgtgggtcaatccggaacggggacgggctgaaaatacgattatcggtggcaatgccaccggtatcggaaccctgaatgtgcaggatcaagactctgtcatcacggtacgcagactctcttagagcgccctcaaaccaggaatacttgtgttcaaactcacccctgcggaaaccgaacgcttgtttagtcgcttgcaagagctgcttgctactggcgtgggtattgtttttatctcgcataagctgccggaaattcgccagattgccgatcgaattagcgtgatgcgcgacggaaccatcgccggcaccggtttcggcgatgatttcggttttacccatccgcttcgccagcaacgcctgccccagcacctggttagttttatgcgcgccgccgtgcagcaaatcttcacgcttgagatacagcgtggtgttcgtcccggctgtaatgttctggcatttggtcagcgcggttggacgcccggcatagtttttcagcaggtcgttgaactgagcctgaaattcaggatctttttgcgcactgacaaaagcttcttccagctggcgcagagcaggcatcaggatttgtggcacgtacatgccgccaaactcaccaaaataggggttaagtaatgttgtcattgttcctttccttaatatgcgcgcagcgtcgtgctgatttgtgccaattgcgacgtcagctcgttgttttccattggattggtcgggtcttggtttttcagctgcgccaccagcaaagtcagaaaactgctttgtaaatctgcggcgttgctcgcccgtgagcgaactactgctggtggtactgacgccggtatttgtcggatcggtggtggttaccgcaatggacatagctttctccgtgttgagcacttcaacattggcctgatagctgcgtgacgccgacatggtgttaaccatctctccgacaacatcaacgttcggcat

SEQ ID NO: 139212 - DNA, 1686 bp, Homo sapiens
tcaagggcgataaaaaaccacttctttccccgcgaaactcttcaatgcctgccgtatatccttactggcttccgcagaggtcaatccgaatatttcagcatatttagcaacatggatctcgcagataccgtcatgttcctgtagggtgccatcagattttctgatctggtcaacgaacagatacagcatacgtttttgatcccgggagagactatatgccgcctcagtgaggtcgtttgactggacgattcgcgggctatttttacgtttcttgtgattgataaccgctgtttccgccatgacagatccatgtgaagtgtgacaagtttttagattgtcacacagacaccggggttcggtaaaagagtatctggtgtcatagaaattgccgatgggagtcgccgtcgtaaagctgctgcccttaccgaaagtgattttcgtgttctggttggcgagctgaatatgagcagatgcctgcattatccagattgggtaacgattatcgcccaccaagtgcttatgaacgtggtcagcgttatgcaagccgattgcagaatgaatttgctggaaatatttctgcgctggccccctttccgttgtggtattccaaccacccccaatttggcgccggttatcaggtggtactcgaaggcggaaagttttaattccaatccattgcggcgttttgtctaccgcgctgacaatgcccaaggtgacggtcaccagatggtgagcggaaagcgcaagatcgccggccagcacgtcggtttcaagttgctctaacatataaatcaagcttctttgcccggtgactggctgggtgtctttcaggtggatcgcggcgatacggtcaatgcccagtttcagttcggcgggaacatcattgccccaggcgctgaggttgccgacgtccgggtagacggtgaaccacggtgaggcgagcatctcgtcccattttttccatttgctgatggagttcataaacgcggtatccataatctccaccgccagcattacttgtgatgccgccgcctgttcgactgcccacgccagcccttcagcaaaacgttgccgggtgccttcgtcgtggtcttcgtaatagacgtcataacctgccagctggatggtgcgaatgccgagatcgcgcgccaggcgaatcgctttactcatgatttgcccgggagtcacccactgggtcacataaccatcgctcggcgcacgcactatcgtctgctcaaggttatattttgcttccgcgagctgtgctttcaggctggcgatttgagaatgttcacccaacaccaggctatccagctggctctggatctgtttttgttccgccgccgatgacttcacggaggcttcctgcgccagataattttgccgcgccacatcgatatcgcgttctgaaaacgggtttactttcgcctggctgccacgtgcgtaacgctgatactctttagcgaatttatcccgcgtggcctttgcctgctgagtattcgccgccatctcatctaactctgcgcccaacgcccgctgtttatgttctgcggtaacgatatccgccatcagccgatccacccgcgcctgataacgcgtcgggtccagtcgaaatagcacctcaccttttttaatcagcgtattttttttatccgtcacttcaatcaccacaccagtcacctgcat

SEQ ID NO: 139213 - DNA, 1509 bp, Homo sapiens
atggcagcaagcgggctggaaacacgtttcgatgaagtggggaatttatacggtcgcctgaatggcaccgaatatccacaggaagtggttttgagcggttcgcatatcgataccgtggttaacggcggtaaccttgacgggcaattcggcgcgctggcggcgtggctggcaattgactggctgaaaacgcaatacggcgcgccgctacgtacggtcgaagtggtgactatggcagaagaagaaggcagccgcttcccgtatgtcttctggggcagtaaaaatatttttgggctggcgaatcctgacgacgtgcggaatatctgtgatgcccaacagttagccgatgtgctggaaggccactacatcagcgagaaacgttttttgctggaagcgcaagtctgtcagcaagattgccagaaacgcatcagcaccgcgataaatgaagtgcggatcggcagcggcgaaaggaatcgccccttcagtaacgccaacacagcccatcaccagtgccgctttgccggtttcgcgctcttctgcggagaaatttttacgaccaatcagcgtcgccagccccatccccagcggcgggatacaaatacccacggcagcgatggccaccacggtataaacaccctgagcaacgcaaatcagcatgaaggcataggccactttgttaaccggaccgcccatatcgaacgccagcatcagacccatgatataaagttgcctgtaagcaccagcagcaatgctgtgagcataaatgcacgtgtgcactctcacacgggtgttcccgccgaactgaaactgggcattgaccgtatcgccgcgatccacctgaaagacacccagccagtcaccgggcaaagtcccggacagttccgcgacgtgccgtttggcgaaggctgcgtcgatttcgttggcatcttcaaaacgctgcataaactgaactatcgcggttctttcctgattgagatgtggaccgaaaaagccaaagagccggtgctggagattattcaggcgcggcgttggattgaagcgcaggtccctatgttcacggcaacagaggcagtcccggtagcaaaagtggtggcaggaaataagcgttatcccggcgtcgttgcgctggataacgttaacttcacgctcaataaaggcgaagttcgtgcgctgttaggtaaaaacggcgcgggcaaatcgactctcattcgaatgcttaccggcagcgaacgcccggatagcggtgatatctggattggcgagacgcgactggaaggtgacgaagctacgctgactcgccgtgccgctgaactgggggtgcgcgcggtttatcaggagttaagtctggtggaagggctgacagtggcggaaaacctctgcctcggtcagtggccccgccgcaacggcatgattgatcacctgcaaatggcgcaggatgcccaacgttgcttacaggcgctgggcgttgacgttagtcttgaacaattggggatcctctatagtgtactataa

SEQ ID NO: 139214 - DNA, 639 bp, Homo sapiens
atggccgcgccagccccgatcagcgcctatctccacgccggatcgatggtgaaagtgggcgttaacatttttgcccgcgctatgatcgacggcggcaatatcccgcatgtgattggcggcgttggcatggtcatggcactgccagagcaggatatgaagcggttgctagcctggtcgaccatcactcaacgtaggctggatgtactatcggcttggtcggtctccatcttacggctcggcggcatggcgctggagggcagcatcgcctacatcgtaataaacttctgtgatgttaagccacagagatttcggggcttatctgttccagcagccagcattaccgtagtgcttatccagcagttcgttttgcatcgcagggagctgcggcgcaagctggcgcttcccgctcaccatctggtgacgttcacctggggcaatgtcagcgcggtagacgaaacgcggcaatggatggtaatcaaaccttccggcgtcgagtacgacgtgatgaccgccgacgatatggtggtggttgagatagccagcggtaaggtggtggaaggcagcaaaaaaccctcttccgatacaccaacgcatctggcgctctaccgtcgctatgccgaaattggcggtattgtgcat

SEQ ID NO: 139215 - DNA, 3028 bp, Homo sapiens; identical to SEQ ID NO: 132545

SEQ ID NO: 139216 - DNA, 1662 bp, Homo sapiens
atgtcggtggatgaaaccgacgaacggctctcacgtcttgactggagcgccgcacaaaggacttcgctggttgccgcgatgatcgaaacaggtgttgggatcccgtcgatgtgcctgtccgcacatcgtcgctttccctttggtagccgtgacgaggcagtgcgcgaacgggcgcgggaaatcatgagtaaagcgattcgcctggcgcgcgatctcggcattcgcaccatccagctggcaggttatgacgtctattacgaagaccacgacgaaggcacccggcaacgttttgctgaagggctggcgtgggcagtcgaacaggcggcggcatcacaagtaatgctggcggtggagattatggataccgcgtttatgaactccatcagcaaatggaaaaaatgggacgagatgctcgcctcaccgtggttcaccgtctacccggacgtcggcaacctcagcgcctggggcaatgatgttcccgccgaactgaaactgggcattgaccgtatcgccgcgatccacctgaaagacacccagccagtcaccgggcaaagtcccggacagttccgcgacgtgccgtttggcgaaggctgcgtcgatttcgttggcatcttcaaaacgctgcataaactgacactcctggctaaatacaaaagcttgcaatgggacaaagtactgaggctggaggaggtgcaggctaaactagggattagtctagaagaaatgctgttggtcacagaagatgcccttcatcctgaaccctataaccctgaggagatctgcaggtgtctgggaattagcctggaggaactccgaacccaaatcctgagtccaaacactcaagatgacgtatttccaccggtgatcggggttgctgcccataaaggtggcgtttacaaaacctcagtttctgttcatcttgctcaggatctggctctgaaggggctacgtgttttgctcgtggaaggtaacgacccccagggaacagcctcaatgtatcacggatgggtaccagatcttcatattcatgcagaagacactctcctgcctttctatcttggggaaaaggacgatgtcacttatgcaataaagcccacttgctggccggggcttgacattattccttcctgtctggctctgcaccgtattgaaactgagttaatgggcaaatttgatgaaggtaaactgcccaccgatccacacctgatgctccgactggccattgaaactgttgctcatgactatgatgtcatagttattgacagcgcgcctaacctgggtatcggcacgattaatgtcgtatgtgctgctgatgtgctgattgttcccacgcctgctgagttgtttgactacacctccgcactgcagtttttcgatatgcttcgtgatctgctcaagaacgttgatcttaaagggttcgagcctgatgtacgtattttgcttaccaaatacagcaatagtaatggctctcagtccccgtggatggaggagcaaattcgggatgcctggggaagcatggttctaaaaaatgttgtacgtgaaacggatgaagttggtaaaggtcagatccggatgagaactgtttttgaacaggccattgatcaacgctcttcaactggcagtgttgttcatagtactttctgtgacaatggaaatgtctga

SEQ ID NO: 139217 - DNA, 749 bp, Homo sapiens
ttatggaagcagaacaaaggggcccatttccacctccccccaggctgctgtaggatgcagaggaggacagtggggcagggagggaagggcccaggacaaggccatctttgtttccgtgttgttcctccctgaggcctctgcaaggaaagccaagtccgaagtcaaaagacgccacttttcttccactctctctctgcagaagccttcatcctctcattcactcaacaggtatttatggagctccagggtaccaggctgtgggccaggggcttccactgtgagagttacctaaagctcggcatccgtgatggtctacggggcttccgaggcgatcgggcagcatcagccttcagccgctaagccgagaagatctgggaaggagtcagtcagagagccttgggccagagttccaggggctctgggagtggctgccagggtctagggctgtgaagcatctcagggttatatttgatgaaaaagagcctaaacgctatctgatttgggataaagaaaaaggagcattaaccttgactatgcctttggctccagccacctttttaagagtaaattgctgggcaggtgggggagggctagtcacggaacgaaactgtaagcccgaccagaaaatgaaaggaattgaaattaagagaagggagagattgaagtgtggctccaagattgaaaggagaaagaggttgagggatagtgagggaggttggagaagagtagaggccgcttaccggatttga

SEQ ID NO: 139218 - DNA, 3331 bp, Homo sapiens
  misc_feature (1)...(3331): n = a,t,c or g
atgccgcatcgacaacacggtccacagatgacaccgagtcatcaacgcacgactataaaccgcgaccagcgggaacagcagcccatcggcacagcggcaccacagaccagaccacaatccgcgccctattgtgaacctcacacccggagaaggacactgcagccacacaacagaggcttcagaaccgcgaagtacacgagcacccaagccagaaagtaccacatggctcgaccagagcggagcaacgacagcgaccacccagtacacacaaggagccgatggaatgcgacacaaacagaacgacacacacagcaccacgtctcgccgccttcgtccctacgcacgctcagaaccaactgcacgtcacacgcacaccaccgatatcatcgccatgcacagtggcaccgagtaggccttttggacgtaaagccaaccggagtcccctccaacacggtgttctccccgccgaaaaacgccctttgggcggaccgggtggacacctcaaggggccgaaccactgtagagcaggacaaccaccctaacggaggcaacgtggtggggactccaagcgacaacaacttttggctagagacaacagggggggaccctaataaagagtattatcaccaccaccattacaatgaagattattgccggtattaccccctgctgatagcggaaccgctgcttttcccaagcctgtcgataaaagaaaacatcctgtttgggctggcaaaaaaacagctctccatgcagaaaatgaagaacttgctggcggcgctgggctgccagtttgatctgcatagtctggcaggatcgctggatgtcgccgatcgccaaatggtggaaatcctccgcgggctgatgcgcgactcgcggattctgatcctcgatgaacctaccgcctcgcttacccctgcggaaaccgaacgcttgtttagtcgcttgcaagagctgcttgctactggcgtgggtattgtttttatctcgcataagctgccggaaattcgccagattgccgatcgaattagcgtgatgcgcgacggaaccatcgccttaagcggcaaaaccagcgaactgtctaccgacgacattattcaggccatcaccccagcggtacgggaaaaatcgctctctgccagccaaaaattatggctggagttacctggtaaccgcccacaacatgccgccggaacgccggtgctgacactggaaaatctgaccggcgaaggtttcaggaatgtcagcctgacgctcaatgccggagaaattctgggcctggctgggctggtggggaccaggacgcacagaactggccgagacgctctatggtctgcgtactttgcgtggcggacgcattatgctgaatggtaaagagatcaataaattatccactggagaacgtttactgcgcggtctggtttatctgccggaagatcgccagtcatccggactgaatctcgatgcttcgctggcctggaacgtctgcgcccttactcataaccttcgtggattctgggcgaaaaccgcgaaagataatgccaccctggaacgttatcgtcgggcgctgaatattaaattcaaccaaccggaacaagctgcacggacattatccggtggcaaccagcaaaaaatcctcattgccaaatgcttggaagcttcgccgcaagtattgattgtcgatgagccgacgcgcggcgtggatgtctcggcccaactagtaaatgtcgcggttgccctaccgagcgactacggtcagagtcggctcaaggacggcagtcagtgcgtggaaggttgtatgcgagtcaagaatcgatgcaaaatctacggacaactgactgggcggatggctggcgtgcatggtttaggcttgaccctgggtgttcgtcagaccggcacacaaggggacggacttaccttccactgtgagagttacctaaagctcggcatccgtgatggtctacggtgcttccgagtgatcaggcagcatcagtttcagccgctaagccaagaagaagtcagtcagagagccttgggccagagttccagcggctctgggagtggctgccaggcgcggcaaatccggcgcaagtggctggcgatttccatgcgcaaatcgacgctatctggggaggtgcgcgtgcgtaatcatcagttagggatttatgaaaaagcgctggcgaaagatctctcctggccggagcggctggtgctggcaaaaagctgcggttttgattttgtcgaaatgtcggtggatgaaaccgacgaacggctctcacgtcttgactggagcgccgcacaaaggacttcgctggttgccgcgatgatcgaaacaggtgttgggatcccgtcgatgtgcctgtccgcacatcgtcgctttccctttggtagccgtgacgaggcagtgcgcgaacgggcgcgggccatcatgagtaaagcgattcgcctggcgcgcgatctcggcattcgcaccatccagctggcaggttatgacgtctattacgaagaccacgacgaaggctacccggcaacgtttgctgaagggctggcgtggcagtcgcacaggcgctggcatcacaacaaatggacagaatggcacgagatgctcgcctcaccgtggttcaccgtctacccggacgtcggcaacctcagcgcctggggcaatgatgttcccgccgaactgaaactgggcattgaccgtatcgccgcgatccacctgaaagacacccagccagtcaccgggcaaagtcccggacagttccgcgacgtgcccgcggtagacgaaacgcggcaatggatggtaatcaaaccttccggcgtcgagtacgacgtgatgaccgccgacgatatggtggtggttgagatagccagcggtaaggtggtggaaggcagcaaaaaaccctcttccgatacaccaacgcatctggcgctctaccgtcgctatgccgaaattggcggtattgtgcatacccactcgcgccacgccaccatctggtcacaggccgggctggatctccccgcctggggcaccacccacgccgattatttttacggtgccatcccctgcacgcgacagatgaccgcagaggagattaacggcgaatatgaatatcagaccggcgaagtgatcattgaaaccttcgaagaacgtggcaggagtccggcacaaatcccggcggtgctggtgcattctcacggnccgttcgcatggggtaaaaacgccgccgatgccgtgcataacgccgtagtactcgaagaatgcgcctatatgggtctattctcgcgccagcttgcgccgcaggtccctgcgatgcaaacgaactgttggtaa

SEQ ID NO: 139219 - DNA, 2505 bp, Homo sapiens
atgctcaccatcactggccatcaagaaatgaaaatcgaaaccacagtgagataccatctcacaccagttagatggcaatcattaaaaagtcaggaagcacaggtgctggagaggatgtggaaaataggaacacctttacactgttggtgggactgtaaactagttcaaccttgtggaagtcagtgtggcgatttctcaggccgcgagcgcgggctgctggcaccaattactgacgtggttaaacgtgggctctgtatattggctggagcgcaggcgctaaccttgcttgcccaactatcgtaccaccaacgatatgccgattgtcgatccgcaaggtttcgatgcgtaaatctgttcccgctgcaaatcaacccgcacttcaccaacgcgctgccgaaggccataaaggtgaaacccgtgagcagcgtattcgcgaactgctggcgtcgcgccagaactgacgattattggtctaccggaaggattcacaatattaatactgtcccgtccttcatcttcatccggctgttccagcacactgtaagccaccaacaaaacagcgagttcaggcgctgcatatctcccagcgatcgagtgggcgtgggaatagcggcgattaagaatgcgaaaacgatgtttgctggacgcaaacgacgagcgctgcatgaacaggcaacgtacaacgttgtagaagacgtgggaattagatacaggaaaaggatgacagagtacgaacttcgagctctgtacctcatctacaatcttggcggggctgaactcccgctgagtaacaccgtgccaccggagaaaaccgaggcacgcaacgcaaaatattacaattctgataattcgcccgttcttgccgcacgcacgggcggtattctcacgcattcaagtctgaatggttccagcacctccatgcactgcagaacaggccgaatggctgattcattcttaccgcagcgcgggttcgaggttaagaaagctctcagtctcgactatcggcactgtggcctaatggcgattaccatcacactgaaacagtcattaccgttatggtaccggcgcaatggtgttgtgctggcactgcgacaaccactgcgtgaccagacatcggaatcactggagctgcttgctcaacaaaatcgacagcatggaagatcggcattacgccccacgacccaggcggcacccggactggccatctttccagcagcgtataggtgtcgatgcctaaacgttcggcaatcagttttcttcggcacagaaagcatcgcggaaccagcgcatggagaaagaatatcggcacgtagccagccatatccagcaatgcaggtttccagtcacgggtggttagatcaaaagtcccgtggtgccagcgttagagggatccaccggcagttcgccgctggccggggtttgcagaatggcgtatttccggactatccagccaggcattcagtttattctgccgctaaattggcgctctctggcggccattacgcgttgtttaacggtggcgctgtttctcccggcactaccgttttactcaaaatgccggggggtggtaatggatctccagtgagagatcgaagcggtcgagaaagggccccgagagccgggctgggattcatcgccgcaacaagctggaaacgggcggataggttatttttgctcgtgtgcgtgaaagatggatctgcccggattaatcggctctcgcaaggcatccagtgtacgccgttcaaattcagctccggcagcgtatgcgcgtggtggtcaacgggctttggtaatcaagcgttttcgcaggtgaataagaatcagcatatccagtccttgcaggaaatttatgccgactttagcaaaaatgagaatgagttgatcgatagttgtgattactcctgcgaaacatatcccacgcgtccggagaaagctggcgaccgatatccggataacgcaatgatcaaacaccgggcgcacgccgagtttacgctggcaaaatcactgcaatggtatgaaccacaggcgagagcagtaaaatggcggtcaaattggaatagccatgcaggccattatgatatctgccagttgccacatcagcggaggcttagcaaggtgccgccgatgaccgttgcgaaggcgggattcatacagcggccagacatccgtcatccatatcaccacgcaaagggtgacagcaggctcataagacgccccagcgtcgccatagtgcgtcaccgaatacgtgcgcaacaaccgtcttccggagactgtcatacgcgtaaacagccagcgctggcgcgatttagccccgacatagccccactgttcgccatttccgcgcagacgatgacgtcactgcccggctgtatgcgcgagaatgcgccgcagagactcatcgcggctgatccttttagggattcgttaaactgcgcatcaatgctgatgccaatttcagggcaatctgctgccacgcctggaaatgcagatgcgcggtatcggtga

SEQ ID NO: 139220 - DNA, 1745 bp, Homo sapiens
atgaccgatctggttttccgtattgtaagcattagaagcaaggtccagcttgcaccaaaggaaagttcatcctttgtccgctgcatttttgcgagcatcattccaccgccagaacaactcaacttcacttgcacaaataaacaggaatcagccactaaaattcacgaattagcgggctacagcagcgatatcttatgcacataatggtgactcaaggagggcttatgtcactgtcaattgttcatacccgcgcagccctgggagtaaatgcgcccccgatcactgttgaggtacatatcagtaaaggtctacccggcttaacgatggtgggcttaccagaaacaacggtaaaagaagctcgcgatcgcgtggcagcgccattatcaatagcggatatgaatatccggcgaaaaaaatcaccatcaacctggctccagctgatctgccaaaagaagggggacgatatgatttacctatcgccattgcgttgctggcggcctcagaacagcttacagccaataagttagatgaatatgaattagtcggagaactggcgcttacaggcgctctgcgcggcgttcccggcgcaatctccagtgcaactgaagctattaagtcgggcagaaaaattatcgtcgcgaaagataacgaagatgaagtggggctaattaacggtgaaggatgcctgatagccgatcatctgcaagctgtctgtgcgtttctggaaggtaagcacgctctcgaacgcccgaaaccaactgatgcagtatcccgggcgctacaacatgatctcagtgatgttatcggtcaaggaacaaggaaagcgagtactggaaattaccgctgctgccgggcacaaccttttactgattggtccgccgggaacaggtaaaacaatgctcgccagccgtattaatggcctgttgccagatttaagcaatgaagaggcactggagagtgctgcgatattaagtctggtaaatgctgaatcagtacaaaaactatggcggcagcgcccgttccgctcacctcatcacagtgcatcgttaactgcgatggtaggcggtggcgcaattccagggcccggtgaaatttcgctggcgcataacggcgtgctttttcttgatgagctacctgaatttgaacggcgtacactggatgccttgcgagagccgattgaatccgggcagatccatctttcacgcacacgagcaaaaataacctatccagcccgtttccagcttgttgcggcgatgaatcccagccctaccggacattatcagggaaaccataaccgctgcacgccagaacagacattacgttatctcaaccggctctcggggccctttctcgaccgcttcgatctctcactggagatcccattaccaccccccggcattttgagtaaaacggtagtgccgggagaaagcagcgccaccgttaaacaacgcgtaatggccgccagagagcgccaatttaagcggcagaataaactgaatgcctggctggatagtccggaaatacgccaattctgcaaacttgagagcgaagatgcgatgtggttggaaggaacactgatccatctggggttatcgattcgtgcctggcagcggttattgaaagttgcacgaaccattgctgatattgatcagtctgacattatcacaccaacgtattgcgggaaagcagacgcaagaaatagcggcaatgtctgtccgtccagtcgagcattggtgcaacgctaa

SEQ ID NO: 139221 - DNA, 503 bp, Homo sapiens
ctcgccagaagcttacgcaaaaaacgcccgtatgtgctggttggtgcattcgttgtcgggtgttgctgacgccgccggatgtcttctcgcaaacgctgttggcgatcccatgtactgtctgtttgaaatcggtgtcttcttctcacgcttttacgttgtaaagggcgaaatcgggaagaggaaaacgacgctgaagcagaaagcgaaaaactgaagaataaattcaaccgcccgtcagggcggttgtcatatggagacaggatgtttgatatcggcgttaatttgaccagttcgcaatttgcgaagaccgtgatgatgttgtagcgtgcgcggttgggtttgcgatgaacgaccggactggagctgcgggaacttttgccgttgattccggcggaaaaattatgatcgaaactgatgcgccgtatctgctccctcgcgatctcagcgccaagccatcgactagtcggtaccactgcgtgattgaagcgcgagcgtggtttaag

SEQ ID NO: 139222 - DNA, 407 bp, Homo sapiens
ctggttatgcaccagctatagggtatgtgcatacaggaaagcctctttcctttgtttacgatattgcagacatcattaaatttgacactgtagtaccgaaagcttttgagatagcgcgtcgtaaccctgggatatttttcgcaggtagtaaaacattagcccaattgattccgcttatagaggacgtgcttgccgctggagacataaaactgcgggcccacctgaagatgacagcctgttgcatccggtcctgttcatgggagatgcggcatcgaagtgtgaatgagatatggccgcgcactgaaatgtctccgggtaaaagcgatatcctagttgttgagtacgcaagggtaaaagggagtccgaaacatagaagatcgaaaaaaaacgacacgaaaggacagtga

SEQ ID NO: 139223 - DNA, 1266 bp, Homo sapiens
atgtttgatatcggcgttaatttgaccagttcgcaatttgcgaaagaccgtgatgatgttgtagcgtgcgcttttgacgcgggagttaatgggctactcatcaccggcactaacctgcgtgaaagccagcaggcgcaaaagctggcgcgtcagtattcgtcctgttggtcaacggcgggcgtacattctcacgacagcagccagtggcaagctgcgactgaagaagcgattattgagctggccgcgcagccagaagtggtggcgattggtgaatgtggtctcgactttaaccgcaacttttcgacgccggaagagcaagaacgcgcttttgttgcccagctacgcattggcgcagatttaaacatgccggtatttatgcactgtcgcgatgcccacgagcggtttatgacattgctggagccccagatggtcgaaaactacgaaacgctgattttcgaagcgcactctaccgattatcaaacgccgcaatcgctgcgccagctggtgattgaccactttgccattctgaaagttggcccagcgctgaccttcgccctgcgtgaagctctgttctctctggcggcgattgaagaagaactggtgccagcgaaagcctgttctggtctgcgtcaggtgctggaagacgtgatgctcgaccgcccggaatactggcaaagccactaccacggtgacggcaacgcgcgtcgtctggcgcgtggttatagctactcggatcgcgtgcgctattactggccggacagccagattgatgacgctttcgctcatctggtacgtaatctggcggattcaccaattccgctgccgctgatcagccagtatctgccgctgcagtacgtgaaagttcgctccggcgagctgcagccaacgccacgggaactcattatcaaccatattcaggacatcctggcgcataccacacagcctgtgaaggccaataagcaaaacaaagaggaacacgctatgccaaatattgttttaagccggattgatgaacgcttgattcacggtcaggtcggcgttcaatgggtcggatttgcgggggcaaatctggtgctggtagccaacgatgaggttgccgaagatccggtacaacaaaacctgatggaaatggtactggcagaagggatcgccgtacgtttctggacgctgcaaaaagttatcgacaacattcatcgcgccgccgatcgacagaaaatcctgctggtttgtaaaacacccgccgatttcctgacgctggtgctttga

SEQ ID NO: 139224 - DNA, 753 bp, Homo sapiens
ttattcttcagttttttcgctttctgcttcagcgtcgttttcctcttcccgatttcgccctttaccaacgtaaaagcgtgagaagaagacaccgatttcaaacagacagtacatcgggatcgccaacagcgtttgcgagaagacatccggcggcgtcagcaacatcccgacaacgaatgcaccaaccagcacatacgggcgttttttgcgtaagtcttctggcgaggtaatccccatccagcacagcagcacaattgctaccggcacttcaaaggagacaccaaacgccataaacagcgccataacgaagcttaaatagctggcgatgtcggtggaaacctgcaccccttccggcgcggtattggcaaggaagccaaatgccagcggaaagaccacaaaaggggatctgttcggtctgggatactgtatcgtgtacagcacggttgtcgtttctttggttgcttcgcagtgtttatcgtctcgtatggtctggtgtttcgcctcttgtgtattgttcgtgtcagtttggtttggtgcttgtttgtgtcttctgttatttgatttgtttttcgtctttttgtcatatactgttttctctgtgtctttgtgtttcatctgcgtgtgtggtgtatttttagtgtgctttgccttctgggtgtggtgatttgtgtatgttccgtgggtatattgcgttcgttcgtctgtacgtgcgttgagattcgcatctatatccgggtggctacgcgcgcacat

SEQ ID NO: 139225 - DNA, 1161 bp, Homo sapiens
atgattcctcatccgaagctggaaggggatagatcaacccaagcattgcccccaactccggttatacgggttactgaacggcgaaacttgaactgggtaggcaccactattgggtttgtgcatacaggaaagcctctttcctttgtttacgatatggcagacatcattaaatttgacactgttgtaccgaaagcttttgagatagcgcgtcgtaaccctggtgagccggaccgggaagtccgtttggcgtgcagggatatttttcgcagtagtaaaacattagccaaattgattccgcttatagaggacgtgcttgccgctggagaaatacaaccgccggccccacctgaagatgcacagcctgttgccattccgcttcctgtttcactgggagatgcaggccatcggagaaggcggtctggtcgggtgtcggaagtaagctggcgttcaggcgtcatgagtttccgccgcgccagcggggataaaccgcagccgaagccaaaggtgatgccagaacacgctgagtgtccgcctgctgccaggcgaggccaaatgatgagtatatgtccgtgtttcgcattgaagattgatatcgccgataacaaatttttcaacggcgaaacatcaccgctcttttcgcaaagccaggccaaactggcgcgccagttccaccagaaaatagctggttatcgcccaacaccgctttgtgcgctggacgatctcgcaaacctttttggtgtgaagaaaattctcgtcaaagacgaatcaaaacgattcggtctgaacgccttcaaaatgcttggcgcacctgaaaaatgccatcggcgaaaaaatgactttcgcgaccaccaccgacggcaaccacgggcgcggtgtggcgtgggcagcacagcaactcggacagaatgcggtgattacatgccgaaaggttctgctcaggaacgcgttgacgccattctgaacctcggtgccgagtgcatcgtcacggatatgaactatgacgataccgttcgcctgaccatgcaacacgcgcagcagcacggcggggaagggggacaggacacggcatgggaaggttacaccaaaatcccaaccgggatcatgcaaggcgacgcaactctggcagatgaagccgtcgagcaatgcgtgagggatccttag

SEQ ID NO: 139226 - DNA, 2019 bp, Homo sapiens
  misc_feature (1)...(2019): n = a,t,c or g
atgtgtgacggcggtgtgtacagccaaaggaacgtggtcacctcaaagacaccatcatacactaaatcattattagattttcaatttcatcagaataacgacagttttaccgctacattgttcaacaacgtcttagttttaacccatagcaaagataatccttgtttatggattggctcaggtatagcggatatcgatatgttccgcggtaatttcagcattaaagataaactacaggagaaaattgcgcttaccgacgccatcgtcagccagtcaccggatggttggttaattcatttcagccgtggttctgacattagcgccacgctgaatatctctgccgacgatcaggggcgtttattgctggaactacaaaacgacaaccttaaccacaaccgtatctggctgcgccttgccgctcaaccagaggaccatatctacggctgcggcgaacagttttcctacttcgatctgcgtggcaaaccgttcccgctatggaccagtgaacaangccgatccgccggtagcgtgacaattacccttaccttccagtccgggaccgatcctgatatcgcgcaagtgcaggtggagaacaaactccagctcgccacgccgttgctgccgcaggaggttcagcagcaggggatcagtgttgaaaagtccagtagcagctatttgatggtggcgggctttgtctctgataacccaggcaccacacaggacgatatctcggactatgtggcctctaacgttaaagatacgcttagccgtctgaatggcgtcggtgacgtacagcttttcggcgcacagtatgcgatgcgtatctggctggatgccgatctgctaaacaaatataaactgacaccggttgatgtgattaaccagttgaaggtacagaacgatcagatcgctgccggacagttgggcggaacgccagcgttaccagggcaacaattgaacgcctcgattattgctcagacgcggtttaaaaatccggaagaattcggcaaagtgaccctgcgcgtaaacagtgacggctcggtggtacgcctgaaagatgtcgcacgggttgaacttggcggtgaaaactataacgttatcgctcgtatcaacggaaaaccggcggcgggcctggggattaagctggcaaccggcgcgaatgctctcgataccgcgaaagccattaaggcaaaactggcggaattacagccattcttcccgcagggaatgaaggttctctacccttatgacaccacgccattcgtccagctttctattcacgaagtggtaaaaacgctgttcgaagccattatgctggtgttcctggtgatgtatctgttcttgcagaatatgcgagcaacgctgatccccaccattgcggtacccgtggtgttgttagggacgtttgccatcctcgccgcttttggttactccatcaacacactaacgatgttcgggatggtgcttgccatcgggctgctcgtcgatgatgcgatagtggtggtggagaacgtcgagcgcgtgatgatggaggataagctcccgccaaaagaagcgacggaaaaatcgatgtcgcaaattcagggcgcactggtgggtatcgcgatggtgctgtcagcggtatttattccgatggcattcttcggcggttctactggggcaatttatcgccagttctctatcaccatcgtttcggcaatggcgctttctgttctggtggcattgattcttacccctgcgttatgtgcaacgctgcttaaacccgtctctgctgagcatcacgaaaataagggcggtttcttcggttggtttaataccaccttcgatcatagcgttaaccactacaccaacagcgtcggcaaaatcctcggatccacaggacgatatttactgatctatgtgaatcagctcggtaccaaagagatcgtgcatagcggtaaatttattcgacaacagcagccagatagcaaaatcacgcagcagccagacggtaaaactcgccgccgccactgccggtaa

SEQ ID NO: 139227 - DNA, 1482 bp, Homo sapiens
atggactggtggcgctatgtcgcgcatctgcaagcagaccgtgccagaaatgatcgttatgtcaacacctgcttctgtgaatacacttctcacggtcactgcggtgtgctgtggagcatggcgtcgaccacgacgcgactctcggaaaattcaggcagcgagcgtggttgccgctgctgcccgtgcccactttgttgcttaaattatgagcccgttggcggcgatatatatatgaggaatcagttaagggcatcatttaaaatttacggcgcgcgacgaaccgatgatcaccttgctcgacaatttgcttcccgagaatggttggtgttccacttattttcggcttcgggcaaatccgatcaaaactattctcgacaatcaaagcgcctggacagtaaagggaatattaaacgctgtcgggttccgttaataaagaagcagaacaaatcgcgtggttgcaacatcgatgtaatagaggcgcgtttgtacttatcgacaagacagggatccgcactcatattcctgtggctcggttgcctgcatcatgctggaacctggtacacgggtttcgcatcagctgtacgcctggctgcgcaagttggaacattgttggtatgggtggggaagcgggcgttcgtgtttatgcttctggtcagcctggagcataaaaacaacgcacgagaagaaagacgcgaccacacgaaaacacaacacaacacagaccgcgacaaagcaacagggatattacggtttctgttatcacgccgggagccacttctcgctgcacggaatgttgtgttcaagagccgtctgttccaacatccgtatcaggcgagaggcgtgattaatccggccagcgttccccgaccatgccaccagataaacggcgatatcaagctccatagtactgatagctccgctacaccgagcagggcagtacagcctagacgatcgtctagtgcttactgcacaccagatcgtttgccaggagttgcggcgggttatacagagtgcaggcgtaccgacctgaatgcccatccgtatagcgtcgtctttgtctttgcaccaatatcaatccacatttgtcgacagaaggtgactgcgtgcgctgtcgcctttggcaaagtggtaggacttaatgccgatacaccccatgactggcctttgtccccggtgagggtgacgatggaaccagccatagtgacctggcaggaccgcttacgcgttcaaagcgtaaaatccagacggctctattttcgcaccataaaaccgacttcatccatatgcgcaaaaatcatcagtcgcacgcatcgggtttatcactaccgtagcgcgcgacgacattcccaagcctgctcgccagacctcttttgcctgacgcctgaattcgcacagcatgacgtcgcgacagcgttttcgtgtcctgaaatcgcattgtgctgcaaaagcgagacagggtttcctgcacagaaaatgacatag

SEQ ID NO: 139228 - DNA, 1613 bp, Homo sapiens
tcttgcaaacgtttttcattgagtgtgtaaatgaatcccatcgtcaatgcagcaataattgccagtgcacaaggccagataaaaatgagctgacgcaaaccctgtaatgtcgcatcgctttgcgcgatgttgggaacataaccaatttgcgtcagcataatgcctggcaagaagccagcaagtgcggcagaaattttacgaaagaaggtataaccggtataaacagaaccttcggcacgaataccggttttccattcaccgtaatctacggtatctggtaccagtgcccagttcaggctgtttacaaaggccgtgccaaaaaaggcgacacaagagaacatgacgaaagtgaaagagttacttccccagaaataattcagtatatcacccaccgcccacagcaccatgccagccagataaacctgttttttaccaaaacattttacagttaatggcaccagtaatacgccgatgaggatgcatcccatactgaagaatcccatccacgacaataaattaatatcattcagcacatactgggtgtaatagacctgaatcgccagtttgatattaaatgccgccagggtacacaagttagcaatgcataaaaccagcaatggcggattccgaaatatcgcgcaaaatgatttgagaatactggctttatgtccggttggcgttgtgtccacataatgctctttgacgcctctggcaggccgactgcaaagaaaatgcgggctggcgactattactggactttcttcccacagcctacgtttgtcagcacgcagaagtattactgccatgttgataacagttgctatatgaacttcgactttagtgccccggaataccatgcacactggcgctacggtctgttgatggtgggtgagagtcaacatggactgggtgcgaacgccatccaggctagccagtgtttcaaagctgccaaccagcccctgggtgctgatgccacgtttcttcaacagatcaaaggagaaatcatctgcttcggactctttatcacgggagtatttagcattgatagcgccttctgcgatatcacctaattgtgagcgggaaagctgggaagccacaccgctggtagctgaaatggcatcgcgtgcggcaacgatcgcataagaagctttcatttcagccagcgagtgacccaacgcgacgtggcccagttcatggcccagaacgccttcaatttcgttgtcattcatcatgtccatcaggccactgtagacacgaacacagccgttcgccatcgcccatgcgttgacgtcgctggtcatataaaccttatagttgaccggcgtgccattaatattgttacccaatgctttggcgatttttgccagacgtttaccgtacttgctggatttacttgcgacttgattgccgctgtccatttcggcacagccctgattggcaatcgcttttgcatcggcatcgcttaatgttgctgctttataggcatttaaaccggagctgatagccatattggtatcaataccgtgggtattttgacaccctgtcagtaatgctgcagaggtcgcaatcgccagcagtaatttagtattcttcatgtgaatcatccgttgcat

SEQ ID NO: 139229 - DNA, 2661 bp, Homo sapiens
atggcccgcgtatggctgtgcgattttatcccatatggctacctgcccaccctgaacgctatgcctgagtccacccgtaaacagattatgccctggacccgcctgagcggtagcttgcacacttggaaccgcacgccaaacagacgaatcggcagatacccatccggcctccctcccgattcggcgaaccggccccgcagggaaccagacgcatgccggtccttgcacagcccagcaaagtaccgaggtaaccccaaccgggacaggctggaccatcagcagaacggactcccagctcgagggaaagatacgcccagatccaacaagccatccataagccagtggaccaacacgaaaccacagccgcggcaccaaccgcgaggcaaaaaaggccacaaatcaccggccccggaaatgcccaaacccccacaagccacgtcgtcaacacgagaacaaaccaagtacggggcggcagaattatggcgtagcccatggaagacgcgttacattgaactgaaagctcgtggaccaatggcctgtgtgacaatttcgttaaacgtttgttgtgcccaccttgtgcgcctggtcatggtcactctaaagcagacggatcccattcgaaaccttggcgaaatgccgtcaaaatcgcaaaccaaaaaagcacgggaggttcatttgcactctttgcacttgcaggagctggcacaggagcaggagccccctgcaaggaagagaaaaacgcagtgggcagtgagtgagaggaagaaggccgatcatacccgggccaatcatcagcactgcacccagcgttacgaccatcttacgggaaacgatcaggttcacaccaaaccaacgctggaacagcggcggcaggtaaccaccgaggatacaaccgaggtcagcaaacagcatcggcatccaggcgaacatcgcgatctctttcaggttaaagccgtaaactttaaacatgaacagcgggatccacgcgttaaaagtaccccaggccggttctggggtatcgcgctgccgcgtttcctggcagaaccggcctggggcaagccggactggaaaaagctgcataactatccgcagccgcgcctgaccgccgaagagcaagcgtttctcgacggcccggtagaagaagcctgccggatggcgaatgatttccagatcacccatgagctggcggatctgccgccggagttgtgggcgtaccttaaagagcatcgtttcttcgcgatgatcatcaaaaaagagtacggcgggctggagttctcggcttatgcccagtctcgcgtgctgcaaaaactctccggcgtgagcgggatcctggcgattaccgtcggcgtgccaaactcattaggcccgggcgaactgttgcaacattacggcactgacgagcagaaagatcactatctgccgcgtctggcgcgtggtcaggagatcccctgctttgcactgaccagcccggaagcgggttccgatgcgggcgcgattccggacaccgggattgtctgcatgggcgaatggcagggccagcaggtgctggggatgcgtctgacctggaacaaacgctacattacgctggcaccgattgcgaccgtgcttgggctggcgtttaaactctccgacccggaaaaattactcggcggtgcagaagatttaggcattacctgtgcgctgatcccaaccaccacgccgggcgtggaaattggtcgtcgccacttcccgctgaacgtaccgttccagaacggaccgacgcgcggtaaagatgtcttcgtgccgatcgattacatcatcggcgggccgaaaatggccgggcaaggctggcggatgctggtggagtgcctctcggcccagccagaagctgcgaactttgttgctaccgacgtgaccgatatgtttgaacaacagtttatcgaacgcgttgacgtcattgttcttcgccgcttccatctcttccagcacgtacggatggcaacgaatcgctccttgtccgaagatcatcatgctgcgggtcagaatgttagccccttcaacggtgatggcaatcggtgcgccctggtaagcacgcgccaggaagttgctttgcccgagcataatgcctttaccgccggtaatatccatcgcatcaataatcgactgctgcccgcgcaaggaaacgcctggttcttcatccccagcgccatcttacttggtgcgcttcatggcctggaaccagggcactcaaaaacgatgatggcggcgtttatcatcgccatcaaaggcaccattaaacaagcggtgatgctcggactggcagcaactatttcgcataccgcagtggtctggttaattgcctttggcgggatggtgatcagcaagcgctttactgctcaatcagcagaaccgtggctccagctgatttccgcagtgatcattattagcaccgcgttctggatgttctggcgtacctggcgcggcgaacgcaactggctggagaatatgcacgggcatgattatgagcatcatcatcacgatcacgaacatcaccacgaccatggacatcatcaccatcacgaacatggcgagtatcaggatgcccatgcacgagcccatgccaatgacattaaacgacgctttgatgtagagagtcaccacctgcaatttcgttcgttctag

SEQ ID NO: 139230 - DNA, 356 bp, Homo sapiens
aggctttcaggccattttcaccgaacccgatggtgaggctcgctccatgctattgcttaatcttattaataaagagattaagcacagtgtgaagaataccgagttccgcaaactctaaaacgcaatcccaaacagtgttttgacattagcatccgtggtggcagccagccatgcggcatcttctccacgccagtgcgcaatacgttgcaaaatatggggcagatgggctggctcgttgcgccgggatgatggctttggcgtgagatccgcaagcacaatcgctggtgtgcctgcccacgcaaacccggacgggctggaatctcaatggctttgaggtggggttcaggccatgcgtc

SEQ ID NO: 139231 - DNA, 2635 bp, Homo sapiens
atgaacaaatcagggaaatacctcgtctggacagtgctctctataatgggagcatttgctctgggatacattgctttaaatcgtggggaacagatcaacgcgctgtggattgtggtggcgtcggtctgtatctatctgatcgcttaccgtttttatgggctgtatatcgccaaaaatgtgctggcggttgacccgacgcgtatgacgccagcggtgcgccataacgacgggctggactatgtgccgacggacaagaaagtgctgttcggtcaccattttgcggccattgccggagcaggtccgctggtggggccggtactggcggcgcaaatgggctacctgccggggatgatctggctgctcgctggggtggttctcgccggtgcggtgcaggatttcatggtgctgtttgtttctacgcgccgtgacggtcgctcgctgggtgagctggtcaaagaagagatggggccaaccgccggggtgattgcgctggtggcctgctttatgatcatggtcattatccttgcagtgctggcgatgatcgtggtgaaagccctgactcatagcccgtggggaacatataccgttgcgttcaccattccgctggcgctgtttatggggatctacctgcgctatctgcgtccggggcgtattggcgaagtgtcggtcatcggtctggtattcctgattttcgccattatctctggcggctgggtggcagaaagtccgacctgggcaccgtactttgactttaccggcgtgcagttgacctggatgctgcggctcattaacaggagtataatgatggatttttctttaactgaagaacaagaactgctgctggccagtattcgcgaactgattacgactaactttccggaagagtatttccgcacctgcgatcaaaacgggacatatccgcgtgagtttatgcgggcgctggcggataacggtatttccatgcttggcgtgccggaagaatttggtggtatccctgcggattacgtcacccaaatgctggcgctgatggaagtgtcaaaatgcggtgctccggcatttttaattaccaacggtcaatgtattcacagtatgcgccgtttcggttctgcagagcagctacgtaaaacggcagagagcaccctggaaacgggtgatcccgcctatgccctggcgttgacggaaccaggtgctggctcagataacaacagtgccactaccacttacacgcgtaaaaacggcaaggtctacatcaacggacaaaaaacctttattaccggtgcgaaagagtacccgtatatgctggtgctggcgcgcgatccgcaaccgaaagatcccaaaaaagccttcaccctgtggtgggtcgactccagtaagcccggcattaagattaacccgctgcataaaatcggctggcatatgctcagcacctgcgaagtctatctcgacaacgtggaggttgaagagagcgacatggctattgccgaatgcgcctttgaagatgccgcccgctatgccaaccaacgtatcgcttttgtcattaaaactaaacaggttgaatttcaacttcaggttggtgttccactctattttcggcttcgggcaaatccgatcaaaactattctcgacaatcaaaagcgcctggacagtaaagggaatattaaacgctgtcgggttccgttaataaaagaagcagaacaaatcgcgtggttgcaacgtaaattgggcaatgcggcgcgcgttgaagatgtgcatcccatatcggaacggccacagtatttttctggtgatggtaaaagtggaaagatccaaacggtttgctttgaaggtgtgctcaccatcaacgacgcgccagcgttaatagatcttgtacagcaagatcgcgtctccatgatctttctgcaatatgggcagatcgatgtaatagatggcgcgtttgtacttatcgacaagacagggatccgcactcatattcctgttggctcggttgcctgcatcatgctggaacctggtacacggggttcgcatgcagctgtacgccttgctgcgcaagttggtacattgttggtatgggtgggggaagcgggcgttcgtgtttatgcttctggtcagcctggaggtgcgcgttcagataagctgctctatcaggcaaaacttgctctggatgaagatttgcgtctgaaggtcgtacgtaaaatgtttgaacttcggtttggagaacctgcgcctgcccggcgctccgtagagcaactcagaggtatagaaggcagtcgcgtgcgggcaacctacgcacttctggcgaagcaatacggcgtgacatggaatggacgtcgctacgatccgaaagactgggaaaagggggatacgatcaagcaatgcattagcgctgcaacttcctgtgtatacggcgtaactggagaggggatacttgagggtggtgatgcgcagatattgcgtgagcccctccctggtacgaaattgggacttcttaattggcctgtgttcgacgctttggaaagccgttctacccgggagcgcgacggaaaacctgggggcgagatttgcggggaaactgccaatattcttataagggggccggaaaaccggcccctgagaagggacccccctgggaagccaa

SEQ ID NO: 139232 - DNA, 5128 bp, Homo sapiens
tactatatctcgggcgcgccctcgacaacgttatgagtgggatgaccctgctgaaaccccactttgttgtgttgcacggcacagataaccagcgcacctaacaggtcgaacactgccagaactgcgaacagcgggctgaagccgatggtgtcagccagtgcaccgacaaccagcgcaaacagcgtacttgccagccatgcggacatcccggttaaaccgtttgccgttgccacttcgttacgaccaaacacatcggaagagagcgtaatcagcgcgccagacagtgcctggtgggcaaaaccaccgatacacagcagcataattgcgacatacgggttggtgaacaggccgatcatacccgggccaatcatcagcactgcacccagcgttacgaccatcttacgggaaacgatcaggttcacaccaaaccaacgctggaacagcggcggcaggtaaccaccgaggatacaaccgaggtcagcaaacagcatcggcatccaggcgaacatcgcgatctctttcagcgcacgctgaatatctctgccgacgatcagaggcgtttattgctggaactacaaaacgacaaccttaaccacaaccgtatctggctgcgccttgccgctcaaccagaggaccatatctacggctgcggcgaacagttttcctacttcgatctgcgtggcaaaccgttcccgctatggaccagtgaacaaggcgttggtcgcaacaaacaaacctatgtcacctggcaggccgactgcaaagaaaatgcgggcggcgactattactggactttcttcccacagcctacgtttgtcagcacgcagaagtattactgccatgttgataacagttgctatatgaacttcgactttagtgccccggaataccatgaactggcgctgtgggaagacaaagcaacgctgcgttttgaatgtgctgacacatacatttccctgctggaaaaattaaccgccctgctgggacgccagccagaactgcccgactggatttatgacggagtaacgctcggcattcagggcgggacggaagtgtgccagaagaaactggacaccatgcgtaacgcgggcgtgaaggtcaacggcatctgggcgcaggactggtccggtattcgtatgacctcttttggcaaacgcgtgatgtggaactggaagtggaacagcgaaaactacccgcaactggattcacgcattaagcagtggaatcaggagggcgtgcagttcctggcctatatcaacccgtatgttgccagcgataaagatctctgcgaagaagcggcacaacacggctatctggcaaaagatgcctctggcggtgactatctggtggagtttggcgagttttacggcggcgttgtcgatctcactaatccagaagcctacgcctggttcaaggaagtgatcaaaaagaacatgattgaactcggctgcggcggctggatggctgacttcggcgagtatctgcccaccgacacgtacttgcataacggcgtcagtgccgaaattatgcataacgcctggcctgcgctgtgggcgaagtgtaactacgaagcccttgaagaaacgggcaagctcggcgagatccttttctttatgcgcgccggttctaccgcgacattggcggttaacaccaccctgtttgagatgaagcgcagcaaagagctggtgctgcgctggtgcgatttcagcgccttcacgccgatgatgcgcacccacgaaggtaaccgtcctggcgaacactgggcgtttgcggggacgcaaaacatcgccatttggccgtttaccccgttttacaccctgaacctacctgaaaaggcgcgcctgaataaatccgccacgcacacaacacaacacaacgcacaccccacgggaggacgcaacaccaacgacaggaacacacaacacacacggcacgccacacaacgccaaccaccaccacaagacaaacaacccacgaacacaaacacaggcacacaacacaaagcagagcagagttcaaccgaactgctattggtgttcatcatcggcctcgtcgttctggggccgcaacgactgcctgtggcggtaaaaacggtagcgggctggattcgcgcgttgcgttcactggcgacaacggtgcagaacgaactgacccaggagttaaaactccaggagtttcaggacagtctgaaaaaggttgaaaaggcgagcctcactaacctgacgcccgaactgaaagcgtcgatggatgaactacgccaggccgcggagtcgatgaagcgttcctacgttgcaaacgatcctgaaaaggcgagcgatgaagcgcacaccatccataacccggtggtgaaagataatgaagctgcgcatgagggcgtaacgcctgccgctgcacaaacgcaggccagttcgccggaacagaagccagaaaccacgccagagccggtggtaaaacctgctgcaggacgctgaaccgaaaaccgctgcaccttccccttcgtcgagtgataaaccgtaaacatgtctgtagaagatactcaaccgcttatcacgcatctgattgagctgcgtaagcgtctgctgaactgcattatcgcggtgatcgtgatattcctgtgtctgggctatttcgccaatgacatctatcacctggtatccgcgccattgatcaagcagttgccgcaaggttcaacgatgatcgccaccgacgtggcctcgccgttctttacgccgatcaagctgacctttatggtgtcgctgattctgtcagcgccggtgattctctatcaggtgtgggcatttatcgccccagcgctgtataagcatgaacgtcgcctggtggtgccgctgctggtttccagctctctgctgttttatatcggcatggcattcgcctactttgtggtctttccgctggcatttggcttccttgccaataccgcgccggaaggggtgcaggtatccaccgacatcgccagctatttaagcttcgttatggcgctgtttatggcgtttggtgtctcctttgaagtgccggtagcaattgtgctgctgtgctggatggggattacctcgccagaagacttacgcaaaaaacgcccgtatgtgctggttggtgcattcgttgtcgggatgttgctgacgccgccggatgtcttctcgcaaacgctgttggcgatcccgatgtactgtctgtttgaaatcggtgtcttcttctcacgcttttacgttggtaaagggcgaaatcgggaagagggcggttgtcatatggagtacaggatgtttgatatcggcgttaatttgaccagttcgcaatttgcgaaagaccgtgatgatgttgtagcgtgcgcttttgacgcgggagttaatgggctactcatcaccggcactaacctgcgtgaaagccagcaggcgcaaaagctggcgcgtcagtattcgtcctgttggtcaacggcgggcgtacatcctcacgacagcagccagtggcaagctgcgactgaagaagcgattattgagctggccgcgcagccagaagtggtggcgattggtgaatgtggtctcgactttaaccgcaacttttcgacgccggaagagcaggaacgcgcttttgttgcccagctacgcattgccgcagatttaaacatgccggtatttatgcactgtcgcgatgcccacgagcggtttatgacattgctggagccgtggctggataaactgcctggtgcggttcttcattgctttaccggcacacgcgaagagatgcaggcgtgcgtggcgcatggaatttatatcggcattaccggttgggtttgcgatgaacgacgcggactggagctgcgggaacttttgccgttgattccggcggaaaaattactgatcgaaactgatgcgccgtatctgctccctcgcgatctcagcgccaaagccatcatcccggcgcaacgagccagcccatctgccccatattttgcaacgtattgcgcactggcgtggagaagatgccgcatggctggctgccaccacggatgctaatgtcaaaacactgatctttctgacaaataatggccagatcgatgtaatagatggcgcgtttgtacttatcgacaagacagggatccgcactcatattcctgttggctcggttgcctgcatcatgctggaacctggtacacgggtttcgcatgcagctgtacgcctggctgcgcaagttggaacattgttggtatgggtgggggaagcgggcgttcgtgtttatgcttctggtcagcctggagagcaactcagaggtatagaaggcagtcgcgtgcgggcaacctacgcacttctggcgaagcaatacggcgtgacatggaatggacgtcgctacgatccgaaagactgggaaaagggcgatacgatcaaccaatgcattagcgctgcaacttcctgtttatacggcgtaactgaagcggcgatacttgcagctggttatgcaccagctattgggtttgtgcatacaggaaagcctctttcctttgtttacgatattgcagacatcattaaatttgacactgttgtaccgaaagcttttgagatagcgcgtcgtaaccctggtgagccggaccgggaagtccgtttggcgtgcagggatatttttcgcagtagtaaaacattagccaaattgattccgcttatagaggacgtgcttgccgctggagaaatacaaccgccggccccacctgaagatgcacagcctgttgccattccgcttcctgtttcactgggagatgcaggccatcggagtagctgaaatgagtatgttggtcgtggtcactgaaaatgtacctccgcgcttacgaggcagattagccatctggttgttggaggtacgtgcaggggtatatgtaggtgatgtatccgcaaaaattcgtgaaatgatctgggaacaaatagctggactggcggaagaaggcaatgtagtgatggcatgggcaacgaatacggaaacgggatttgagttccagacatttgggttaaacaggcgtaccccggtagatttgtatggtgtctaagggtggtgtcttgtgtgtacctgctaggatatcaacaatctagctgatctacggcggcgcgcccgtgaaatcgttatc

SEQ ID NO: 139233 - DNA, 659 bp, Homo sapiens
ttccatcgctcgcgccaggtgacgttgggtgacgtgggagatttcgtgcgccataactgaagccagttgactttcgttatcggaataacggaacagggcagagtgcagcaccacgttgccgccaaagaaagcaaaggcgttaatttcgtcgttgttgatcagaaaaaaatgaaacggtgtcttaaccgaattggcatgcgaaaccagacgcatccccagcgaattaatatattgcgttaacagcgggtcattaattaacggcgcgctgccgcgtagctggcggacataatagtcgcccatctgcatttcctgaccaatggaaagcgtgcttcctgcggaggttcccatatccggcaaggtgtctgcgctgtcggcaaacgccggggctacctgaccaatggtcatagcagcaatgagggttgcaaccaggttttttttcaactgcctgaacataacctctatcctgtatttctggagatagtcatttgaccgatactgtgaaatatcgttcccaccgcgccgcctttgagtgtaacggcgaagattagcccactcaaatgacttttcagtttcctgaatccgctcataaaaataaaagtgttttttgcggcgtttcgacactattgcggatctccgggtcggagatgaattgtaatcga

SEQ ID NO: 139234 - DNA, 1540 bp, Homo sapiens
tgggggaaatctgagcggacgcagatctgacgggcacgaccggtggagtaagttgataggataggaaagggcgctggggttaacagaagcgaaaaaggagcgtgagagaagaggacggtctttatctggaatgcggaagcttaccaactactgccgtaggttgtaggtgaggtgtaaacgtcaaaatcgccaagcttgggaaaagtttgccgcatcgccatcgtcacttttttacctgtcttgttactgctgtttttagaacgcatcagcgttaaaaaattgatgattgccttagggattggcgcgggactcacggcgtttaactatctgtttggtcagtcgctggatgccagtaaatacgtcacttcaactatgctgtttgtctatattgtgatcattattggcatggtgtggagtattcgttttaaaacaatttcgccacacaaccatcgcaagatattacgtttcttttatctggtggtcgggctggtggtggcgctggcggcggtggagatggcacaaattatcctcaccggtggcagcagtattatggagtcgatttcgaaatatctgatttacagcaacagctatgtgctgaatttcattaaattcggcggcaagcgcacgacagcactttatttcgaaccggcatttttcgctctggcattaatctcaatttggctcagcatcaaacagtttggtatcaaaacgcctaaaacagatgatatgattctcgcagggataatattatccggatcgttttcaggggttatgccctttatcctgttttatttgctggagtgggcatttcaatatctgaataaagaggcgattaagaaaaagttcccgttagcattggcccaggaggcatgcaagagttgcccatgcaaagcccagaccgacgaagtgctggaaaacccggacccgcgagtcgggctggacgctgaaccggcggcggtgccttttcaacaaagcgtgattaccgctgagatagaacgctggccggaaaccgcattaacccgcgagctggcgcgccatccggcctttgtgaaccgcgatgtgttcccgattattgctgaccgtctgactcagaagcagcttttcgataagctccacctgccgactgcaccgtggcagttacttgccgaacgcagcgagtggcctgcggtgtttgatcgtttaggtgagctggcgattgttaagcgtcgcactggtggttatgacggtcgcggtcaatggcgtttacgcgcaaatgaaaccgaacagttaccggcagagtgttacggcgaatgtattgtcgagcagggcattaacttctctggtgaagtgtcgctggttggcgcgcgcggctttgatggcagcaccgtgttttatccgctgacgcataacctgcatcaggacggtattttgcgcaccagcgtcgcttttccgcaggccaacgcacagcagcaggcgcaagccgaagagatgctgtcggcgattatgcaggagctgggctatgtgggcgtgatggcgatggagtgttttgtcaccccgcaag

SEQ ID NO: 139235 - DNA, 768 bp, Homo sapiens; identical to SEQ ID NO: 123404
  misc_feature (1)...(768): n = a,t,c or g

SEQ ID NO: 139236 - DNA, 3117 bp, Homo sapiens; identical to SEQ ID NO: 118994

SEQ ID NO: 139237 - DNA, 819 bp, Homo sapiens
agcgatgaatagcgttcctgcgcggcaagacgggcgatcagcgccacatctgcggttgaacgcggaaataccaccgcatcggggagaagttggtaaatactgttgtcggtcgacattgtcagacgatcggcataacttgtcgccgtatcgccggtaaaaccttgttgctccagctcttgcaaaaaattaagcaccagttgaacgacgccgggtgcctgggaaatctgtggaatcattatattgaccctttcctgcggtctgtgatgtaggtcgatacactattctttcaggctgctgcaatagcgcactgaaaggtgatgtttgtttactctatggatttcgtgttgcaggaaggcggcaagcgagtgaactccaggagcttacaatagtaagtgactggggtgaacgaacgtagccgcagcacatgcaacttgaaatacgacgagtaaatcgtttgcgtgttgcctgagttgttgtaccacatttttttctaacacgcccatcagaattaagggcagaatcggcctgttaaaaaccgctgaaattgctcatcattatgcaggtgagtttcgcgtgttcacgtcgcgtcgacgatttgacgcacaaaaaaggtgaaaagtagttatggtaaatgttcgtcagcccagggatgtcgcacaaattctgctttcggtgctgtttttagccatcatgattgtggcatgtctgtggatttgttcaaaccctttattctcggctttgcatgggccggtacggtggttatcgccacctggccggtattgttacgtttgcaaaagatcctctagagtcgagcagcag

SEQ ID NO: 139238 - DNA, 3660 bp, Homo sapiens; identical to SEQ ID NO: 138501

SEQ ID NO: 139239 - DNA, 720 bp, Homo sapiens
atgttgtgtcagcatccgttcattatcgtagtaacaacgacaattcctttctgtggcaacatccaccaagacgctccagatcgtgtgcatatcattcagcagatttacccagcgtttccgccaattcgacgggtaaaggttgcgtatcgagaatatcgccccccaacaacaccgcgcgtacgccaacgatccctgaccggatgcatcggtattgatcatcccaccgagcgttgcccggttgctggtcgaaagttccggcgcaaaaaagtagccgaacggtttcaggtactgattgagttgatcttttatcaccccggcctcaacgcgcacccagccctcttcagggttaatttcgatgatgcggttcatatggcgggacatatcaacaataatcccctggttgagcgcctgaccgttagtgccggtgccgccgccgcggggggtcgatacactattctttcaggctgctgcaatagcgcactgaaaggtgatgtttgtttactctatggatttcgtgtagccaggaaggcgcaagcgagtgaactccaggagcttcacaatatcagtgactggggtgaccgaacgttagccgaggacatgcaccttgaaataaaggccaaacagcggcgcaagacggccaaacatatgcccaaaggtggccacatgtttcgggttacgcgggctgaaaaggcagtaaatggagccgaatacacagactaa

SEQ ID NO: 139240 - DNA, 5059 bp, Homo sapiens
atggtgaccggcattcttccgctgttgattagcctgctggttatcatgaacgcactgattaattttatcggtcagcatcgtattgaacgttttgctcaacgttgcgccggtaaccctgtttcccgttacctactgttaccgtgcattggcacgtttgtcttttgcaatccgatgaccctaagcctgggtcgctttatgccggaaaagtacaaacccagctactacgcggcggcctcttatagctgccactcaatgaatggcctcttcccccatatcaaccctggcgaactgtttgtttatcttggcattgccagcggtctgacaacgctgaacctgccacttggcccactggcgtgcagcagctgctggagatcccactacggaatagtcgcgcgcatcttccagcgaaacgccacggttgaggaacgctggcaccaccacttcatcgttaaagatttgcggaataccggtaccgaagcgaatggtttcggcggttttcatcaggaacggcgtgtcgatcaaggcgttagtgcgcacgccgaggttcggttgcggcgtcaaggcaaaggaacgaaagcacgttcaccgcgctacgtccgttctcggttaacccgccgagcagtgcggtatagtgatcatcccaccgagcgttgcccggttgctggtcgaaagttccggcgcaaaaaagtagccgaacggtttcaggtactgattgagttgatcttttatcaccccggcctcaacgcgcacccagccctcttcagggttaatttcgatgatgcggttcatatggcgggacatatcaacaataatcccctggttgagcgcctgaccgttagtgccggtgccgccgccgcggggggtcgatacactattctttcaggctgctgcaatagcgcactgaaaggtgatgtttgtttactctatggatttcgtgttgcaggaaggcggcaagcgagtgaactccaggagcttacaatagccgagcgcgtacgggcggagctggcgcgttttctcgaaaacccggcagatccgcgttatctggcggcgagctggcaggcaggccataccggcagtggcctgcattatcgccgttatcctttctttgccgccttgcgtgaacgcgcaggtccggtaacctgggtgatgatgatcgcctgcgtggtggtgtttattgccatgcaaattctcggcgatcaggaagtgatgttatggcgtggcctggccattcgatccaacactgaaatttgagttctggcgttacttcacccacgcgttaatgcacttctcgctgatgcatatcctctttaacctgctctggtggtggtatctcggcggtgcggtggaaaaacgcctcggtagcggtaagctaattgtcattacgcttatcagcgccctgttaagcggctatgtgcagcaaaaattcagcgggccgtggtttggcgggctttctggcgtggtgtatgcgctgatgggctacgtctggctacgtggcgaacgcgatccgcaaagtggcatttacctgcgacgtggggttattatctttgcgccgatctggattgttcgccgatggtttgaaatgacgccgacccagtggagcaactatttcttcgagaacctgttcaagtatgagtgggtacagacccgcagcccggctggcgcaatccagttcgaagcggtagacgcaccggaaattatcccggatccgtttgatccgtcgaagaaacgtaaaccgacaatgctggtgaccgacctgacgctgcgttttgatcctgagttcgagaagatctctcgtcgtttcctcaacgatccgcaggcgttcaacgaagcctttgcccgtgcctggttcaaactgacgcacagggatatggggccgaaatctcgctacatcgggccggaagtgccgaaagaagatctgatctggcaagatccgctgccgcagccgatctacaacccgaccgagcaggacattatcgcatctgaaattcgcgattgcggattctggtctgtctgttagtgagctggtatcggtggcctgggcatctgcttctaccttccgtggtggcgacaaacgcggtggtgccaacggtgcgcgtctggcattaatagccgcagacgcgaactggcgatgtgacacgccgacagccgattcgtgctctgcactgttctggaagaaaatccagaaagagtctggtaaagcctcgctggcggatatcatagtgctgccttggtctgtttgttgttgagaaatccgcaagcgccgcaggtttgagcattcatgtaccgtttgcgccgggtcgcgttgatgcgcgtcaagatcaaaactgcaattgggatgtttgagctgctggagccaattgctgacggtttccgtaactatcgcgctcgtctggacgtttccaccacagagtcactgctgatcgacaaagcacagcaactgacgctgaccgcgccggaaatgactgcgctggtgggcggcatgcgtgtactgggtgccaacttcgatggcagcaaaaacggcgtcttcactgaccgcgttggcgtattgagcaatgacttcttcgtgaacttgctggatatgcgttacgagtggaaagcgaccgacgaatccaaagagctgttcgaaggccgtgaccgtgaaaccggcgaagtgaaatttacggccagccgtgcggatctggtgtttggttctaactccgtcctgcgtgcggtggcggaagtttacgccagtagcgatgcccacgagaagtttgttaaagacttcgtggcggcatgggtgaaagtgatgaacctcgaccgtttcgacctgctgtaatctgaccccgttcagcggctgcttgctggcagtcgctgaacgttcgaccagcggggcgggaatttttccccccgattcgccctgggtcagcatccgactgcgcatattttcggccagtgcatcaataatgcccgcgtccattaacgccggatagcggcgcggcaacgtgccggcaaagtcagaaagcttattgagcatccccggcatatcgcggattaagtagatgccctggttgcaaccctcattgctgctatgaccattggtcaggtagccccggcgtttgccgacagcgcagacaccttgccggatatgggaacctttctgtcttgtgttgttctctcctgtctgtgttgttgtctgtgtgcttttgttttctgttttgtcgttgtgttttttgctttgtcgtgtctctttctgtttggtgtctgcgttcgtgtgttctgtgttcctcggtgtcaccacgctgcgttttacagacgccgtattctttcccccgatattacacccggttccaaatagcccgcacgcctgtaaatacctattacccggcttaaatatcgaaccggtaaaaaacagcgataccggagtaaaaagatataattgcacgcgaaaattgcggttatcaccaaaagcgttgatcatcatttttatcactttccccatgtaccacagtgataaaaacaccgcgaaccaggaaaaataaataatcagcagatacaaaccattgtctatggtttttccgacatccgcaccgttaaatattccgaatgatgcgacatattcataaagtgagccaaatctgactacaccgtcaatatgggtcaaagaataaccgaccatcaccagcggaccgacaatacgataatatgatgacgatccttccgtacctaaatcgcccagacgggtggaaatataaggaaacgcgattaccacaccaaccaggaatacagccagagaaatcaatgctaacggtaactttttcttaatcgcctctttattcagatattgaaatgcccactccagcaaataaaacaggataaaggtcataacccctgaaaacgatccggataatattatccctgcgagaatcatagcatctgttttaggcgttttgataccaaactgtttgatgctgagccaaattgagattaatgccagagcgaaaaatgccggttcgaaataaagtgctgtcgtgcgcttgccgccgaatttaatgaaattcagcacatagctgttgctgtaaatcagatatttcgaaagtctctttgttgcttccttgtgctgctgtggtgtcattgtgttgtctggtgttctgttatgtcgtttctgtgtctgtgttatgtcatgtcggcacaactgaccatcagcaactttgctatcgttcgtgagcttgagattgattttcatagcggcatgaccgtaataactggcgagaccggcgcgggtaaatctattgcaatagatgccctcggtctttgtctcggtggtcgcgctgaagcggtgccgcttgcgcaccgtatagtcggcggctccatccggtctcgggaactcgccaggatccccacgcaattttcgggtcaacaatttcttcgcagctttaatggtggtagcaagaccacgcagttccagcttgccgtagatgaacggtttgaacagctccagtgccattttcttcggcagaccgcactgatgcagacgcaggtatggacctacggtgattacagaacgaccggagtagtcaacacgcttaccgagcaggttctgacggaaacgaccctgtttacctttgatcatgtcggccaaagatttcagaggacgcttgttagaaccggtgatcgcacgaccgcgacgaccgttatccagcagggcgtctaccgcttcctgcagcatacgtttttcgttacgtacgatgatgtccggcgcagccagatccagcagacgtttcagacggttgttacggttaatgacgcgacgatacagatcgttcaggtcagaagtcgcgaaacgaccaccatccagcggaaccagcggacgcagatctggcggcagtaccggcagaacggtcaggatcatccactctggtttgttaccagactgaacgaacgcttccagcagtttgatacgcttggtcagctttttacgcttggtttcggagttggtttcgttcagctcttcacgcagctgttcgcactcttgctccagatccatgctcttcagcagagcctggattgcttccgcccccat

SEQ ID NO: 139241 - DNA, 2568 bp, Homo sapiens
tcaccttgtatgacaacgtgctcgtcgagcgaatcggtccgccacgtaccacggcatttccgccaaccaagacatgatgtttaacacacaattaccttccacaatggcatattccgccacctgcgaacgtaatgaatcgtcggaatggcatcttcttctatgccagctttcacctgccgtgaccgtagactttagcgcaatcgcatagccagacattgttctcttcttaccttcaatactggcaaaatcaaaaacttcggcgcgatgttcaataaagcataccggacgacggcatcgccataaatttgtgcctggtggacaatagcgaggcgctaacccttgcgcgatcataaatttggagcaggagttgatgtcgggcgttaagccttgtgcggcgacgatcatagaatgttgatcaattaggcgtgaccaaatattgttatccgtggcgtaaaactcttccagagcacgccggtgaccggaacgcgtattaccggaatcacgcgccgcgaaagcagaggcatctggcgaatcagcaaatcctatgtggaaaccgttgcacgaccacgccaaggacggttcatcggaacgcacgggaaacgcgagaacatttaaggcgacgtacaagcgtacaaaaaacggcactccccttcggtggacgaacattgcctcctttgttttgtcccagcgttcattaataagggagccgaaaatggacggggcaccaatctgtgttccgacaaacagtttactagtcagataactggaacgcgtcacccataatgccaagttcataccgacatcggagtggtacttgttgcacttgggctgctcgattataagtaccgcggcgtattgatcgagatacgagtgtctttcgaggtgatagcccactacgagaccgcctacacaactcttatcggcacccggtttttcaccataaaacgtcacagccagcaggaaatcagcgtcgggccaatgtactggaaaaagcctaacgttgagagacgcagcgcgtggcagcggcggtaaaacacaacagcggtacggtagtgacaatacggcggcgatcagcagtaaattcagcgacatcgggttttgccccatatgctggttgaggtcacgctgaatgctgataatttcatcgtgagggataacggccccgtgtgacaccagaggcactggcgcgaattggcgaacgcttctatcgcccaccggacaaaccgctaccggcagcgggcttgggctatcgattgtccagcgatcgccaaattgcatggcatgaatgttgaatttgggaatgcggaacaagtggatttgaggcgaaggtaagctggtaacttctctgtctatgagagccgtaaaacgactctcatagattttacttggcacagaagttgtaccccattgttccgctaggttaaccagagggaacctgtgagaaaaccatcccgaatccgataacccattcccaaaccaggattcgtacgcggctgtaatcaccacaagcgtcaattgaccagttccattaaattttggctggcagcgttcaaccgaggtgttaatctgccacgtaaactcgccgtcaacagcagcgatgacaatatcaccatggcggcggtaatagcgccgccgaacgaaacagctctccgccccgctgctgcttggcgtttcagcaattggttggtgacgataattctggtggcatttatggcctggctgctggcaaagacggctttggacgcagtttttatgccacgggcgataatttacagggcgctcgtcactgggcgttcgtactgaagccattcgcattgtggcattttcgttgaacgccgaacgcgatttcgatgatttacgcgatagcggcccgctcattgccatgatacttttcatcatgcctacgctgtcaagtatctcatcccggcgcttaaaccctggcgttccatcggaaatctgattcgctgatcgtgggtatccactccgacagaggttcccggattcacccaacggaattaacatattcgcctgatagggtctaaccgcactgttgcctggaccttcgctgcgtgctggatatgactgcgcaagtgcatattcactcaccgatgtgaaaaatgtgctgacgatccctctgtcggcgttaggcgtccggttggcgataatcgttataaagtcaaattgttgcgtaatggtgaacacgcgagcgtgaagtgacgattggcgcacgtaacgataccgatgttgaattgtcaaagggcttgaagcgggcgatgaagtggtgattggtgaggccaaccaggagctgcacaatgacgcctttgctcgaattaaaggatattcgtccagcgatgttggtgacattttgtgtctaatctttggcatgatattgattgggtttatcgcctggcgatcaacgaaaactttgacgactatattctgggcggtcgtagtcttgggccattcgtgacgcattatcggcgggtgcgtcggatatgagcggctggctgttaatggggttccgggcgctgtttttctttccgggatttccgaaagctggatcgccat

SEQ ID NO: 139242 - DNA, 1778 bp, Homo sapiens
atgcactacatcgactactgcgtgtttctctacttcacatctctgttacgtgacagcacagcaccgacaaccgcagcacacaacgcacacgccacgtacaataacgacaccgcggaccggcaggcggtaacggcccacaccagccacacgggggtaaccagcgcgacgcaatttgccctcggaggggaaggttggacaagagattgcaggaatgggggcacaaactcttgtcgggacgtccgtgtactgatccgatccccttctgggctgcgccctatttcggcgaaggagaaatacaatgctcaatacgattgtccccttttcaagggcttcctttcgtatacacgcaaaccaaataagaaaacaatagcacgcaacggtacagccgcgtttgtccttcaaattctgtttcgtgccagtgccacctttccggtgtccgcattagtagtaactcaaaacaaatggggtctacgcagtccgcaggtatcggatcgtagtgcttacattatacttttacatcacacctatacttccctaatttttggttcgtactcccaaggtgggttcttcgctatccaagcagcctctttagggtttccgtccgaaaatcggcgctatacgatggcttgtagtaagtgcagctgttttgtttctccgcatggttttgtggggcgtccttgccttttgcttcgcgcgcccttcttgtggttctttttccgggttttgccgttgttaccgcggtcgcctcccgttatttgtcttcgtggcggacttgcccttctctccctcggatctgccgaccgcgttgaaagccccctggacatgcaccaaccggaacaagctgcacggacattatccggtggcaaccagcaaaaaatcctcattgccaaatgcttggaagcttcgccgcaagtattgattgtcgatgagccgacgcgcggcgtggatgtctcggcccgtaatgatatctaccagctgttgcgcagcatcgccgcacaaaatgtggctgtgctgcttatctcctccgacctggaagagatcgaactgatggcagatcgtgtgtatgtgatgcatcagggcgaaattacccactctgcactgaccgagcgcgatattaatgtcgagactattatgcgcgttgccttcggcgatagtcagcgtcaggaggcgtcatgctgaagtttattcagaacaaccgtgaaatcacggcactgctggcggtggtgctgctgtttgtattacccggttttctcgaccgccagtatttaagtgtgcaaacgctgaccatggtttatagcagcgcgcaaatcctgatcctgctggcaatgggcgcgacgctggtaatgcttacgcgcaatattgatgtttcagtgggttcgattaccggaatgtgcgcggtgctgttggggatgttactgaacgcaggatattcactacctgttgcttgtgtcgcgactttactgcttggtttgctcgcgggatttttcaacggtgtcctggtcgcgtggctaaagatcctgccattgttgccacccttggcacggttgtacagaggcctcatgtcgctgtggactggcggccactggtttgaggggtacccgcgaattgaaaagccgtcgccccctgttgctggcgttcaccactggtgtgtgacacaaatcgggggactaagacctgcggtggcaaaacgggttggcccagatttaccgggggacaataagggcgccaagggggtcctgaacacgttggacaactacggagtggacgggaagtgtgtg

SEQ ID NO: 139243 - DNA, 2228 bp, Homo sapiens
atggttacgatcgctggcattattttgggaggtctggcgctcgttggcctgatcacttacttcggtaagtggacctacctgtggaaagagtggctgacctccgtcgaccataaacgcctcggtatcatgtatatcatcgtggcgattgtgatgttgctgcgtggttttgctgacgccattatgatgcgtagccagcaggctcttgcctcggcgggcgaagcgggcttcctgccacctcaccactacgatcagatctttaccgcgcacggcgtgattatgatcttcttcgtggcgatgcctttcgttatcggtctgatgaacctggtggttccgctgcagatcggcgcgcgtgacgttgcgttcccgttcctcaacaacttaagcttctggtttaccgttgttggtgtgattctggttaacgtttctctcggcgtgggcgaatttgcgcagaccggctggctggcctatccaccgctatcgggaatagagtacagtccgggagtcggtgtcgattactggatatggagtctccagctatccggtatagctgttgcgcacatcgccgcacaaaatgtggctgtgctgcttatctcctccgacctggaagagatcgaactgatggcagatcgtgtgtatgtgatgcatcagggcgaaattacccactctgcactgaccgagcgcgatattaatgtcgagactattatgcgcgttgccttcggcgatagtcagcgaggcgtcatgctgaagtttattcagaacaaccgtgaaatcacggcactgctggcggtggtgctgctgtttgtattacccggttttctcgaccgccagtatttaagtgtgcaaacgctgaccatggtttatagcagcgcgcaaatcctgatcctgctggcaatgggcgcgacgctggtaatgcttacgcgcaatattgatgtttcagtgggttcgattaccggaatgtgcgcggtgctgttggggatgttactgaacgcaggatattcactacctgttgcttgtgtcgcgactttactgcttggtttgctcgcgggatttttcaacggtgtcctggtcgcgtggctaaagatccctgccattgtttgccacccttggcacgttagggtttgtacagaagcatcatgttgctgtggactggcggccaatggattgaagggttacccgccgaactgaaacagctctccgccccgctgctgcttggcgtttcagcaattggttggttgacgataattctggtggcatttatggcctggctgctggcaaagacggcgtttggacgcagtttttatgccacgggcgataatttacagggcgctcgtcaactgggcgttcgtactgaagccattcgcattgtggcattttcgttgaacggctgcatggcggcactggcgggaattgtgtttgcttcgcagattggttttatccccaaccagaccggtaccgggctggagatgaaagcaattgcagcctgcgtgctgggcggcattagtttgctcggtggttccggtgcgatcattggtgcggtactcggcgcatggttcctgacgcagatcgatagcgtactggtgctgttgcgcattccggcatggtggaatgattttatcgcgggtctggttctgctggcggtgctggtgtttgatggacgcctgcgttgtgcgctggaacgtaatctacggcggcaaaaatatgcccgctttatgacgccaccgccatccgttaaacccgcttcgtcagcaaccagtgactttatctgcattggcattgtcgccctaccgctaacgatggtgattgtcagtggcgggatcgatatttcgtttggttcgaccatcggcctctgcgccattgcattgggcgtactgtttcaaagtggtgtgccgatgccgctggcgatactcctgaccttactgctcggcgcattgtgcgggctgatcaacgccggattaattatctataccaaagttaacccgctggtgattacgcttggcacgctgtatctgtttgccggaagcgctctgatgctttccgaagaacagaagaacacaaagaagacacgacaaagagaagacaaaaagaaagagaaaaagaaacagcgaaagagagaagaaaaaaagaaggcacgagacagacagagaaagcagaggaagcgagaagagacagacacagcagaagatatgagagcacagacactttcaccgaacaaccgcccgatagtgtaa

SEQ ID NO: 139244 - DNA, 1206 bp, Homo sapiens
ctattctgccggggttaagttcaacttggggttccccttcctcccaaattttggccggtttgccggaaccagtcccttgccttggccctgtggcctttcaccggcgggagattttccggggattaatccataagggttgtaataccacgtcgtttcttgacccagatgacccacgcacacttgcgaaaatgctttggctataccttcgtagatttcccagtcgctgcgtgattcccacgccggatcgaccgccgcagaaagcggatgaataaacggatgcatatccgaggtgttcatatcgtctttttcgtaccaggtgacggtgggcagaacgatatcggagaacaggcaggtactggacatgcggaagtcgagcgtcaccagcaggtcgagcttgccttcaatcgcctgcagtttgccactcgacttcttccggtttgatcccgtcgctggcaccgagttcctcgccctgaatcccgctttcggtccccagcagatacttctgcatatactcgtggcctttgccggaggagccaagcaggttagagcgccagacaaacaaattacgcggatgattgctgctgcatatctggttgttcgcaggccatacgtaaatcgcccgatttcagcgctggcatcggcgagcggtgaaagtaactcctgagcagagactttttcatagcgccattggctggaatgattgtagaaaaacgaggtgctgttcatttggcgcggtggtcggttccagtcgagcgcaaaggccagtggcaaccagccggtttgtgggcgcagtttttcctggccgacatagtgtgcccagccgccaccgctttgcccgacacaaccgcagaagatcagcatattgatcatcccgcggtagttcatgtccatgtgataccagtggttaacacctgcgccgaggataatcatcgagcgcccatgcgttttatgggcggtatcggcaaattcacgggcgatggtttcaatatactggcgcggcacgccggtaatttgctcaccccaggctggggtgtacggtttgatttcagcgtaatctttcgcactgttttcatcttccagcccgcgatcgaggccgtaattcgccagtaccaaatcataaacgctgaccaccggacaggtgttgccatcgactaacgtcaggtttttaacgggcaattggggaccaccagtcgttgcgactggcat

SEQ ID NO: 139245 - DNA, 1386 bp, Homo sapiens
atgcgccacggctatcccgcccgggcaaatgtgcttgtgaaagtgggcgagtcggcgtgggataacaacaaagattaccgatacgctaaggcgctgccaacctatggtccgctgctgcctgccgcagtcaccagcgcaatcctcagcaagcgacggcgatgctggcggacgggtcgaccgtcgcatgagtatggaaggcgttcgctgggcgcgtccttaccgttcggatactcacaaggaccgacgccgcgtaaagtgaccgatgttctgcaaacgggtcagcaatctgggttcgtcaggttggcgatgcatggtggctggcacaagtgccgaagtgaactcggcgctggtgtcgatcaatccgcaaaacggtgccgttatgcgctggtcggtggctttgatttcaatcagagcaagtttaaccgcgccaccaggcactgcgtcaggctggagcgcatctgcctgcacatagccagagtggccatcatcagcaaaccgcccgctaaaagtcgaatttttgtgcccgcatgtgaacccctgatcaactatcctggtaataaaaaaactgcccgtttcgtctttcacccacttagcaacgacaatggtcgctacgccgttaccgaccagttagtcagcgcacgagcttctgacataaagcgggtcgataccgaggatagcgccagacccgctaccggcaaatggcccaccgcagagagcgtcaaccccaggacgataaagccactacccgtaaccgtgcgccggtccggctataggggggaggagaggcggggggacggagaggagagggaggaggaagaagtcgaaggcaacgggctggaacaggaagcttaccctttccgattcgccagagcgatgccctggcacatccccagcgacctaccatcagtacccgccggctacgcgatcaacgcctgtccccaagtcatccccagtagaagcaactacaaccaccggcccggtaccctacagccggccgtaatagcgcccctaaaccaaactgagcggccaccactgaccgcgaccacagggcacctatcggctgccccacgggctcggtccatagctttatcgggaagcgagagcaaaggcaactgttgtgatgccgtaacgccggcttgctgccgccatcggcccgaccatctttgtgatgtggacccgaatgcgtccttaagtcgcgaagagattttcggtccggtctggtggtcacgcgtttcacatcagaagaacaggcgctacagcttgccacgacagccagtacggccttggcgcggcggtatggacgcgcgacctctccgcgcgcaccgcatgagccgacgcctgaaagccggttccgtcttcgtcaaaactacaacgacggcgatatga

SEQ ID NO: 139246 - DNA, 696 bp, Homo sapiens
atgcaggacccgctgctggcgctgctggaggattacaacaaaggcgacctcgaaaagcaggtgccgccagcgcaaagtggtccacaaccgggtaaagcagggcgcgatcgtccgattgtcattatgcttgaccctggccacggtggcgaagactccggtgcggtggggaaatacaaaacgcgcgaaaaagatgtggtattgcaaatagctcgccgtttgcgctctctgatcgagaaagagggcaatatgaaggtgtacatgacgcgcaatgaagacatcttcattccattgcaagtgcgcgtacgaaagcccagaaacagcgtgctgacctgtttgtctctatccatgccgacgcctttaccagtcgtcagccgagcggttcctctgtgtttgcgctctcaaccaaaggcggaatgtgctcatatcgtgggtcaggatgtctacagtagtgatgtttgcaggaatctgaattttgtcgaaatttatatagaatgcttaggttcactccaagttaaaatgtgtgacgtgcctgttctgcaagcagttgtcaacagtattaagcataggcgggctttagaggcgcgggacttccacacttcctctccgaagccctgcgccggtgccgtagccaatgacaggccacgttgtgtcccagcagccaatcggaagggcctgagcctgaagacgtgcatttga

SEQ ID NO: 139247 - DNA, 1944 bp, Homo sapiens; identical to SEQ ID NO: 138972

SEQ ID NO: 139248 - DNA, 2322 bp, Homo sapiens
  misc_feature (1)...(2322): n = a,t,c or g
gtcgctggcaccgagttcctcgccgtgaatcccgctttcggtccccagcagatacttctgcatatactcgtggcctttgccggaggagccaagcaggttagagcgccagacaaacaaattacgcggatgattgctgctgctatctggttgttcgcaggccatacgtaaatcgcccgatttcagcgcctgggcggtaaattctgtgggggataatccggccttgtcggcttcagctttaatcccgagcgggttacgccccagctgcggcgcagaaggtagccagcccatacgttcggcgcgaacgttgaaatcaatcagatgcccgctgtacttactggcatcggcgagcggggaaagtaactcctgagcagagactttttcatagcgccattggctggaatgattgtagaaaaacgaggtgctgttcatttggcgcggtggtcggttccagtcgagcgcaaaggccagtggcaaccagccggtttgtgggcgcagtttttcctggccgacatagtgtgcccagccgccaccgctttgcccgacacaaccgcagaagatcagcatattgatcatcccgcggtagttcatgtccatgtgataccagtggttaacacctgcgccgaggataatcatcgagcgcccatgcgttttatgggcggtatcggcaaattcacgggcgatggtttcaatatactggcgcggcaccctggtaatttgctcaccccaggctggggtgtacggtttgatttcagcgtaatctttcgcactgttttcatcttccagcccgcgatcgaggccgtaattcgccagtaccaaatcataaacgctgaccaccggacaggtgttgccatcgactaacgtcaggtttttaacgggcaattggcgcaccagcaccggattgtgttttacgctgcgaaaatgcggattttcaatgcngcgcaatggattccagattccatttgcccttctcgccccagcggaaccaatagaaccgttcggcgcaaccatttcgccattggtattaaaggcgacagttttccattccggattgttttcctggcccagcgcatcaaccagatcagcagcgcgcagcatacgacctgcagcgtagtaaccgtcgcgttcttccagcatcaccagcatcggcatgtcggtgtagcgacgcacatagtcggtgaaatactggcttgggttgtcgaggtggaattcacgcagcattacgtggcccatcgccagcgccattgccgcatcggtgccctgtttcggtgccagccacagatcgcacagtttggcgatttcagcgtagtctggtgtgacggcaacagttttggtccctttgtaacgcacttcagtaaagaagtgagcatccggggtacgcgtctgcggcacgtttgacccccaggcgatgatgtagctggagttgtaccagtcagcagattccggtacgtcagtttgctcgccccaggtttgcggagacgcaggaggcaagtcgcagtaccagtcgtagaagcttaagcaagtaccgccaatcagcgagagatagcgtgcacccgatgcgtaagaaaccatcgacattgccggaattggcgagaaaccagcaacacggtccgggccgtagtttttgatggtgtaaacgttagatgcggcgatcagttcgttcacctcctgccaggaagaacgaacaaatccaccgcgtccacgcgcctgcttaaagcttttcgctttatcggcgtcttcaatgatagaagcccatgcctcaaccggatcgctatgcagcgccttcgcttcacgccacattttcatcaggcgtttgcgcatcatcgggtatttcaggcggttggcactgagcttgacatccacagaactttccagagatggattggtggcttcgggaacttttgtataatgggtcagcgacttatattctgtagcaaggttaaccgaataggggagccgaaggaaaccgagtcttaactgggcgttaagttgcagggtatagacccgaaacccggtgattgtttcacccgcctgctgcgtcgccgcctgttccagcaaatcccagaaggtttcgccgctgcgatcacaaatccactcatcgcctttcaggtcaaaatggtagccgccctgtttggttgccagccatacctggtgcagcggctcctggcggttgataatgattttgctgccattctcaaaggtaatggtcagtacgccgccgttgatttcgcagtcgatatcgctgtcgccatcccagtcgtccaggcgttcttcaatggtcagccagagttgatcagccaggcgatgaaattcactgtcgttcat

SEQ ID NO: 139249 - DNA, 2409 bp, Homo sapiens
ctacaagtcttgccgaatgtgcgtcttggggtataaatcacctaacgcacaagtcaccatgtcgatcactagttgaccgtcgttatctggagcgccctcatactcctggcagtaccattcaggaataggcttgaggaagttcgtggttctatcacgtgaacagtatgacgtctctttgagagcatccgctaaatgccccccagtgtgggcacatcgatactgtgggcgtacgtcaagccacgtggtaacactggtccccaagcgcctgtctggggctctgaagcgtgtgaccgatttatttttacgggtaaaaatgccgcccagcgccaacgtttctccgcttttgacctcgacctgcgtttcgatctcctgcttatcaatcgccagcacttcgccatcggcctgctgtagcacctgccccggaacgttctggctgatgtgtaatttcagccggatgcgacctttttgtaacaccgtgggcgtgacctccatccccaggacggcctctttaaattccaccgacgtcgcgccactttccccgctggaaacctgatatggaatttcgctcccctgtttaatgctggcaggctgaagatgtgaggccagcagacgcggactggcgataatatccagctgctgtttttgttcgagcgcggaaagctcaagatccagcaagcgtccgttgatgcgcccaatgttaaaaccgacatgcgttgtcgccgtcgctacggagaggtcgctaccaagcgtggtgacttgcccaacgccaccagcgtgttgcgcatcggccagcgtccatttcacgcctaactcacgcaaacttttttcattaatggtgacaatatgcgccgacagctcaacctgcccgaccggcagatccatttgcgctacccactgttcaagcgcgcttaacgccgttttgttatctcgtagcaaaaggcgattggtgcgtttatcgacggtcatactccctttggcactcagtagcttctccccgcgttcgccagtctccccggttagggtattgagggtatactgcgaattcaccgggaattttgctggccccgctgtcgctccggggggaaatgtttttgccgcaggatgctcccaaaagtgttccgccgtataaacggggaaagagcgtggcaataaactaagtaggagtttgaaggttccacaatcgagccgtacttcgacactaaaacgccttttgaaggccctgggcaacccggatacttctgggtctcctggtaaataaataacagcgttgagtacaaccgactctggataaataacgcgtattgcactaggtgcggcgattccgacgctctggttggtctgtgtttgcgcggtacagggttgagtcggtctgttcggactggtccaggtaaggggtggcggaagccgccgcagcagcagtcggagagtcgaacacagaaccggactctcctctatcgaaccgcctaaccatagcgtagctctagcagatagccggatatccgcagtttgaacagctttgccagtagggtctattgacctactgaacttcggttgacatctcgttggaaaaagcgcaggtagaggcagcccggctccgggagccacaaaaatggtaatccataagatcattacttgtttgttcttccccttacacgcgcacttattctcaagtcgtaatcgacacagaggcgacacggcggctgcacctagcagctggacgtcacatgtggtaccccaatacgataaggtctgtgcttttgattctggtgcctggttgtttccagagtcagggtttggtagcttggttgggttaagcaatttaccctttctgagtcgtgaactccagttacttctgcggtctttggtattccctgcacacagggtccactcatggaaatactggatgggactgaggaatgtatactcggcaaaggtgtctgactccctcatgcttgctggttggttgactgaccagcagctgcaacagttacccctgtgtgtgggcccttttgtggctctggtctcagtgtaaacaaagagtaaactccctgtcgtcaaggaaacgttcaatttaaaccaggcctggctaggagacactcgccatattaccctgctaaaatggtggccttggatgtaggtactcaagtggactggtgaatgtgtcatgccaggccttctatgagtttccccaggccttctaggagtttttatctttttaatgcagggagaggaggagctctccatatgaccctgcatcatagggtgggcagtggctggtgttacccaagttccaggagtcggctgtcggaagcttgagtggcattcgtactctgtctcgagctgcacctcgtccaggcgctctcctgtgcagttgtcgacctgccgatcttgttgtttgtataaacccat

SEQ ID NO: 139250 - DNA, 1389 bp, Homo sapiens
tcatttggcgcggtggtcggttccagtcgagcgcaaaggccagtggcaaccagccggttgtgggcgcagtttttcctggccgacatagtgtgcccagccgccaccgctttgcccgacacaaccgcagaagatcagcatattgatcatcccgcggtagttcatgtccatgtgataccagtggttaacacctgcgccgaggataatcatcgagcgcccatgcgttttatgggcggtatcggcaaattcacgggcgatggtttcaatatactggcgcggcacgccggtaatttgctcaccccaggctggggtgtacggtttgatttcagcgtaatctttcgcactgttttcatcttccagcccgcgatcgaggccgtaattcgccagtaccaaatcataaacgctgaccaccggacaggtgttgccatcgactaacgtcaggtttttaacgggcaattggcgcaccagcaccggattgtgttttacgctgcgaaaatgcggattttcaatgccggcaaagtaggggaaggccacgcctgcaacagcgtcatgttgaccgagcagggttaacgacaattcggtttccgtaccggcggcaatggattccagattccatttgcctttttctccccagcggaaaccaatcgaaccgttcggcactaccaattcacctgcggatattaaactggccagttcaatagtgtcgtcaacggattggctgacttcgcggctgtagcagtcatttcggtcaaacgtttcccggatatggctttcaagcacttctgccatcagcccattagccgcgccccgaacggcagcgatctgttggagtatggcacggcattcggcatcaccctccagcgaccgttccagagcatcaatctgcccccgaatacgacgaactcgagtaaggacctttttcttctcttccggagtactgggcatttcgcacctcatcatcttacagcaacagctgatggccacatcactgcgtccatcctgggtggtgtagctcccctgcatcagatgctgaccaaacacccgcacctgggtttcgtcgagatgttggcgaccgtgattggtttgcgtggcgtcaatgcctgttgaaatcagcactgacgcgtcggcgtccagtggcgtaatagtgatttccagcgcaatgagcggcagttggtctgccgaaacaaagcgacggctggcgatggtgtaacctgagccgttgcatttatgggcaatctccatccccacgacatcaggcaggttcaccagttcgttgatttcaccttttcccgcccgatgatacagccccgccagatacatccctcgcgtctggcgcgtgtaatcttcttcatggctggcgcgaagcccaagatagccgttcccctgcgccat

SEQ ID NO: 139251 - DNA, 3153 bp, Homo sapiens
tcaggatccttcgctgatatggctgatgtctgtcagccagccgcgttcgtcatactgccaccgctctgcggtttcgccattcacggtgcggtgcgtgaggcggtctgcttcgtcatagtgccagtgggtgaccagcccctcatcctcgctgcggataagtttgccggtcaggtcgtggtgataacgctgtgtgcggccgtcaaagccggtttcctgtatcagccggtcgagtacatcgtaacggaaggtggtgtggctgccgttttcactggtcaggcggatgacccgtccggcagcatcgtattccatactgcgcgtcagaccgccctgcgtggtacagatggcttttccccacgcatcgtactgtgtcccgtttctgctgccgtccggggcaatgacggtggtcaggtcaccggcggcgttgtattcataccgcgtttcatggccctgcgtgtctttcacggcaattaactgtccacggctgtcgtatgcgcggtactgactcagcccttcctcgcggtgcaccgccgtcatctgcccgaagcggtcatggtcataacgggttacataaccggaacagtcggtgaagctcagcaactgaccgtaacggctccacgtcatggttttccggctgccggtggcatcttccgttgcgcagggtaagtcactgtgtggattatcataacggtagcgggtgatatcgccgtcaggggcagtttcctgaatcagacggcccaattcatcatattcccggcgcaattccagcccgtcaggcccggtggctgacgttaactggttgtggtggttatagtaaaacgccgatgccctgcatccggcgtggttatgcgcgtgatgaggcccgtcaccacatccgggctgtactctgttgatacctgcggcatccgtctgtgccctgagcctgcccacggcgtcaaactgactctgcgtgacgctgccgtccgggggatcctctagcagagtctcgctccgtcccccgggcgcgtatcccacaatccaacgccgccagcgacgccactcctcacgcgggctgttgcattcctgtgggtatacgatgcagcgattcgcctgccgaatacggtagccgtttgccaccaatgtccaggtgagatcaaggtcttcgactttagtacgatccgagaaaccgaacttacgcaatacatcagtacggaacatcccgcaggcaccgctgataataaacggtgcgccacccaggagctgctgtagcgtgcgcttcataacaatcatcggcaactttacggtcgcgcggatgtgcggtaacagacccgcgcctttcaacgcagtagagggaatgccgcctacggcatcggcaccgcgctcaatttctgccagcatatagcccattccgtcttgatcgggcggaacataggtgtcggcatcacttaaaaaaacctggtcgcaggtggcgtaattgaggccattcatcagcgcaccacctttaccggtatttttttgcgtgacggcaacaaagcggtcgccccatttgcgtttgacttccgccatgaccgcgcaaatcggcacttcaaccgttggcgtaaagtagcggatgcgcacatcgctgtcgtcgctgtgcagcagaaaagcagtttccgaatggcctaactcgcgggcgataagctgcatttgcgcttcgctaagattatcggcggggaaaacaacaccggcagaattgccgcgaaacggttgtgaggtaaaagcatcgacgtggtacacaatttgatatcgacgagtaaagtactcaaacggcgcgctccacacatgcaccagtcgggtgaacgggaagagcaggaagatggtcattcccaacaccagatgcaggcggaagacgaacgctacgccgttgagcatctctgacgatccaccacggaaagtgacaatgctttgcgcccaacccaccagcttcatcatttcgctaccatcaggatactgtgctgaaaacggtatggtacttagccccaacagacactggatcagcaaaatgctcatgatgatgatatccggcgtagtggaagtggcacgcacgcgctgatttgtcagcctgcgccacagcagtcctgcgctgccaatcgacgtctcagtgcaggtactaactgtacatgcaacatggaaacttccagtattatcagccccagaaaaagagtttatttcagtagtaaagtccacaggaatcgtagagacaaggggtgtccccagcaaatcccgagagaactgctgcatccgcgctttctggcgcagataggtatcaaagcacatgcaaatgttgcagatcagcaagcgacctttcgccgtcacctgtattcccttctcatccacatccaccagcccatcttttgctaacggggcgagcagcttgagatcttccgcaaagtaatcagcgaagtgcaaatcccactgtttctcaataggggcgtaatccagacggaagttgcagatgagcgacgtgttgttctctgccttcgaagatctagctccctcagcctccccacgttgtccacctctccaataccattgctccactgggaagctggcccggaggtgctctaccacgttcatctctcgcagcccagggctgtctccaagatcaggctgcattagggtggccaaacattctggtttgccttggattgccaggacacgaaacttgcagtacttcccactcccattcattccacatccttgtctagccttctcaggccccagggccttatctccacggactgctccacccgggctcccttgcccttgggtttccatttggttggagcaatgggaggtaccagtaggagactggcagaggcctccggggagcatgaagagggagtccgaggcgatgtttttgagttgatcctcacgagagctgtatgaggataccctcagcagccctgcattattattctcatctttacaggtgaggaagccacgatttagagacagttgggaactccaggtaaaagcactctttttgatttcaatccatttggtttgttccaggtcttgaggccagggagttcggtttgccctcacagctgccccgtccattcccacagtcaccccacactgtacatcgtcctgtggccatgctgatggtgcctccagaggccgtggcttctccat

SEQ ID NO: 139252 - DNA, 4089 bp, Homo sapiens
ttattgaaagataacgccccggcgtgtgacagctcgccgcttaatcaatatcagcgacgctttagccaggatgtcgcgccgcaatatgtcgacatcagtgcgggaggtgggaaatgattcagtatctgaacgtctttttttacgatatctacccgtacatttgtgcgacggtgtttttcctcggcagctggctgcgctacgactacgggcagaacacttggcgcgcctcctcaagtcaaatgctcgataaacgcgggatggtgatatggtcgaatctgttccatatcggcattttggggattttcttcgggcacttgttcggcatgttaacgccgcactggatgtacgcgtggtttttgccagtggcaagcgaaacaactcatggcgatggtgctcggcggtatttgcggtgtgttgacgttgattggcggcgcaggactgctgtggcgcaggctgacaaatcagcgcgtgcgtgccactaccactacgccggatatcatcatcatgagcattttgctgatccagtgtctgttggggctaagtaccataccgttttcagcacagtatcctgatggtagcgaaatgatgaagctggtgggttgggcgcaaagcattgtcactttccgtggtggatcgtcagagatgctcaacggcgtagcgttcgtcttccgcctgcatctggtgttgggaatgaccatcttcctgctcttcccgttcacccgactggtgcatgtgtggagcgcgccgtttgagtactttactcgtcgatatcaaattgtgtaccacgtcgatgcttttacctcacaaccgtttcgcggcaattctgccggtgttgttttccccgccgataatcttagcgaagcgcaaatgcagcttatcgcccgcgagttcggccattcggaaactgcttttctgctgcacagcgacgacagcgatgtgcgcatccgctactttacgccaacgtttcgtgttattaccggtcgagcgcaaaggccagtgcaaccagccggtttgtgggcgcagtttttcctggccgacatagtgtgcccagccgccaccgctttgcccgacacaaccgcagaagatcagcatattgatcatcccgcggtagttcatgtccatgtgataccagtggttaacacctgcgccgaggataatcatcgagcgcccatgcgttttatgggcggtatcggcaaattcacgggcgatggtttcaatatactggcgcggcacgccggctggggtgtacggtttgatttcagcgtaatctttcgcactgttttcatcttccagcccgcgatcgaggccgtaattcgccagtaccaaatcataaacgctgaccaccggacagcaccggattgtgttttacgctgcgaaaatgcggattttcaatgccgccaaagtaggggaaggccacgcctgcaacagcgtcatgttgaccgagcagggttaacgacaattcggtttccgtaccggcggcaatggattccagattccatttgcctttttctccccagcggaaaccatcgaaccgttcggcactaccaattcacctgcggtataactgctacgttttccactgcggatgtgcttcgcccagtcatcaccagtctagacggatccccggcatacttaagtctggttccttcatgcagacaatcttcaggcagcagcacatctctcagcttgtggggactggtggttggacaaggagcaaacacactagtcaattcatccagcaatccaatgctgtggagctgctacccgcttcagatgcttcctaagaccacgagccacgagtgtattaggcacggcacaagcagcatgcttacgggtatcgatatcggcaatcgccacgatgttatggcgtttcaggtaagaagagaggtcttcggtattacggaagttggctggcaatcagcggcagttcgcgaatcaccagaccttgtgcatgtacctgagaagattcttcatcggcgtcattggtgccgacattgccaatatggggataagcgcgggtgccatgtggctattgagcgtaagtcaggtcagtctggctgcggtcagccaggtcgtggcggtgcgcgtctggcctgcgtccagctacacccgcgtgacggtggaatcaaatcgtcagctgaaatataagcagttcgcgttgagtaaccctgaacgcgtggtggtggatatcgaagatgtaaacctgaactcggtactcaaggggatggcggcacaaattcgtgcagacgacccgttcatcaagtcggcgcgcgtcgggcaatttgacccgcaaaccgtacggatggtttttgaattaaagccaaacgtaaaaccgcagctgtttgcccttgcgccggtcgccgggtttaaagagcgtctggtgatggacctctatccggccaatgcacaggatatgcaggacccgctgctggcgctgctggaggattacaacaaaggcgacctcgaaaagcaggtgccgccagcgcaaagtggtccacaaccgggtaaagcagggcgcgatcgtccgattgtcattatgcttgaccctggccacggtggcgaagactccggtgcggtggggaaatacaaaacgcgcgaaaaagatgtggtattgcaaatagctcgccgtttgcgctctctgatcgagaaagagggcaatatgaaggtgtacatgacgcgcaatgaagacatcttcattccattgcaagtgcgcgtagcaaaagcccagaaacagcgtgctgacctgtttgtctctatccatgccgacgcctttaccagtcgtcagccgagcggttcctctgtgtttgcgctctcaatccaaaggggtgcaagaccagtcggtgaccgctatgtcgaccacaccatgttcgatatggtacagtcgctgaccattgccgacagcctgaagtttggtaaagcggtactgaataagctcggtaaaatcaacaagctgcataaaaatcaagttgaacaggccgggtttgccgtattaaaggcaccagatattccctccattctggtcgaaacggcgtttatcagtaacgttgaggaagagcggccaaacggccagccgggccatccacttgatcccgcaaccaccatgggcaccttaatcgactgcgcccacgccgactcggttcaatagctttaattcgggaaggcgaaagcaaagggcaactgttgttggatggccgtaacgccgggctggctgccgccatcggcccgaccatctttgtggatgtggacccgaatgcgtccttaagtcgcgaagagattttcggtccggtgctggtggtcacgcgtttcacatcagaagaacaggcgctacagcttgccaacgacagccagtacggccttggcgcggcggtatggacgcgcgacctctcccgcgcgcaccgcatgagccggacgcctgaaagccgttactacgccgccagtgcgaataaatatgcaccattcgacacgctgaatgagtcaatcacctgcgacgtttgcgtggttggcggcggctataccgggctctcctccgcgctgcatctggcggaagcgggctttgacgtagtggttctcgaagcctcacgcatcggctttggcgcaagcgggcgcaatggcggacagcttgtgaactcctacagccgcgacatcgacgtgatagaaaaaagcgcgacggcgacaacgcatgtcggttttaacattgggcgcatcaacggacgcttgctggatcttgagctttccgcgctcgaacaaaaacagcagctggatattatcgccagtccgcgtctgctggcctcacatcttcagcctgccagcattatacaggggagcgaaattccatatcaggtttccagcggggaaagtggcgcgacgtcggtggaatttaaagaggccgtcctggggatggaggtcacgcccacggtgttacaaaaaggtcgcatccggctgaaattacacatcagccagaacgttccggggcaggtgctacagcaggccgatggcgaagtgctggcgattgataagcaggagatcgaaacgcaggtcgaggtcaaaatgcggagaaacgttggcgctgggcggcatttttacccgtaa

SEQ ID NO: 139253 - DNA, 295 bp, Homo sapiens
ttactttttccagaaatcatcgaaaacggtaattggcggacggcgtttatgttcggttttcagataccagttctctattgttctggcgacctgttgaggtacgtttttcccttccagatagtcgtcgatattgtcataggtcacgccgagtgccacttcatctggcagagaagggcgatcatcttccagatcggccgttggcgctttctgacgtttgttgagacgatacagcggattaatgtccgtaccgccgtcaccatatttagtgaagaaccgtaagctcatttctaaaaat

SEQ ID NO: 139254 - DNA, 1080 bp, Homo sapiens
atgctactggatgatgagtgtgaactgtacgtgctggaactgtcgagcttccagctggaaaccacctccagcttacaggcggtagcagcgaccattctgaacgtgactgaagatcatatggatcgctatccgtttggtttacaacagtatcgtgcagcaaaactgcgcatttacgaaaacgcgaaagtttgcgtggttaatgctgatgatgccttaacaatgccgattcgcggtgcggatgaacgctgcgtcagctttggcgtcaacatgggtgactatcacctgaatcatcagcagggcgaaacctggctgcgggttaaaggcgagaaagtgctgaatgtgaaagagatgaaactttccgggcagcataactacaccaatgcgctggcggcgctggcgctggcagatgctgcagggttaccgcgtgccagcagcctgaaagcgttaaccacattcactggtctgccgcatcgctttgaagttgtgctggagcataacggcgtacgttggattaacgattcgaaagcgaccaacgtcggcagtacggaagcggcgctgaatggcctgcacgtagacggcacactgcatttgttgctgggtggcgatggtaaatcggcggactttagcccactggcgcgttacctgaatggcgataacgtacgtctgtattgtttcggtcgtgacggcgcgcagctggcggcgctacgcccggaagtggcagaacaaaccgaaactatggaacaggcgatgcgcttgctggctccgcgttaccagtgtaccagtgttgaacttgatgaaaacagtaatcttgccagtctccaaatcagtctgaatggtatcatttaccttgatgaggggatcaaggtagcggatgctgtgagcatcatgagtcaccagatgagggattccttttgtgcccacaaagatttttctcactttacccaatttgtacttaccctcctcgggtgtaatacgatgtacagcaaagcgacccttggtgtcatagatcagatggatttcatacacaaaattgttgtcgctcatgacatggaccaagagtcctgtgctccttataatcag

SEQ ID NO: 139255 - DNA, 1267 bp, Homo sapiens
gcagctcgacaatgcgcccttccggtgtgaaaacgtaaatctcatccgggaagagatcgccgatgctcaggcagagattgcagtaagcatgcagctgctgcctacttaccaatatgaatacgatgctcccgtacgggtaatccccctgaccagtgaaaccgtcagccacaccacctgccgttacgatgtacttgaccggctgatacaggaaaccggctttgacgtccgcacacagcgttatcaccacgacctgaccggcaaacttatccgcagcgaggatgagggtctggtcacccactggcactatgacgaagcagaccgcctcacgcaccgcaccgtgaagggtgaaaccgcagagcggtggcagtatgacgaacgtggctggctgacagacatcagccatatcagcgaagggcaccgggtggcggtgcattacaggtatgatgagaaaggccggctgaccggtgagcgtcagacggtgcatcacccgcagacggaagcactgctctggcagcatgagaccagacatgcgtacaacgcgcaggggctggcgaaccgctgtataccggacagcctgcccgccgtggaatggctgacctacggcagcggttacctggcaggcatgaaactcggcgacacaccgctggtggagtacacccgcgaccgcctgcaccgggaaacgctgcgcagcttcggccgttatgaactcaccaccgcttatacccctgccgggcagttacagagccagcacctgaacagcctgctgtctgaccgcgattacacctggaacgacaacggcgaactcatccgcatcagcagcccgcgccagacccggagttacagctacagcaccaccggcagactgaccggcgttcacaccaccggtactgagctcgagttattcttcgatattttgacgttttgcctgatgtggtgggtattccatgccaacacgccggaaacgcaaacgctgttccagtcgggatggtttgtggtgggcttactgtcgcaaacgctgattgtgcatatgatccgcacccgccgtgtgccgtttattcagagctgtgcatcgtggccgttaatgatcatgaccgtgatcgtgatgattgtcgggatcgcattgccgttttcaccgctggccagttatctgcaattacaggcgctgccgttaagctatttcccgtggctggttgcgattctggcagggtatatgacattaacccagttggtgaaagggttctatagccgtcgttacggctggcaataa

SEQ ID NO: 139256 - DNA, 939 bp, Homo sapiens
tcataaagcgccccagatccgccgattccaacgctgcggcttttgaatttgctcgtcgtcgacgttatcaaacgggatttgatcaaccagacgagtagcgcgatcgatcccggaatgtaattggagcagtgcttttttccgcgcctgcggatcatcgtcagagagctgcgcaacttcggtttgcactttcagcgccgttaacgggctacgaagttcgtgagctgcgtcggaggtaaagcgtcgttcacgaaccatcatcgcatgtgtgcgggcgaacagttgatttagcgactcaaccagtggccgcacttcgctgggtaataaaaatataatatgttttatctgcaaccataaggaaatgataatgattttcacgtcaagttgctgcgataatttatcaatagatgagattatcgaacgtgcgttggcgatgtgcggtttgctacattcacagatgttcttcgccacttccagcagcaggtcatcaggggtgatttcaggatcgtagataaaggtcaggttcggtgaaacctgcttcaactctgcatctgcacgtaagatcgcgcgggtaatgggcgaatcagacgggccgatattggcgtgcataaaggcgtctggcagggttctgtcgaggtaacgccagaaacgttttattcgaacatcgatctcgtcttgtgttagaattctaacatacggttgcaacaacgcatccagttgccccaggtagaccggcatcgatgtgaccgacggtacgtggtggtaaagaaagcggttcgataatcgaatcaccgatggtctgacgtgggtccagcgaagcgtaagggtccttgaaaaataaactgaatatcccggcgtaatgccggctccactgaagaatcgcagttctaagcaacaacaaccgttgctgactgtaggccggataaggcgttcacgccgcat

SEQ ID NO: 139257 - DNA, 1764 bp, Homo sapiens
ctacgtgccattcagtttcacacaggttgcagtgcaggtaacgtagcccctgagtggtgccaatttgcaccatgctggacaccggcatagaaccacaaaccgggcaatattgacgttgctcgccgtattcagcgcggctttgccggggatcagattggccatctgcgcccagtagagcgacagtgcagcccagataaacggcgctttatcgctgctgacggacgagaaatcagaggcaaacagcgcgctggccatatcttccagctcctgagtcgatgccttctccagattctcaatcactgccagcgccgggccgctcatttcaggtttcagctcagcaatcagcgccatcagcagcttttgccagtgcttatcacgcggcagaacgtgaatatccagcgggggcttgccttgtgcgctggcttctttaatgcgcgcagtcagatccatctccagcggatggtcgtacagcaccacttccgccgtccagtttggataaggtggggcgctaaatatttcatttttcaccgtcatgatgtcttcaaattggttttctggatcggactctagagatccccggtaccgagctggaattctgacccgacaatcatcacgatcccggccatgaccattaacggcccacgatgcacagctctgaataaacggcacacggcgggtgcggatcatatgcacaatcagcgtttgcgacagtaagcccaccacaaaccatcccgactggaacagcgtttgcgtttccggcgtgttggcatggaatacccaccacatcaggcaaaacgtcaaaatatcgaagatcgagctgatcggtccgaagaagatcataaagcgccccagatccgccggattccaacgctgcggcttttgaatttgctcgtcgtcgacgttatcaaacgggatcgccacctgtgacacatcgtacagcaggttctgaataagcaagtgtaacggcaacatcggcaggaagggcaagaaagcactcgctaccagcacgctgaacacattaccgaagttagagctcgccgtcattttgatgtatttcagcatgttggcgaaagtgcgacgtccctcaataaccccctcttccagcaccatcaggcttttttccagcaggatgatatcagccgcttcacgggcaatatctaccgcgccgtccacagatacccaactatacccagcgcgtaagccgggcgcatcatcaatatcatcgcccataaagccgaccgggtactgaccgggctggtggaccgcttcgggcgcacacagacgttccaccgcgaagccgccggtgaattcagcggcgaaatcaccggcgtgacggatggtgcctggcgtcacttccggctggtactgaccacgcaggcgcagcgggcagaagaagcccggcagcaggccatttccggcggacggaaccgtccgcttttcctgactactgtcgcgcgctggtgcgctatcgctggagcccacgcggcgaactggcggtggtgtatgaccgtagtggcaaacaggtggcagctttacgtcagacatcaccgccacgtcatccgccagacgcgccacaacgcccatatcatgggtcaccagcagcattcccggcgcttgtttttgcataatgctttccagcagatcgaggatgcgcgcctgtgctaccacgtcaaggtcggtggtcggttcatcggcgatgataaacggtgattcacacagcaccgccatcgcaatcatcatgcgctgcgacatgccgccgctcat

SEQ ID NO: 139258 - DNA, 1401 bp, Homo sapiens
cgcaagaatggtttcatcgttatcctgcaagctatattcttcagcccactgcaggaccttgcgagccttgaaccttttttcacactcggcgctttcaaatttatccatgccattgccgacccattctggctcatccatttccgcatcatcgtaaatgctatccagccattgccggtaagcatcagggaaaaataaggatgctccattaagctcctcaatatgttgctgcgtccgccacatgactctaacgttgctataaatatgctcatgtcgtccgtaaccctcgccatcaggcagcaaaatggtggcaacaggaatctcaaaaccagcgggacgatatttgcgatgatggcgatgtaaacggcccaatcgttggaaaagcaaatctgcaggacaatgcttcccttcgatcatccctttaatcgatcctttcacccaaaatgccatatacatatggatcaggatggcgtggatcaggatgatacccgcagccgcgtggatcagcaggctgtagcgaacaacctgcatcgggaagtactgcgcaaagtacggacgccagataatcaccccggtcaccagcagcacgaaaatcatgctcatgatcgaccagaacatcatcttttgcccggcgttgtacttaccgacatccgccactttatgctcattgcctttcaatacttcgacaatgttcaacagccacggaatatctttcttatccgggatgttgtgatgcacaaaacgcacaaacataaacatcagtgcgacgaaaatcgcaatgccgaagaacgggtgcaaaatgcgtcccatagcgccaccaggaagaagcaaatcaccacggtccagtgacaggcgcgatgggcgagtacgaccctgttcatcaaccggtgcgttcagtttgttaacgataacgccggtgatgttggtgtttttggcaccgccgaagctgttgcgggtcagttcgatacgctctttcagctgttccggggtgtcagtgccctgagacataacgaagacgatttccgcattcagcgttttagcgatttcgtagttcagagactgggcaaactggtgcttacgtgtcgggaccagaccttcaaccagaacgacttcagcgtctttggtgttagcgtggtagtttgcgacgatctcttccatcagcacatctttctgattgctggaaagcagaccttcaacgtagctcattttcagcggttcagcggccgtcgtggtggaagagttcgcacgcacgatagtcgtagtctgatcgggcgcatcgccaccggtacgcggctgagcgataggtttgaaaacgctcagacgaacgcctttgcgttccattgcacggatcacgccaaggctgacgctggtcagaccgacgctggttccggtagggatcagcat

SEQ ID NO: 139259 - DNA, 1215 bp, Homo sapiens; identical to SEQ ID NO: 118998

SEQ ID NO: 139260 - DNA, 4752 bp, Homo sapiens; identical to SEQ ID NO: 123337

SEQ ID NO: 139261 - DNA, 4653 bp, Homo sapiens
ttaggagatattttcagtggtctggataataatgaccagaggagatgtagtaaccatcagccggtggcgcgtgtccagtagcccattggaaacgtggaacaagaggtgggcaaaaatcagtcctgcaccctttagcctattgcccatctctaggctggaaaagtctgagggtgactggttgcctgaaactgttatctcagctttcaatatgccttcatcactaagcttaatcatttccagcttatgatttaaagtgagagatgtgtgacacttctttccatttgaacacttagaggccattatagggttattaattggcctaatttcaatattgttgtgtctcagggaataggaaagcgcctggcgaattcgtggcttgtttttactctgtttcatcggatttagcgttaaaggaatagtccgtttccgggcaacaataagttgtaagcaaccaagcgcaggaatatgcgcattcaatagttttcctccgtgtttgttccacgggagaacgtggaaacggctggcgtgtagcacttcaaaattcaacaaagagagccagtccagctgccgcatcagagtaaacatccggctgttatagggcgaggttttgcgcaataccggcacaagtttgcgtaatcccataaaactgatgggattgaagccactaatgaccagccagccatcatcaatcaatacccgatcggcttcacgcaataaacgatgcggatcggtgcaccacggcaatgtatgtgccagtagacaaacatcaacggatttatcggcaaaaggaagatgaagtgggtccgcctgtacctggacgggcattccttgcgcagaaacattcacttgatgagaaaccgcgcacgcttcgcaattgatttctgcgcttaaattgccaatcttaagcagatgaaaaccatacattttagtgaaccacgggttgagctggcgctccagcgccttgcgataaagctttccccagggcaaatcgccccagcaatcaggagccacgacagtttgagggactcttgccggtttcatcacaaccttccgtttcacactgagaggtaatctatgaatcttaacagtattcccgcctttgatgacaattacatcaaaaattgcagtgccgatacgaaccatcgtgctacctgccgcaatggcggcttccatatcgtccgacattcccagagagagcgtgtcgatatgcgggtagcgcgttttcagtccggcaaatgctacagccatttggcgtgcaacttcaaactgccttacatattctgactcaggcgcagggattgccatcaacccgcgcagacgtaaacgcggtagttcagcgaccgcagctgccagctcgtccagttcagccagttgaatcccggacttaggggatcctctagatcgacagcagcaagctgcattaggcttggtgaggaaactaaaaacgccctgctgtgttgcagcaacggcatcgggaatagaaccatgcgcggtaagaataattaccggcattcccggctgcactttctggatttcagcaaacagctgcataccgtccatttcatccatccgcaggtcgctgatgactaaatctactttttcgcgattcagcactttacgcggtcgggcactgtataccccggcgacgtcgctccagatggttacgcgagaaacacccgccagcgcaccgatttgtgtcgcggaatagtcggaaccgttacgccccagcagcaccgtttcaccggcgttgttgcggctgataaatccggtcaccaccagacgtttgcccggatgttgcaccagcagctgttgcagcaacgggtaagaaagcccttcatcaacctgcggttgtgcggcgcgttcagcgcgtaaaaactcgcgggcatcaagccaggccgctggcagcccttgttgattaagtaccgcagacatcagacgtgccgaccatacttccccgtggcccaccacttccgcatacactgcgtcgttaataccgctgtcgagcagcgccgccaggcgctcaaggtcgctgacaaaagcgctaatgaggctatcggcttcttcagcgggtagcagaccgctaatcagatcgcactgatagcgacgcagcgtttgttgaacctgatgcgcagagagacgatcggtctggcttagtttcaaccagttaatcaactggttagtggtgctaccggcggcggaaaccaccatcatatcgtcaggctgagagtactccgccataatgcccgcgacacgcaaataacacttcacatcagccagactactgccaccaaatttatgcagctgacagacctttatatctatcagatgggaacctgcttcctgttcccagaaggcgatagaaggcccccagatccaggtggagccagcagctcccccaccacttggaggcagccaggcagtttcttggcacagatcagccagcactatgatatccgccagcgaggctttaccagactctttctggattttctccagaacaggcagagcacgaacggctgcggcgttcacatcccagtcgcgctgcggcattaatgccagacgcgcaccgttggcaccaccgcgtttgtcgccaccacggaaggtagaagcagatgcccaggccaccgataccagctcactaacagacagaccagaatccgcaatcgcgaatttcagatcgataatgtcctgctcggtcgggttgtagatcggctgcggcagcggatcttgccagatcagatcttctttcggcacttccggcccgatgtagcgagatttcggccccatatccctgtgcgtcagtttgaaccaggcacgggcaaaggcttcgttgaacgcctgcggatcgttgaggaaacgacgagagatcttctcgaactcaggatcaaaacgcagcgtcaggtcggtcaccagcattgtcggtttacgtttcttcgacggatcaaacggatccgggataatttccggtgcgtctaccgcttcgaactggattgcgccagccgggctgcgggtctgtacccactcatacttgaacaggttctcgaagaaatagttgctccactgggtcggcgtcatttcaaaccatcggcgaacaatccagatcggcgcaaagataataaccccacgtcgcaggtaaatgccactttgcggatcgcgttcgccacgtagccagacgtagcccatcagcgcatacaccacgccagaaagcccgccaaaccacggcccgctgaatttttgctgcacatagccgcttaacagggcgctgataagcgtaatgacaattagcttaccgctaccgaggcgtttttccaccgcaccgccgagataccaccaccagagcaggttaaagaggatatgcatcagcgagaagtgcattaacgcgtgggtgaagtaacgccagaactcaaatttcagtgttggatcgaatggccaggccagccataacatcacttcctgatcgccgagaatttgcatggcaataaacaccaccacgcaggcgatcatcatcacccaggttaccggacctgcgcgttcacgcaaggcggcaaagaaaggataacggcgataatgcaggccactgccggtatggcctgcctgccagctcgccgccagataacgcggatctgccgggttttcgagaaaacgcgccagctccgcccgtacgcgctcggctattgtaagctcctggagttcactcgcttgccgccttcctgcaacacgaaatccatagagtaaacaaacatcacctttcagtgcgctattgcagcagcctgaaagaatagtgtatcgaccccccgcggcggcggcaccggcactaacggtcaggcgctcaaccaggggattattgttgatatgtcccgccatatgaaccgcatcatcgaaattaaccctgaagagggctgggtgcgcgttgaggccggggtgataaaagatcaactcaatcagtacctgaaaccgttcggctacttttttgcgccggaactttcgaccagcaaccgggcaacgctcggtgggatgatcactataccgcactgctcggcgggttaaccgagaacggacgtagcgcggtgaacgtgctttcgttcctttgccttgacgccgcaaccgaacctcggcgtgcgcactaacgccttgatcgacacgccgttcctgatgaaaaccgccgaaaccattcgcttcggtaccggtattccgcaaatctttaacgatgaagtggtggtgccagcgttcctcaaccgtggcgtttcgctggaagatgcgcgcgactattccgtagtgggatctccagcagctgctgcacgccagtgggccaagtggcaggttcagcgttgtcagaccgctggcaatgccaagataaacaaacagttcgccagggttgatatgggggaagaggccattcattgagtggcagctataagaggccgccgcgtagtagctgggtttgtacttttccggcataaagcgacccaggcttagggtcatcggattgcaaaagacaaacgtgccaatgcacggtaacagtaggtaacgggaaacagggttaccggcgcaacgttgagcaaaacgttcaatacgatgctgaccgataaaattaatcagtgcgttcatgataaccagcaggctaatcaacagcggaagaatgccggtcaccat

SEQ ID NO: 139262 - DNA, 720 bp, Homo sapiens; identical to SEQ ID NO: 123401

SEQ ID NO: 139263 - DNA, 912 bp, Homo sapiens
atgccggtagtacttggcgcaggttggccgggcgtgctgttgcatgaagcggttggtcacggtctggaaggcgacttcaaccgccgtggcacttcagtatttagtggacaggtcggggagctggtggcttcagaactgtgtaccgtggttgatgatggcacgatggtcgatcgccgaggttcggtggcgattgatgacgaaggtacgccaggccagtacaacgtgctgattgagaacggcattctgaaaggctacatgcaggataaactcaacgcgcgtttgatggggatgacgccgactggcaacggtcgccgtgaatcctacgcccatctgcccatgccgcgtatgaccaacacctatatgctgccgggtaaatcgaccccgcaggaaattattgaatccgttgagtacggtatctatgcaccgaactttggtggcggtcaggtggatatcacctccggcaaattcgttttctccacttcagaagcatatctgattgaaaacggtaaagtaacgaagccggtgaaaggcgcaacgttgattggttccggtatcgaaaccatgcagcagatttcgatggtaggcaacgacctgaaactggataacggcgtgggtgtctgcggtaaagaagggcgaagtttgccggttggcgtggggccagccaacgttgaaagtcgatatcctggattgttggcggtactgcgtcataatttcactattttcagaacgatagttaatctttctacgtgcacgaacggtcccctcgcccctttgggaccccgggttgacacgttgtcccgacttttggtgggaccaaaaaggtgcaaccgtccccatggaatatccggaatgttgggcaaagttaaaatccgggccaaggggttaacccggaaggccttccgcaaatttccg

SEQ ID NO: 139264 - DNA, 1860 bp, Homo sapiens; identical to SEQ ID NO: 118995

SEQ ID NO: 139265 - DNA, 1180 bp, Homo sapiens
tatccaagctcggtacccggagatccgtcgtatgggcgtgatcacccagtaccagtcccacactctggtgcagcacattcagcgcggctggtcattcttcaatgaagagaatgaacgagtttgtcgatctgctgccagcacagcaaagaatgaaaggggaaaactggtatcgcggcaccgcagatgcggtcacccaaaacctcgacattatccgccgttataaagcggaatacgtggtgatcctggcgggcgaccatatctacaagcaagactactcgcgtatgcttatcgatcacgtcgaaaaaggcgcacgttgcaccgttgcttgtatgccagtaccgattgaagaagcctccgcatttggcgttatggcggttgatgagaacgataaaattatcgaattcgttgaaaaacctgctaacccgccgtcaatgccgaacgatccgagcaaatctctggcgagtatgggtatctacgtctttgacgccgactatctgtatgaactgctggaagaagacgatcgcgatgagaactccagccacgactttggcaaagatttgattcccaagatcaccgaagccggtctggcctatgcgcacccgttcccgctctcttgcgtacaatccgacccggatgccgagccgtacttggcgcgatgtgggtacgctggaaactttatggaaagcgaacctcgatctggccttatccgcgtgtcatgcatgcctgcaggtccaccgctgccactgccagcagcaaggtcagaagcgccgaaagcagcaggaactgttgcgagcgttccatcgatcgccccagcgcgccttcgtcctgttccagaccccgtcgagctggttctcgttgccgccgaatttataacgccaggtgacccgactccccggctgcacggctccggttttatcgacatccgccagattcatcatcagacgcggagccatctggaaggggttaaaaccggaatccggttcctgaatcacttctccggcaatccgcaaggtggcatcgcccacgtcaatggtgtcgcccgttttcaggttaagcagtgccatcaggcgtggggccagcaatacgctgcccgcctgcggtttcaggccagggggattagtttgcagatcgccatacatcgggtagatatcatccaccgctttgacgttcgccagctgcg

SEQ ID NO: 139266 - DNA, 591 bp, Homo sapiens
ctgcccccttattaacacgtagcccactccggttgtgcggctgaaaccctgaactgtgtggtccatgggtcccgttgtggggacaccagcccgtccaatccgtacgtctggtgcgtgttggtggtgctggtaggttacggtgttattggctttgttgatgattatcgcaaagtggtgcgtaaagacaccaaagggttgatcgctcgttggaagtatttctggatgtcggtcattgcgctgggtgtcgccttcgccctgtaccttgccggcaaagacacgcccgcaacgcagctggtggtcccattctttaaagatgtgatgccgcagctggggctgttctacattctgctggcttacttcgtcattgtgggtactggcaacgcggtaaaaagctttcgtgcctgcaggtccatgacagatatcatcaccttcgccacgcaccatcatgttgccttcgtaagcctgaaggaatttcgtacgggctttttgcaacgtggaatcgtcatccagcatggcatcgttttgcgcgtcataacaggtttttagccacgcgccgccactttcaggtaacaccagcaatggcgcggacat

SEQ ID NO: 139267 - DNA, 3390 bp, Homo sapiens; identical to SEQ ID NO: 118996

SEQ ID NO: 139268 - DNA, 4247 bp, Homo sapiens
tcatcgacaacacagcctgttaagctctggtggagtgccatcgtttattggtgggctggtggtgtttgtgtcggcagcgttcaatgcacaagctgaaacctggttcgatcctgcttttttcaaagatgatccctcaatggtggccgatttgtctcgtttcgaaaaaggacaaaaaataacgccaggtatcgtgtcgatattgttctgaacgcgacgcaagcgccgtggaatgaacattacaaaatgtatgactatatccgcaacgagctgaccttgtgacataagactcaccgggtcgtaatccaatttaatgctctgccagcaatgccggaacgatatgtccgttcggcaaatgaccaggaaattatacggcccaaacaccgccagcacgccgtgcgggcgatgtcgcaggctcgccgcgccgtccggcatttcactacgctgctcgccggtacgaacgtgatacgccttaattgatatcgcgattttattgatcatcgccgtcacttcggttgccgcttcccagcgcggcttacccgtttctctggcaataatcgcggttaattcggctttattgctttccagcagtgcggcaaagcgttcgacaacggcatgacgttcagcaaatgaaagccgcgcccagcgcggaaacgccgcacgggctgcccgacaagcctgctcgacctgagcggcatcggcatcattgccttgccataacacctcgcccgataccggattacgcttcacacgcgatgcgcccagacgaacgcgatccccggcgtggcatttgagggcatccagttgtgcggcggttaaaatcaaacgctcggttgccggatcggtacgcaccagcaccacgcggaaatggtgataattttcattggcgaccaggcaggctgggaaatcgccctgcgcaggctgcccttctgccacttccaccagccgacttttacggatggcgcgcacgcggtcgatgtcacactcaagcgtcggcccaccgtcaaagatgtcgatatagttacggtagcgaaaaccttctttctccagcaccgcgcgggcaggcgcggtttgcggatgtacctgaccgatgacgtcctgggcttcgcccaggcgtttgccgaagcaacgggcgatcatacacgacatccggcagatcaggtgatcccgcagcaagatccgcgaatacctttgatttgatccaatttttctggtcgtccgaataacagatgcgcgtaacgtcgtggcatcctgaccttcattacttaaatgaacgtcgagcgcaccactggggtgttcaatatgatatgccgtatctacagaagggacgatttgtcgggtgacggtgccttccaatgcacaactactggaaatagcaatagcaccggttatcgccagcgcgcgatggcaagaatgcggcataaaataacgcacattaattgccccgcctttctgcgctggagaaataagcacaggtttagggataaccatattactgacatcacctaagcccattgctttacccgcttgtagacggatagattcaatgcgggctaataatgctttgtcggcatccagttccgccggtaattcataacctgtttttcccagatattcagccggaataatgacgactggcatcgccatatcgatacaggtcaccgggacatcgtcaaaataatcaatctgattatcagtcgggaaaacttttccggttttggttccagcggcattcaggaaagtgagcgcaaccggtgcggcagtacccggtacgccgtcaattctggcgctaccctcgtactcgacaacaccatttggcgtttgcacatcagcttcgatgaacgtacccgtattgacgttgcggatacgtacgcgagtaactggcgaagtcgctgcaatcaaaccattttcaatggcgaatgccccaacaccagacagcatattgccgcagttaggcgtggtatcgacacgttgctcatgaacgattacctgcgcaaacagataatcgacatcagcacgcggatcgctggaacggctaataatggcgactttactggggtagccggtaccttcgattaatccgtctggtttgggcatgatactgatgtagtcacgctttatcgttttcacgaagctctctgctattccgttactctccggactccgcaccgccgtgttcttcggttcaagtcccaacatccgggcgaactggcgtgtttcattagcccggtagcatgaaccattatccgtcagccactccactggagacgacggaagatcgttgccgaagcggcgttccaccgctcccagcatgacgtcctgtactgtttcactgttgaagccgccggtagtgaccgcccagtgcagtgcctcacgatcacagcagtccagcgcgaacgtgacacgcagtctctctccgttatcacagcagaactcgaacccgtcagagcaccatcgctgattgctttctttcacgggcactctgggcgttatctcttcgaaacggacgattttgccgtcgcgcattccctgataaagcggggcagggaccagcgcttccgttgacggaccatgattgataagcagggcgtagttccagccatacttgatttgatcttcggtggtagatgccccgccctggatggttaacccggcatcgccgctaatagcggttgccagtaattcagaaagaagagattttgcggtacccggttcccccaccaacatcaaaccgcggccggtagcaagagtgactaacatacgttcgacagcggaggggctaatcaccactttacggctgatattttgcgcttcgtcgccaaggataaaagcacgggccgcaggcaaacttaactgccaaccgggcgggcaaggtgcgttatcattttgttttaattttgccagttcatcggcgtataacacagcagcaggcggacgctgcaaatgattattcagacggcgcactttaggcaagcgtgtaatatccagccgcgcttcggtaataaaggccagcgtcccttctgaacccgtcagaatgcgcgtcaggtcgaactcggtcatctcatcgttaaagacatgacgcagatcgtaaccggtaagaaagcggttaagtttggggaagttgtcgataattaactggcgttgctgacggcaacgttgataaaccgtgttataaattcgcccgattgtggtattggatttacccagcgtttccgccaattcgacgggtaaaggttgcgtatcgagaatatcgccccccaacaacaccgcgcgtacgccaagtacgtgatctgacgttttgccatagaccagcgatccctgaccggatgcatcggtattgatcatcccaccgagcgttgcccggttgctggtcgaaagttccggcgcaaaaaagtagccgaacggtttcaggtactgattgagttgatcttttatcaccccgggctcaacgcgcacccagccctcttcagggttaatttcgatgatgcggttcatatggcgggacatatcaacaataatcccctggttgagcgcctgaccgttagtgccggtgccgccgccgcggggggtaaagatcagcgatgaatagcgttcctgcgcggcaagacgggcgatcagcgccacatctgcggttgaacgcggaaataccaccgcatcggggagaagttggtaaatactgttgtcggtcgacattgtcagacgatcggcataacttgtcgccgtatcgccggtaaaaccttgttgctccagctcttgcaaaaaattaagcaccagttgaacgacgccgggtgcctgggaaatctgtggaatcattatattgaccctttcctgcggtctgtgatgtaggtcgatacactattctttcaggctgctgcaatagcgcactgaaaggtgatgtttgtttactctatggatttcgtgttgcaggaaggcggcaagcgagtgaactccaggagcttacaatagtaagtgactggggtgaacgaacgtagccgcagcacatgcaacttgaaatacgacgagtaaatcgtttgcgtgttgcctgagttgttgtaccacatttttttctaacacgcccatcagaattaagggcagaatcggcctgttaaaaaccgctgaaattgctcatcattatgcaggtgagtttcgcgtgttcacgtcgcgtcgacgatttgacgcacaaaaaaggtgaaaagtagttatggtaaatgttcgtcagcccagggatgtcgcacaaattctgctttcgg

SEQ ID NO: 139269 - DNA, 4944 bp, Homo sapiens
atggtcatcttttttggccgggaaaatctgcctgctttaaaccagaacgatgtgctggtgtacgggcatacccattgccagggccgaaaaggggggggattttcacttaccccgctcgggggtattccaaggggggatccccttaagcaagactactcgcgtatgcttatcgatcacgtcgaaaaaggcgcacgttgcaccgttgcttgtatgccagtaccgattgaagaagcctccgcatttggcgttatggcggttgatgagaacgataaaattatcgaattcgttgaaaaacctgctaacccgccgtcaatgccgaacgatccgagcaaatctctggcgagtatgggtatctacgtctttgacgccgactatctgtatgaactgctggaagaagacgatcgcgatgagaactccagccacgactttggcaaagatttgattcccaagatcaccgaagccggtctggcctatgcgcacccgttcccgctctcttgcgtacaatccgacccggatgccgagccgtactggcgcgatgtgggtacgctggaagcttactggaaagcgaacctcgatctggcctctgtggtgccggaactggatatgtacgatcgcaattggccaattcgcacctacaatgaatcattaccgccagcgaaattcgtgcaggatcgctccggtagccacgggatgacccttaactcactggtttccgggcgtgggccgacgcttgagtgtgacatcgaccgcgtgcgcgccatccgtaaaagtcggctggtggaagtggcagaagggcagcctgcgcagggcgatttcccagcctgcctggtcgccaatgaaaattatcaccatttccgcgtggtgctggtgcgtaccgatccggcaaccgagcgtttgattttaaccgccgcacaactggatgccctcaaatgccacgccggggatcgcgttcgtctggtgcgcctatggtgcgattcgccaggtgatgcgccagtgccagttgttgatgattatcgcaaagtggtgcgtaaagacaccaaagggttgatcgctcgttggaagtatttctggatgtcggtcattgcgctgggtgtcgccttcgccctgtaccttgccggcaaagacacgcccgcaacgcagctggtggtcccattctttaaagatgtgatgccgcagctggggctgttctacattctgctggcttacttcgtcattgtgggtactggcaacgcggtaaacctgaccgatggtctcgacggcctggcaattatgccgaccgtatttgtcgccggtggttttgcgctggtggcgtgggcgaccggcaatatgaactttgccagctacttgcatataccgtatctgcgacacgccggggaactggttattgtctgtaccgcgatagtcggggcaggactgggcttcctgtggtttaacacctatccggcgcaggtctttatgggcgatgtaggttcgctggcgttaggtggtgcgttaggcattatcgccgtactgctacgtcaggaattcctgctggtgattatggggggcgtgttcgtggtagaaacgctttctgtcatcctgcaggtcggctcctttaaactgcgcggacaacgtattttccgcatggcaccgattcatcaccactatgaactgaaaggctggccggaaccgcgcgtcattgtgcgtgtctggattatttcgctgatgctggttctgattggtctggcaacgctgaagggtaaaaatgtcgtcattatcggcctgggcctcaccgggctttcctgcgtggactttttcctcgctcgcggtgtgacgccgcgcgttatggatacgcgtatgacaccgcctggcctggataaattacccgaagccgtagaacgccacacgggcagtctgaatgatgaatggctgatggcggcagatctgattgtcgccagtcccggtattgcactggcgcatccatccttaagcgctgccgctgatgccggaatcgaaatcgttggcgatatcgagctgttctgtcgcgaagcacaagcaccgattgtggcgattaccggttctaagggcaaaagcacggtcaccacgctagtgggtgaaatggcgaaagcgccgggggttaacgttggtgtgggtggcaatattggcctgcctgcgttgatgctactggatgatgagtgtgaactgtacgtgctggaactgtcgagcttccagctggaaaccacctccagcttacaggcggtagcagcgaccattctgaacgtgactgaagatcatatggatcgctatccgtttggtttacaacagtatcgtgcagcaaaactgcgcatttacgaaaacgcgaaagttacgtgtaagcgcctgcaatacacgggcggttgtacttttccccaccgcgacactgccagcaatactgataatgtaaggaatgcgttgcccgttggtaccaagaaactgttccagaactgcctgacggcgcagattcgagcttatatagaagttcagcaaacaccaaagccggaagataaagtcaaagcggtgaccgagctgaatcaacatgcgccgctggcgatggtcggtgacggtattaacgacgcgccagcgatgaaagctgccgccatcgggattgcaatgggtagcggcacagacgtggcgctggaaaccgccgacgcagcattaacccataaccacctgcgcggcctggtgcaaatgattgaactggcacgcgccactcacgccaatatccgccagaacatcactattgcgctggggctgaaagggatcttcctcgtcaccacgctgttagggatgaccgggttgtggctggcagtgctggcagatacgggggcgacggtgctgggaccgaagcacgtaccctgtcccaatcgtcgtgatgaagagaacatgccgggttcccgccgcgaagtgaaaaacgcgcgggaagaaggcgtagagttcaaattcaacgtccagccgctgggtattgaagtgaacggtaacggcaaagtcagcggcgtaaaaatggtgcgtaccgaaatgggcgaaccggacgccaaaggccgtcgccgcgcggagatcgttgcaggttccgaacatatcgttccggcagatgcggtgatcatggcgtttggtttccgtccacacaacatggaatggctggcaaaacacagcgtcgagctggattcacaaggccgcatcatcgccccggaaggcagcgacaacgccttccagaccagcaacccgaaaatctttgctggcggcgatatcgtccgtggttccgatctggtggtgaccgctattgccgaaggtcagctggagcaacaaggttttaccggcgatacggcgacaagttatgccgatcgtctgacaatgtcgaccgacaacagtatttaccaacttctccccgatgcggtggtatttccgcgttcaaccgcagatgtggcgctgatcgcccgtcttgccgcgcaggaacgctattcatcgctgatctttaccccccgcggcggcggcaccggcactaacggtcaggcgctcaaccaggggattattgttgatatgtcccgccatatgaaccgcatcatcgaaattaaccctgaagagggctgcatgacagctgcctgcgtgaagccatcagtttctcagtcaatggcccctcgccaagggctcttcgaggatctcccgtcatcacagtgccgtttattggcgcttaaacacgttctcctgaacctactaagggaccgttacgatgaccgccagtcagcattattcaccacgacaaatcccgcgctggccgcagatagacgaatctcgctggaaggagaaactcgcgaaatcacaagttacttcccgatgcagtttgttcgctacagcctgctgatccacgcggctgcgggtatctcgctgatccacgccatcctgatccataggtatatggcattttgggtgaaaggatcgattaaagggatgatcgaagggaagacacccacgccgttatccagtttcaggtcgttgccaaccatcgaaatctgctgcatggtttcgataccggaaccaatcaacgttgcgcctttcaccggcttcgttactttaccgttttcaatcagatatgcttctgaagtggagaaaacgaatttgccggagaacctgctgtacgatgtgtcacaggtggcgatcccgtttgataacgtcgacgacgagcaaattcaaaagccgcagcgttggaatccggcggatctggggcgctttatgatcttcttcggaccgatcagctcgatcttcgatattttgacgttttgcctgatgtggtgggtattccatgccaacacgccggaaacgcaaacgctgttccagtcgggatggtttgtggtgggcttactgtcgcaaacgctgattgtgcatatgatccgcacccgccgtgtgccgtttattcagagctgtgcatcgtggccgttaatgatcatgaccgtgatcgtgatgattgtcgggatcgcattgccgttttcaccgctggccagttatctgcaattacaggcgctgccgttaagctatttcccgtggctggttgcgattctggcaggcgttttcgtggtggccaccgatcatgcagcagaagccattaccggattcttcactaaatatggtgacgtcggtacggacattaatccgctgtatcgtctcaacaaacgtcagggtaaacagttactggcggcattagcttgcccggaacacctttataagaaagcgccaacggccgatctgcgcagatgatcgcccttctctgccataacacagtggcactgccccgtgacctatgacaatatcgacgactatctggaagggaaaaacgtacctcaacaggtcgccccaacaatagagaactggtatctgaaaaccgaacataaacgccgtccgccaattaccgttttcgatgattcctggaaaaagtaa

SEQ ID NO: 139270 - DNA, 1219 bp, Homo sapiens
atggtggtggctgcttccaagatggtggcaagcctcgtgttctctgccctggggttcttggcctcacagattccaaggaatggaatcttgggccatgtggaactgtggcaagcctttagcccaatcaagagtggcaatgggtgccttgctggatcaagagcacagcagacaccctgccagatccagagggatagaagtcagcggcgggtctgcgactgcggccggcatcagtggtggacagcgagcgaaagctcagctcgagctgtaacaaacacggaccagaagagtgcagttgcaagatttaatagaatatgtcgctatccatcagtggtctcggacaaacatccggtgccgttctactcttgcatctttgatgattcgataactaactgttattcatggagcatcagcaaagacgggtattttatttttggcggtgcatatccaatgaaagacggtcagacgcgtttcttgacgatgaaagataaaatgagcgcctttcagttccagtttggtaagacggtgaaaagcgaaaaatgcacggtgctgtttccctcgcgcgggcaggattttgtatgcggtaaggacaacgcctttctgattggtgaagcggcgggatttatcagcgccagctcgctggaggggattatctatgcgttgtatagcacagacattccgcgttcggtgttactgaagcagccagacaagctcaatcccgcttattggcgtgccacccgcctagtgtgtataacactcttcggccagatagtaaacaccatatgcatggccgcaccggatttaagaaaatggattatgctcagtcctgtggctcataaagggcatcatctagagtgggtcctgcacgacatgcaaattctaccagtaccgagacctagtggatgcatttgttcagggagctcaacttttttttgcaattggggttgcccatatgataggccccagtggcagctgtacccttccatgtgtctatgtgttcacattggtccagctccagtcagaagtgagaaagttgaatccaaaagggccatatcgaaagtagatcaggattcagctttcagaggatgctgtagatctggaaatcgcaacggaggaagaaagatcgttgctgtaagcctgaaaaaagtatcgggtgctgctaaaccgtgtggacacttccgtagcaccagatatcgagtggcttattcaaccataataaaca

SEQ ID NO: 139271 - DNA, 1161 bp, Homo sapiens
cttggcattcgcacaccttcaactgaacaaccgattgaatttctctccggcggcaatcagcaaaaagtgttgctttcacgttggctactgacccgaccgcaatttctgatcctcgatgagccaacccgcggcattgatgttggtgcccacgccgagatcatccgcctgattgaaacgctatgcgccgatggtctggcgctgctggtgatctcctccgaactggaagagctggtgggctatgccgatcgggtgattatcatgcgcgatcgcaaacaggtggcggagatcccgctggcagagctttccgttccggcgatcatgaacgccattgcggcgctgatgctaatcatagtgaccccagggtttgctgtgcagattaaaggagataattcaggtcgtggtgccgagcccagtgcctggcacagaacaggtttgcagtcagtgtttactgtcggtaccggtgacctcagctgtgcatgggagagaaagaaatgctcgttttcgaattaccaggtgcagaacgaagggcagcgatacgcgttgagtcaggcgaaatccatcgctgatgaactgatgaccgggtgtacaaattttgcgttcagcggaaaacctggtaccgggaagaaccacttagcggcagctatcgggaatcgcctgctgaaagacggtcacacagtgattgtggttaccgtggctgatgttatgagtgccctgcacgccagctatgacgatgggcagtcaggcgaaaaatttttgcgggaactgtgcgaagtggatctgctggttcttgatgaaattggcattcagcgcgagacgaaaaacgagcaggtggtactgcaccagattgttgatcgccggacagcgtcgatgcgcagcgtggggatgctgacaaacctgaactatgaggccatgaaaacattgctcggcgagcggattatggatcgcatgaccatgaacggcgggcgatgggccacacacaacaatgaccggaacagaatccattatgagcatttcagccgccataacacgaccgtgacccgcaataatttcgcccttttcgtcaatcagcaccggattaatccagccgaattgcttaatactttctaccagttgtgccacctgctcagtactgtgcgtcctggcgttgtgcgcatacggtga

SEQ ID NO: 139272 - DNA, 2478 bp, Homo sapiens
tcaccccatcgcccgccgtttcatggtcatgcgatccataatccgctcgccgagcaatgttttcatggcctcatagttcaggtttgtcagcatccccaccgtgcgcatcgacgctgtccggcgatcaacaatctggtgcagtaccacctgctcgtttttcgtctcgcgctgaatgccaatttcatcaagagcgagcagatccacttcgcacagttcccgcaaaaatttttcgcctgactgcccatcgtcatagctggcgtgcagggcactcataacatcagccacggtaaccacaatcactgtctgaccgtctttcagcaggcgattcccgatagctgccgctaagtggttcttcccggtaccaggttttccgctgaacgcaaaatttgtacacccggtcatcagttcatcagcgatggatttcgcctgactcaacgcgtatcgctgcccttcgttctgcacctgggtaattcgaaaacgagcatttgcggtgcaatggctggatgccagagggattgcagaattttttccacccgcaagctgacgattctgacgggttgatctcctcacagacgtttcctggccttcggaaagttggcactcgcgccagtccggtaacggtcttaaaatgtcgccgcttaggtgtgacgcggccgagtcgttgcacttgaattctctgcaggtcctttgcgtggtaaaaatagcttcttcacccaacaccatgattttgtccgtacttctcctcctccgggcgaccagttgcaggagatcgttatcaagaatggtgatggtgcgctgtagctgattgaactgctggatttctttctgtgagcgttgatgcaactcggaagcttgcgaaaaaatcataaacgccagcacgctaagcattgagaaaatcgccagcgccgccatgacctccagcaatgtgaaaccctgctggcgattaatcatcttgtgcctgcccggatttattatcgatgctttgataacgcgtaagcaggttgtctgaccgctgggtaatgtcaccgttatggtgcgttccagaagcgtgccgtctttgcttgagtggatatcgctgcgccagttccactcttcgccatttattaactctttgccagaactggacgtgttttccagttcgaatgaatcttgtgactgaagctgggtatccgctatccacaatgccagcgtctcgttacgcattcgctcgatggcatttcgttgcccttgcatactgctcattaaagtcagagcaacagcgctgaaaatactcatcgcgcaataagcctcaaggcagtgccacccttctttaccgcagaacggcgaggtgttaacgcagaagaacatagaaacggtcggctcatcaacggagagtgccggcagcgcttcaacgttttgcgtgtcgcaaacggtgtcagaaatgttcagttcgccaaggcccgtgatcgcaacgatatcgccagcttccgccagatcggtttcgatacgttccagaccgaggtggcccagcactttaccgactttcgcgttgcgggttttgccttcgctatcgatgatagtgacctgctggttcggcttcactttaccgcgcttgatgcggccaatgccgataacgccaacatagctgttgtaatcgagctgagaaatctgcatctggaacggaccgtcaaggtcaacgtccggcgcaggaacgtggtcaacaatcgcctggtacagcggggtcatgtcttccgccatatcttcgtggtccagacccgcgataccgttcagcgcagaagcgtaaacgatcgggaagtccagctgctcgtcggtcgcgtcgaggttaacgaacagatcgaatactatgcggatgcattcgttataatgctcgaacgcctctgcaaggttctttgctgccgttaacccgtctggtttgggcatgatactgatgtagtcacgctttatcgttttcacgaagctctctgctattccgttactctccggactccgcaccgccgtgttcttcggttcaagtcccaacatccgggcgaactggcgtgtttcattagcccggtagcatgaaccattatccgtcagccactccactggagacgacggaagatcgttgccgaagcggcgttccaccgctcccagcatgacgtcctgtactgtttcactgttgaagccgccggtagtgaccgcccagtgcagtggctcacgatcacagcagtccagcgcgaacgtgacacgcagtctctctccgttatcacaagagaacttgaacccgtcaggaggacatcgctgattgctttctttcagggccactctgcctgtatgtgcccgtttcgatgggcggtaaagaagtttttcggtaagcaacaagggatgaacgagccggtccggggatctcggcggaacatcaataccacccgcgaccgccagataactgcgcatcccgtgctgcgggcgtttaagcgttaaacgctggcctgctttcat

SEQ ID NO: 139273 - DNA, 2586 bp, Homo sapiens
atggctcgcacaaaactgaaattccggctgcatcgggcagtgattgtcctgttctgtcttgccttgttagtggcgctgatgcagggagcgtcatggtttagtcaaaaccaccagcgacagcgtaatccacagctggaagaactggcccgcaccctggcgcgtcaggtgacgctgaacgttgcaccgctgatgcgtaccgactcaccggatgaaaaacgcattcaggcgatcctcgatcagttaacggatgaaagccgtatcctcgacgcgggtgtgtatgacgaacaaggcgatcttatcgcacgttctggcgaaagcgtcgaagtgcgcgaccggctggcgctcgacgagaacccgaccactgtgatgaatttcggaccgctacctctgaccgccaactggaccgattctcccggataccatactgcagctggtcgtctgtggaatatgagccccggtcagcttaaacgtggcgactatcagttgattgtgaaatacggtgaatttcttaacgaacagccggaactgaaacgcctggcagagcagctggggcgttctcgggaagccaaatcaataccgcgcaacgatgcgcagatggaaaccttccgcaccatggtgcgcgaaccggcgacggttcctgagcaggttgatggtctgcaacaaagcgatgatattttacgtctcctgccgccagaactggcgacactagggataacggaactggagtatgagttttaccgtcggctggtggaaaaacagttgctcacctatcgcctgcacggtgagtcgtggcgtgaaaaagtgatcgaacgtccggtggtacataaagattacgatgaacagccgcgcgggccgtttattgtctgtgtggatacttccggctcaatgggcggctttaatgaacagtgtgcgaaagcgttctgcctggccttgatgcgcattgctctcgcagaaaaccggcgctgctatattatgctattttccaccgagatcgtccgttatgagctttcaggcccacaaggcatcgaacaagcaatccgttttttaagccagcagtttcgtggcggcaccgatcttgccaaacccgttcttcctgtggcaccggactgggcgctgatcccgctgctgatcatcgccgcactggcgacggtgattgcctcgcaggcggttatctctggcgtcttctcattgacgcgtcaggcggtacgtctgggatatttgtcgccgatgcgcattattcacacctccgaaatggagtcagggcaaatctatattccgtttgtgaactggatgctctatgtcgcggtcgtgattgtgattgtcagctttgagcactccagcaacctggcggcggcgtacgggattgcggtgaccggaaccatggtgctgacgtctattctctcgactaccgtggcacgtcagaactggcactggaataagtattttgttgcgctgatcctgattgctttcctttgtgtcgatattccattgttcaccgctaacctcgataaactgctctccggcggctggttgccattgagcctcggtactgtgatgtttatcgtgatgaccacctggaagagcgagcgtttccgcttgctgcggcggatgcatgaacatgcaattaaaatgttatctcaagagaaatggacgatgagtgatatagcattaacggtcagtattctggctttggtggcagtcgtcggtttgtttatcggcaacgtcaaatttcgcggcataggattaggtattggcggcgtgctgtttggtgggatcatcgtcggccattttgtttctcaggcggggatgacattaagtagcgatatgctgcatgttattcaggaatttggcctgatcctgttcgtttatactatcgggattcaggtagggccgggcttctttgcctcattgcgcgtctccggattacgcctcaacctgtttgctgttctgatcgtcatcatcggtggtctggttaccgccatcctgcataaactgtttgatattccactgccggtagtgctggggattttctccggtgcggttaccaatacgccagcgctgggggcagggcagcagattttgcgcgacctgggtacaccaatggaaatggtcgatcagatggggatgagttacgcgatggcgtatccattcggcatttgcgggattttgttcaccatgtggatgttgcgggttattttccgcgtcaatgtcgagacagaagctcagcagcacgagtcttcacgcaccaatggcggcgcgctgatcaagactatcaatattcgccaagacggttattttatctttggcggtgcctatccaatgaaagacggtcagacgcgtttcacgacgctgaaagagaaaatgagcgcctttcagttccagtttggtaagacggtgaaaagcgaaaaatgcacggtgctgtttccctcgcgctggcaggattttgtctgcggtaaggacaacgcctttctgattggtgaagcggcgggatttatcagcgccagctcgctggaggggattagctatgggtaccgagaatcgaagtggagtgaatttgctgttcccgtggacacccctggattgtaa

SEQ ID NO: 139274 - DNA, 1080 bp, Homo sapiens
cgatgctgctttcggctctgctggtaaattatcgcccggtatgcagtaacgaaatttaccgccctgatttacgcgaatcagacgacctttgctgattgccattgccagcgttgaagccactttgcgtgatgtggtaccaaacaatgtagccagctcatcagccgtttgtggtcctcgttgttcaatcgtcgcggttaaatcgcactctgagattttcgctactgttgctgtggtgatttcttccggcagttctgcctgcgctggctgttcctgctgaacattgttatcagccacacgccaggtgtacgcgcttttatcaacaaaaccagcctttttcagttcccatagttcgttcagcacttcttcacgactgatatcaagtcgcgcagcaagttctatggatgtggcttttcccattgctttcagtgcgtcaaaaacagtctccattaaatttttctcccggtaaaaattacttcgcaattcccatcgcccgccgttcatggtcatgcgatccataatccgctcgccgagcaatgttttcatggcctcatagttcaggtttgtcagcatccccacgctgcgcatcgacgctgtccggcgatcaacaatctggtgcagtaccactgctcgtttttcgtctcgcgctgatgccaaattcatcaagaacgtcttccagcaggcgattcccgatagtgccgctaagtggttcttcccggtaccaggttttccgctgaacgcaaaatttgtacacccggtcatcagttcatcagcgatggatttcgcctgactcaacgcgtatcgctgcccttcgttctgcacctggtaattcgaaaacgagcatttgcggtgcaatggctggatgccagagcgattcagaattttttccacccgcaactgacgattctgacggttgatctcctcacaacgtttctggcttcggaaagttgccactcgcgccactccgctaccgtcccctgaagcctggcgggatcgcactatccggtaacgagacggtgttaacctgtcggagtaacgtctcaggtcgaacaccttgcggcgcgacaacgcctgtgtactaat

SEQ ID NO: 139275 - DNA, 1647 bp, Homo sapiens
ttactgccccaaactactgcaatcctggttggggtaaaatttccctgccgtatcgggtgccaatactttagtcggcgcaccggtatccggattaccctcaagcgtaaagtgaccttctactgacagtaacaccggtttttcactgtgaccgcgcgcagccaggtagctacgctccagctctgcgttattcgctaccatgaaacgttttccggtcgcgcaatcagtgaaggtcgccgcatcagccatataaaaatacatgccccgcagggtcatcggcgtcataggtaaactggattgtgccgcttccagcgtatagttgaactgcgattcaatcggattgccttcacgatcgagcatctccagcgcatcgcctttcgcccgataatatgacttttcacctttgctgtcggttaataccagcttgtcagcggttcgcgcccatgtaccgtaggaagcggagccgactctaggttggcgcatcgacgctgtccggcgatcaacaatctggtgcagtaccacttgctcgtttttcgtctcgcgctgaatgccaatttcatcaagaaccagcagatccactcgcacagtccccgcaaaaattttcgcctgactgcccatcgtcatagcgtctttcagcaggcgattcccgatagctgccgctaagtggttcttcccggtaccaggttttccgctgaacgcaaaatttgtacacccggtcatcagttcatcagcgatggatttcgcctgactcaacgcgtatcgctgcccttcgttctgcacctggtaattcgaaaacgagcatttgcggtgcaatggctggatgccagagcgattcagaattttttccacccgcaactgacgattctgacggttgatctcctcacaacgtttctggccttcggaaagttgccactcgcgccactccgctaccgtctgtcggagtaacgtctcaggtcgaacacctttcggcgcgaacaagccctggtattcattggcgatgctgtgtcgaatcacctgctcaggtgaaaaaccctgctggcggaatttttccagctcccgtatcgccccgttagcgccctgctccgttcgaatcggttttcgcaatgcctggcgaaattcaacccactcacgccaaaggaccacataaacgggaatatcttgtttttgatcagccagaccgtgaataccgcttgcggtgggggggtccatttcgcccaccataattgacgaacgctcattggtggccggcgggcttgccaggaaacttaacaccggtttggtccgtttgaatatcagtcccgcctcttcaatcgcttcgcgacggggaacatcttccacactttcaccctcttcaatcatcccggcaaccatctccagtagccaaggggtttcgctggtgtcgtacgcggcaatccgaatctgctcaatcagcacaagttcatcacgcagtgggtcaaagggtagcaagactgcggcgtgaccgcgctcaaaaatttcccgccgcacctcatgactcatttgcccgttgaatagacgatgacgaaatctataaagatctaatgaaaaaaagccgcgataaagtgtttctcgtgcaataatttgtacatcgtttttgccaaatgtaacgggcaggttgtctggcttaagcat

SEQ ID NO: 139276 - DNA, 1805 bp, Homo sapiens
  misc_feature (1)...(1805): n = a,t,c or g
atgcgatttaccgatgtnaactggaacctgacgccgtatgcatcgttaacggggttcaccgctgataaccccgaatatcatttatccaatggcatgaaatcgaaatcagtcgatacccgcagtatatatcgtgaactgggcgcaacgctgagttacaacatgcgtctggggaacggtatggaagttgagccgtggctgaaggcggctgtgcgcaaagaatttgtcgatgataaccgggtgaaagtgaatagtgacggtaatttcgtcaattatttgtcgggcagacgtggaatataccaggcaggtaaagatttagatcgcttcaaaaatctggtcctggtgcacgccgcacgttatgccgccgacttaagctatttgccactgatgcaggaactggaaaaacgctacgaaggaaaactgcgcattcagacggtggtcagtcgggaaacggcagcggggtcgctcaccggacggataccggcattaattgaaagtggggaactggaaagcacgattggcctgccgatgaataaagaaaccagccatgtgatgctgtgcggcaatccacagatgacaaggaggctgatccccgccagcgttgaggtttatcacgacagcctgtgcccgaaaaatctggcacggctgggagcaacatattaccgcccgctatctggtcggtgccgatggcgcaaactcgatggtgcggcgacatctctacccggatcatcaaatccgtaaatatgtcgctatccagcagtggttcgcggagaaacatccggtgccgttctactcctgcatctttgataattcgataactaactgttattcatggagtatcagcaaagacggttattttatcttctgcggtgcctatccaatgaaagacggtcagacgcgtttcacgacgctgaaagagaaaatgagcgcctttcagttccagtttggtaagacggtgaaaagcgaaaaatgcacggtgctgtttccctcgcgctggcaggattttgtctgcggtaaggacaacgcctttctgattggtgaagcggcgggatttatcagcgccagctcgctggaggggattagctatgcgctggatagcacagacattctgcgttcggcattgcgaaaaccgattcgaacggagcagggcgctaacggggcgatacgggagctggaaaaattccgcccagcagggtttttcacctgagcaggtgattcgacacagcatcgccaatgaataccagggcttgttcgcgccgaaaggtgttcgacctgagacgttactccgacaggtgcagaacgaagggcagcgatacgcgttgagtcaggcgaaatccatcgctgatgaactgatgaccgggtgtacaaattttgcgttcagcggaaaacctggtaccgggaagaaccacttagcggcagctatcgggaatcgcctgctgaaagacggtcagacagtgattgtggttaccgtggctgatgttatgagtgccctgcacgccagctatgacgatgggcagtcaggcgaaaaatttttgcgggaactgtgcgaagtggatctgctggttcttgatgaaattggcattcagcgcgagacgaaaaacgagcaggtggtactgcaccagattgttgatcgccggacagcgtcgatgcgcagcgtggggatgctgacaaacctgaactatgaggccatgaaaacattgctcggcgagcggattatggatcgcatgaccatgaacggcgggcgatgggtgaattttaactgggagagctggcgtccgaatgtcgtccagccaggaattgcgaagtaa

SEQ ID NO: 139277 - DNA, 372 bp, Homo sapiens
  misc_feature (1)...(372): n = a,t,c or g
attgaaactgctgtgccatcattattgatacctgacctcattgatgtgcatgctcagtccctggctgcgctgcaggcttactctcactggttagcacagtattgcagtgaagttcaccggcagaacacgcagcagttcgtgacactcatctctactaccatggatgcaatcacacctctaatcagcaccaaggtccaagacaagctgctgctatctgcgtgccacttactggtctcactggccaccaccgtgcggcccgtctttctgatcagcatccctgcagtgcagaaagtattcaacagaatcactgatgcctctgccctgcgacttgtcgataagagaatgagcagcagtggcccgtgcgctccatcn

SEQ ID NO: 139278 - DNA, 377 bp, Homo sapiens
tgaagctctaggcctgctactgcctggggacacggacttctgctgctgccacctgcgccagccctaccttccacctggaaatcccgcggggtggcccatgcagaccaggcgcacgtggctcatggggcagaattgccaaggacagctcacgacagtgccaccttctcaccattccagccaaggagagatgtgacgttggaactgctctggcacttctgtcaagcctcccccgccccaattgccttgagatctctgctctttgtcagagatttgcaaagactcacgtttttgttgttttctcatcattccattgtgatactaagaaactaagaagcttaatgaaaagaaataaaatgcctatgttgttgttctagaaa

SEQ ID NO: 139279 - DNA, 1011 bp, Homo sapiens; identical to SEQ ID NO: 116282

SEQ ID NO: 139280 - DNA, 1338 bp, Homo sapiens
atggccctagctgccatcgtctccttcatggaccgctgcagtcgcctcctaactggactccagccattcacgcctcccttcaggtacgaagatgccctggtgctcctgctcacagaggtgttgaatcgaatccagttcagatacaaccaagcccagctggaggagttggatgatgagactctggatgacgatgtccaagacaagctgctgctatctgcgtgccacttactggtctcactggccaccaccgtgcggcccgtctttctgatcagcatccctgcagtgcagaaagtattcaacagaatcactgatgcctctgccctgcgacttgtcgataaggcccaggtgttggtgtgccgagccctctctaacatcttgctgcttccgtggccaaaccttccagagaatgagcagcagtggcccgtgcgctccatcaaccatgccagcctcatctctgcactctcccgggactatcgcaacctgaagcccagtgctgttgccccacagagaaagatgccactggatgacagacacaggttgaacatcacggcggagaacgactgccggcggctgcactgctccctgagagacttgagctccctgctgcaggccgtgggccgcctggccgagtactttatcggggatgtgtttgctgcacggttcaatgatgccctcacagtcgtggaaagcatgcttcttatgggatctgtcccggctctgcgtccctcccctgatgtgaaggccgagctgtttgagctccttttccggacgctccatcacaactggaggtacttcttcaagtccaccgtgctggccagtgtccagagggggatcgctgaggagcagatggagaatgagccccagttcagtgccatcatgcagacactcagcgtcttagaagatattgtggagaatatctcgggggagtccaccaagtctcgacagatttgctaccagtcgctgcaggaatctgttcaggtctccctggccctctttccagcttttatccatcagtcagatgtgactgatgagatgctgagcttcttcctcactctgtttcgaggccttagagtacagatgggtgtgcctttcactgagcaaatcatacagactttcctcaacatgtttaccagagagcagttagccgagagcatcctccacgagggcagcacaggctgccgggtggtggagaagtttctgaagatcctgcaggtggtggtccaggagccaggccaggtgttcaagcccttcctccccagcatcatcgccctgtgcatggagcaagtgtatcccatcattgccgaggagcagctgctgaagaacactggcttctggtga

SEQ ID NO: 139281 - DNA, 2407 bp, Homo sapiens
  misc_feature (1)...(2407): n = a,t,c or g
gacacaggttgaacatcacggcggagaacgactgccggcggctgcactgctccctgagagacttgagctccctgctgcaggccgtgggccgcctggccgagtactttatcggggatgtgtttgctgcacggttcaatgatgccctcacagtcgtggaaaggttggtcaaagtcactctgtacggatctcagataaaattgtacaacattgaaactgctgtgccatcagtattgaaacctgacctcattgatgtgcatgctcagtccctggctggcggctgcaggcttagtgctcactggttagcacagtattgcagtgaaattcaccggcagaacacgcagcagttcgtgacactcatctctactaccatggatgcaatcacacctctaatcagcaccaaggtccaagacaagctgctgctatctgcgtgccacttactggtctcactggccaccaccgtgcggcccgtctttctgatcagcatccctgcagtgcagaaagtattcaacagaatcactgatgcctctgccctgcgacttgtcgataaggcccaggtgttggtgtgccgagccctctctaacatcttgctgcttccgtggccaaaccttccagagaatgagcagcagtggcccgtgcgctccatcaaccacgccagcctcatctctgcactctcccgggactatcgcaacctgaaagcccagtgctggtgccccacagagaaagatgccactggatgacaccaaactgattatccaccagacacttcagcgtcttaggaagatattgtgggagaatatctcggggggagtccaccaagtcttcgacagattttgcttaccagttcggttgcagggaatctgtttcaggtctccctgggcctctttccagctttttatccatcagtcagatgtgactgatgagatgctgagcttcttcctcactctgtttcgaggccttagagtacagatgggtgtgcctttcactgagcaaatcatacagactttcctcaacatgtttaccagagagcagttagccgagagcatcctccacgagggcagcacaggctgccgggtggtggagaagtttctgaagatcctgcaggtggtggtccaggagccaggccaggtgttcaagcccttcctccccagcatcatcgccctgtgcatggagcaagtgtatcccatcattgccgagcgtccctcccctgatgtgaaggccgagctgtttgagctccttttccggacgctccatcacaactggaggtacttcttcaagtccaccgtgctggccagtgtccagagggggatcgcttgaggagcagatggagaatgagccccagttcagtgccatcatgcaggctttcggacagtcctttctccagcccgacatccacctttttaaacaaaatctcttcttacttgggagactctcaacaccaagcagaagctgttaccacaagaaggatcttccgggactgccatggttgttccagtttgtgaacgtgctgctccagggtcctgggtccacaagtcccatgatcttctggcaggagggagattgggcatcggcattcttacaacatggcctcagtcgactttgaatggcttctttgccgccttcctcccagagttcctggaccagctgtggatggtgtgggatgccaaccagaaaagtgtgctggggcggaattttcaagatggatcggctatgcccctgccttccaggacctgcgcctcattcacccagaatgtgcacaggctggtcgacgacctgcggcttacttacagactctggcaacgacagccttgccccctggggactgtggaagcttttagggccttgcttactgcctggggggacaagggatttcttgctggttgccacctgacgccagccttaccttccaccacagatgtctcccagatgggccttggtcacactccttgggcttctcccaccgcaagcaacgttgcctggccttttgccgctcctccacatcttggccgctgcccagcagagctgcgtntctgggtccacctgagcactggacggtgctcccagggcgttggagcaggcggaggggtgtgtggccaggatttaggggcctgggaattccctgagctcatgtcagttactcctaaacggcacattctgatggcggaaggagacagcatcccggtcactgttcccattgagtcacaaggagatggaggcccaaagcatgactcacctggggtcacagagctggaagccaaactgattatccaccagacactcagcgtcttagaagatattgtggagaatatctcgggggagtccaccaagtctcgacagatttgctaccagtcgctgcaggaatctgttcaggtctccctggccctctttccagcttttatccatcagtcag

SEQ ID NO: 139282 - DNA, 6493 bp, Homo sapiens
  misc_feature (1)...(6493): n = a,t,c or g
atgagaaagtacaacagccttgttgttgatatgaggaaggtttcagtggtttggatagaccaagctagccacaacattcccttaagccaaagccaaatccagatcaggcccttcaattctgtgaaggctgagagaggtgaggaagctacagaagaagagttggaagctaacacagctagcggctgtgcctctcgacttcacagctatcttctggctctccactgcttcactgtgcgcctttgtggtgtgccctctccccacctgtttgcctccagcactgcttctttgccagagtcacctggttgctgcatgcactcactggtcactaaatccccatgcggggatcctctagagcccgacgatgccaccttgtttaaacaaaatctcttctacttggagactctcaacaccaagcagaagctgtaccacaagaagatcttccggactgccatgctgttccagtttgtgaacgtgctgctccaggtcctggtccacaagtcccatgatcttctgcaggaggagattggcatcgccatctacaacatggcctcagtcgactttgatggcttctttgccgccttcctcccagagttcctgaccagctgtgatggtgtggatgccaaccagaaaagtgtgctggggcggaatttcaagatggatcgggtgtgcgagggaatcagttctctaagtcgactgcagaatgagctcagctatatcgagaagtttactgactttcttcggctctttgtgagtgttcacctaagaagaatcgagtcttactcccagttccctgtggtggagtttttgacacttttgttcaagtacacatttcatcagcctactcatgaaggttacttctcttgtttggatatctggacgctgtttttggactatctgacaagtaaaattaaaagtcgtcttggagacaaggaagcagttctcaacaggtacgaagatgccctggtgctcctgctcacagaggtgttgaatcgaatccagttcagatacaaccaagcccaggctggaggagttggaatgatgagactctggatgacgatcagcagacggagtggcagcggtacttacggcacagcttggaggtggtggccaaagtgatggagctcctgcccacgcacgccttctccacactgttccctgttcttcaggacaatttaggaagtttatttgggattacaacagtttatagtcacttcagggtcaggacacaggttgaacatcacggcggagaacgactgccggcggctgcactgctccctgagagacttgagctccctgctgcaggccgtgggccgcctggccgagtactttatcggggatgtgtttgctgcacgggttcaatgatgccctcacagtcgtggaaaggttggtcaaagtcactctgtacggatctcagataaaattgtacaacattgaaactgctgtgccatcagtattgaaacctgacctcattgatgtgcatgctcagtccctggctgcgctgcaggcttactctcactggttagcacagtattgcagtgaagttcaccggcagaacacgcagcagttcgtgacactcatctctactaccatggatgcaatcacacctctaatcagcaccaaggtccaagacaagctgctgctatctgcgtgccacttactggtctcactggccaccaccgtgcggcccgtctttctgatcagcatccctgcagtgcagaaagtattcaacagaatcactgatgcctctgccctgcgacttgtcgataaggcccaggtgttggtgtgccgagccctctctaacatcttgctgcttccgtggccaaaccttccagagaatgagcagcagtggcccgtgcgctccatcaaccatgccagcctcatctctgcactctcccgggactatcgcaacctgaagcccagtgctgttgccccacagagaaagatgccactggatgacaccaaactgattatccaccagacactcagcgtcttagaagatattgtggagaatatctcgggggagtccaccaagtctcgacagatttgctaccagtcgctgcaggaatctgttcaggtctccctggccctctttccagcttttatccatcagtcagatgtgactgatgagatgctgagcttcttcctcactctgtttcgaggccttagagtacagatgggtgtgcctttcactgagcaaatcatacagactttcctcaacatgtttaccagagagcagttagccgagagcatcctccacgagggcagcacaggctgccgggtggtggagaagtttctgaagatcctgcaggtggtggtccaggagccaggccaggtgttcaagcccttcctccccagcatcatcgccctgtgcatggagcaagtgtatcccatcattgccgagcgtccctcccctgatgtgaaggccgagctgtttgagctccttttccggacgctccatcacaactggaggtacttcttcaagtccaccgtgctggccagtgtccagagggggatcgctgaggagcagatggagaatgagccccagttcagtgccatcatgcaggctttcggacagtcctttctccagcccgacatccacctttttaaacaaaatctcttctacttggagactctcaacaccaagcagaagctgtaccacaagaagatcttccggactgccatgctgttccagtttgtgaacgtgctgctccaggtcctggtccacaagtcccatgatcttctgcaggaggagattggcatcgccatctacaacatggcctcagtcgactttgatggcttctttgccgccttcctcccagagttcctgaccagctgtgatggtgtggatgccaaccagaaaagtgtgctggggcggaatttcaagatggatcgggtgaggagagaaagaggccgggctaagaggagggcagagtgggcacgcaagcctggcacctgtgcagcaaggagggggcacattgaggcctctgggcgtggtctgtgcccaccctgcagcttggcggcagctcacgagatgcctgctgacctggtgctgtagcctgattgaggggcacagccttttccccagtcttggtgtctgtagcacgtatgttcttagtctcagccatggaggtcccgagttcctggctctgcagcccctccatttgtcttggcatctttgttcatacccaggaccctgccgttctccctcctgggtgatgagccccggtggggccagcattggagtgtgcccaggcttgcattcaggctgagatggttggtgcttgggagctgcacttctgggtccccagggttagaggtgggacccaggttccccggctgtcttgggctctttccagaccagccccagctcagcttgggctgagttgctgccaggtcctgggaggagccctcctagtactcaccctcttgtcccactgctgccacctgtgcagggactgtcaggtgggctgtccccacccgtgcagcacctcggtgggagctgggtgctgctggctcttggtgtccatgaggccatcttgttggagcctgacagtgcctgggacctccttccccatggggctcacctgttctcttcttcctgtgtcaggtgaccaggcctctctcttgcctgataggaacttctgggaacttttccttgtaccgttttatacttgatgaaattaggaaaagaaatcgctttctccctggtcctcttggggttcttgacctgagtcctctgtgaagcagcttgtccacggctccaccgtagtgctcagatgcacacattgctctcactggtgcaaacctggccgcctgctttcctcatttgccacgtgtggcagggaagcttttgcttagactcatcctgttctcctttgtcttggggtcttccttttcttgggacttgttctctcctaagcctcttccagttcacttcagcccctggatatgttttttcctttttctagaggccagatcctaatacttaatgatcagcttctaacgacatcaatatcagtcaactttttgatttaaagctgtggtttcaaaatctagttataggccaggcgcggtgtctcacacctgtaatctcagcactttgggaggccaaggcgggcggatcacttgaggttagggggtttgagaccagcctggccaacatggcgaaaccctgtctctactaaaaataaaaaaaattagtcaggtgtggtggcacacgcctgtaatcccagctgcttgggaggctgaggcacaagaatctcttgaacccgggaggcagaggttgcagtgagcggaggttgtgccactgcactccagcctgggcggcagagtgggactttgtctcaaaaaaaaaaatctagttatatcagaagcacctggggtacttattaaaaatggagaaacagacttctgtgttctacccaggaaggtctggtttggcatttgggagccactgatttaaaagacatcccttagttggttttttgagggtaaaataaaagaatcaccaccttccattcagtcacgcactgtgtgtttgaagccagctgcttctcaagccccgggccaggaactggggcaccagtcccagccttcaccaagtctttcatggtagacaggccaatacagcaccctctgtggaccacatagtgccaagcatgtgacatgtcttggctcgagtaagccttctaacaagcctctgaagtgtgggtcctgttactcccccatttcacagatggtgggggctcagaaggtgagcagttcacagaacttggaagtggtagagctgcgaagcaggaggcagacctgggtgttctggccccagagcctgcacacactccccagaagcagattgctcaggacagaggcgctgagctggctgctggggccaggaaataggaggcatctgtgcagactttgggaagaggcaggctttgaatggagttctggaagaggaatagtggttgggcaggaaaatgaacttggtcctgctcatggctctgctggggcttgctgggcctgtttgagtcctcaccgggacctacactgaaaaaaaaagcagggtctcaccagtgtgcatgatggcggaggtcagggcctcacttctggcccagggccttccatggcccacgctgcgcccagtgggacaggccttgggactgtgtttgctgctgctcgggtggctctcgaggggcaggggcggcctgggagccccgttgggtaaagggtcttgcagacattgctcggtgttgcgcgttcacctcaaggggccatggtgaagaagagggctgtcaccacagccatgtctgcgtttgaggggccggactcaggagcaagtgtgctggtctcttcagtgtgagctggggccagcttcttcatggtgcagcgctttggtctttctgtccttagactagtggttctggtagggcttggtggcagccttgtggtgaggactcagtgagttgatgtctgtatgttgattgcagcagtgtctggcacccgagaggccctatggacgtattcctcttgttctttttctcccacagcgcctggcacagagtctctgtgacacgcagtgcaacagtgaatagaagttttgagttttagaaagtgctcccctatcttcagtgcacactctgggatggaagtagctgttggggtctggtgggtgggtgacctggtgtgttgttggctgcagctatgcccctgccttccaggacctgccctcattcacccagaatgtgcacaggctggtcaacgacctgcgctactacagactctgcaacgacagcctgccccctggcactgtgaagctctaggcctgctactgcctggggaacacggacttctgctgctgccacctgcgccagccctaccttccaccacagatgtctcccagatgggccttggtcacactccttggcttttcccacccgcaagcaacgctgcctgcctctgccgctcctccaaatcttgcccgctgcccagcagagctggcttctgggtcccacccttgagcacttggacggtgctccccagggcgttggaaccaggcggaggggtgtgtggcccaggtacctaggaggccaccaggaaaatcccgcggggtggcccatgcagacccaggcgcacgtggctcatggggcagaatttgccaaggacagctcacgacagtgccacctttctcaccattccagccaaggagagatgtgacgttggaactgctctggcacttctgtcaagcctcccccgccccaattgccttgagatctctgctctttgtcagagatttgcaaatgactcacgtttttgttgttttctcatcattccattgtgatactaagaaactaagaagcttaatgaaaagaaataaaatgcctatgttgttgttctagaannnnnnnnnnnnnnnnnnnnnnnnccctcgggggggggccgggaccccatttccccttataggggggggtataacaattccggggcggcggtttaa

SEQ ID NO: 139283 - DNA, 877 bp, Homo sapiens
atgatctcggttgcgaatgagattgccgaagctggttttgatccgcaggggcgtaccagcgaagatctgctggatctggctgaatcccgcgtctttaaaattgccgaaagtcgtgcgaacaaagacgaagggccgaagaacatcgccgatgtgctcgacgcaaccgtggcgcgtattgagcagttgtttcagcagccacacgatggcgttaccggggtaaacaccggttatgacgatctcaacaaaaaaaccgctggcttgcagccgtcggatttgatcatcgtcgccgcgcgtccgtcgatgggtaaaacaacatttgcgatgaccctcgtcgaaaacgccgggcgaagtgttgcaggataaaccggatacttatcttctcgctggagatgccatcagaacagatcatgatgcgttctctggcgtcgctgtcgcgcgttgaccagactaaaatccgtaccgggcagctcgatgacgaagactgggcgcgcatttccggcaccatgggtattttgctcgaaaaacgcaatatctatatcgatgactcctccggcctgacgccaacggaagtgcgttcccgcgcacgccgtattggcccgtgaacacggcggcatcgggcttatcatgatcgactacctgccactgatgcgcgtaccggcgcttttcgataaccgtacgctggaaattgcagaaatctctcgctcgctgaaagcactggcgaaagaactgaacgtgccggtggtggcgctgtcccacttgaaccggtctctggaacaacgtgccgaggaacgcccgggcaactccgacctgggggaatctggctctatcgagcaggatgcggacctgatcctctagagtccccctgggggatggaagc

SEQ ID NO: 139284 - DNA, 1872 bp, Homo sapiens
ttagacggcggaccagtacccaatccgattattacacccaggagcaattgttatcccagttacaggacaattatcccaacccgttgggcaaacaactttcccgaacagataggtctgtacccattccggagtgacatccacgagatatacccacaccgtgacacttggtacccgaacgctccagtcgaaagagaaccgggtgtgagtcaaaattaccagttggttgatgtcaaacagtgctcttccagggacccttaaactgttggctcttattttaaagtgttctacctgtgtaagagttttacctagatctgaactgcggaatctggaacgccagggcaactcgatagcgtcggtggttttgctttctggcagagctgtcaaaaatacgccaagtgcggctaacatcagtgccttgcggacatcgtgcgtgaacgtgccgttgtccgtgagatgatctcggttcgaatgagattgccgaagctggttttgatccgcaggggcgtaccagcgagatctgctggatctggctgaatcccgcgtctttaaaattgccgaaagtctgcgaacaaagacgaagggcgaaatccgatgttcgacgaccgtggaaaacgtggtgagccgtcggatttgatcatcgtcgccgcgcgtccgtcgatggtaaaacaacatttgcgatgaacctcgtcgaaaacgcggcgatgttgcggataaaccggtacttatcttctcgcagactaaaatccgaccgggcagctcgatgacgaagactgggcgcgcatttccggcaccatggtattttgctcgaaaaacgcaatatctatatcgatgactcctccggcctgcgccaacggaagtgcgttcccgcgcacgccgtattgcccgtgaacacggggcatcgggcttatcatgatcgactacctgcaactgatgcgcgtaccgggctttccgataaccgtacgctggaaattgcagaaatctctcgctcgctgaagcactttgagaaattagccctaatttgcgggtgccggaataacggtacaacccgctattgtaagagcttgctggcgtaaaggtaatattggcctgcacaactagcggaataggttgcttaacgtaataacctgacgcgctacgaccgggtataatacttgggacattagagacttgtgtaggaaaccatggccggctactacccccgcggaatgcctttacggtaatacaactaccgataacagttagcctaccggtatgcctttgtgttgctagtacggatgcgggtatacgcctgcccttagcgcgatacacaaaatgtgggctaattggcagcagcaccgactgtgaatggccaacgcggatgtactttaggagtgcacgaataaacctgcggagaacggttgatatccgcgatacgggggaatatttgttagtggcagccttttgtgagcgtgttggaagagatgtatagaccgctcggcgccgcatgccagcgaatgcgccgcgacccagacgtaaacgttctacgcccacgacaccccacttggcagcggccggcacgccataccgcagactaccgcggaccccgaccgacggcggccgcttggggcagaaccgcttgagagaagagcgggtagtggggggactggatggggaaatgatattgccggctatacaatcgcctgtgacgttaaacacaggaatatgaggaattgcggcagcagtgaccacgcaataggcgcccaacctggacactggggctgatgccgacggcactaaacggatacgccacttaacgacagtgttgccgcacgtcttgcctcgcccttcctgaatttccgtttggcagcattggtctgtgcttaccggcaccat

SEQ ID NO: 139285 - DNA, 525 bp, Homo sapiens
atggctgtcagcagaatgaatcttgttggctcaggcctgaagactgcactggattcttttgctgacttgaaccttttcatgccttcagctcttttagatcgatttatgaagaaacacaatctaaacagaccaataaaaggtaaggagattgaatcagaaataaaaagatactcatcaaagaaaagcccaagaactggtcattccgtcgcggcgtatgttgatatcgccagacgtcatggcctggaccctgctcagatggcgctcgcgtttgtacgccgtcaaccgtttgttgccagcactctgctgggcgcaaccacgatggatcagctgaaaactaacatcgaaagtttgcatctggagttaagcgaagacgtattagctgaaattgaagcggtgcatcagcgccgttattgccagcgcaaacagcgcaccgaagccaatgccaatgggcacgaccgggatgcctatcattaccgccagcgagtaaatgcccagcatcaacaacatggcgctgttttcgccaag

SEQ ID NO: 139286 - DNA, 884 bp, Homo sapiens
ttatgttttgctggcacgttttttaggaggaggtcgtcaaccgcaccaggcctcgatcaccaggctggagggggggcacggttcttttcaacagcccggcgatgatggacatctgcaaagacaccgccaaaattggccctttctcaggccagggttctggattaccggtgaaagcggcaccgggaaagagttgattgccagagcgattcactacaattcgcggcgggcaaaggggccgttcataaaagtcaattgcgcggcccttccggaatcgttgctcgaaaagtaaactgtttggtcatgaaaaaggtgcatttactggtgcacaaaccttgcgtcagggattatttgaacgagccaacgaaggtactctgctcctcgacgaaattggcgaaatgccgctggtactacaagccaaattacggttcattctacaggaacgggaatttgaacggattggcggccatcagaccataaaagttgatatccgcatcattgctgccaccaaccgcgacttgcaggcaatggtaaaagaaggcaccttccgtgaagatctcttttatcgccttaacgttattcatttaatactgccgcctctgcgcgatcgccgggaagatatttccctgtgtagctaatcacttttttgcaaaaattcagtagtgagaatcagcgcgatattatcgacatcgatccgatggcaatgtcactgcttaccgcctggtcatggccgggaaatattcgagacctttccaacgatatgtgaacgcgccgtcgtgatgaattcaggcccgatcattttttctgaggatctttcgccacagattcgtcagccagtctgtaatgctggcgaggtaaaaacacccctgtcggtgagcgtaatttaa

SEQ ID NO: 139287 - DNA, 2472 bp, Homo sapiens
atgccatcagatatatcgctcgccagttgccggctacgcgcaacctcacgcttatttaccgatcaccgcaggcaatcagactgtatgactgctattaatcgcatccctattgtggatgatgaagataatgttcgccgattcgaaacacattgtgcgaacaacgtacgcacagcattacacctgtttgccgatattcaccctgatgtggtgttgatggatatccgcatgccagagatggacggcatcaaggcactaaaggagatgcgcagccatgagacccggacacccgttattctgatgacggcctatgcggaagtggaaaccgccgtcgaagcgctacgctgcggagccttcgactatgttattaaaccgtttgatctcgatgagttgaatttaatcgttcagcgcgctttacaactccagtcaatgaaaaaagagatccgtcatctgcaccaggcactgagcaccagctggcaatgggggcacattctcaccaacagcccggcgatgatggacatctgcaaagacaccgccaaaattgccctttctcaggccagcgtcttgattagcggtgaaagcggcaccgggaaagagttgattgccagagcgattcactacaattcgcggcgggcaaagggggcgttcattaaagtcaactgcgcggcgctgcgggaatcgttgctcgaaagtgaactgtttggtcatgaaaagggattatttgaacgagccaacgaaggtactctgctcctcgacgaaattgggcgaatgcgctggtactacaagcaatactacgcattctacaggaacgggaatttgaacggattggcggcatcagaccataaaagtgatatcgcatcattgctggcaccaacgcgactgcaggcaatggtaaaagaaggcaccttccgtgaagatctcttttatcgccttaacgttattcatttaatactgccgcctctgcgcgatcgccgggaagatatttccctgttagctaatcactttttgcaaaaattcagtagtgagaatcagcgcgatattatcgacatcgatccgatggcaatgtcactgcttaccgcctggtcatggccgggaaatattcgagagctttccaacgttattgaacgcgccgtcgtgatgaattcaggcccgatcattttttctgaggatcttccgccacagattcgtcagccagtctgtaatgctggcgaggtaaaaacagcccctgtcggtgagcgtaatttaaaagaggaaattaaacgcgtcgaaaaacgcatcattatggaagtgctggaacaacaagaaggaaaccgaacccgcactgctttaatgctgggcatcagtcgccgtgcattgatgtataaactccaggaatacgacgccaccggcttctttcgtgacggcatgaccatcatggtgggcggatttatggggattggcactccatcccgcctggttgaagcattactggaatctggtgttcgcgacctgacattgatagccaatgataccgcgtttgttgataccggcatcggtccgctcatcgtcaatggtcgagtccgcaaagtgattgcttcacatatcggcaccaacccggaaacaggtcggcgcatgatatctggtgagatggacgtcgttctggtgccgcaaggtacgctaatcgagcaaattcgctgtggtggagctggacttggtgggtttctcaacccaacgggtgtcggcaccgtcgtagaagaaaggcaaacaagcattgacacttcgacgcgcaaaaggccatttgaactgggacgtccgtcgcgcaataatgacaagggcatccgcccgagatcaggcgctggatcggaagaatatccgcgaacgctgcatgacagcctcaagcgcctacagactgattacctcgatctttatcaggtgcactggccgctgcgcccgttctactgcttcggcaaactcggttatagctggacggattctgcgcctgcggtttcgcagctggatacgctggacgcactggcagagtaccaacgcgcgggaaaaattcgttatatcggcgtgtcgaacgaaactgcatttggcgtaatgcgctacctgcatctggcggacaaacacgatctgccgcgtattgtcaccattcagaacccttacagtctgttaaaccgcagttttgaagtaggtctggcagaagtcagccagtatgaaggggtcgaactgctggcctattcgtgcctgggtttcggcacgctgaccgggaaatatctcaatggtgcaaaacccgctggcgcacgtaatacgctctttagtcggttcacccgctatagcggtgagcaaacgcaaaaagccgtcgcggcgtatgttgatatcgccagacgtcatggcctggaccctgctcagatggcgctcgcgtttgtacgccgtcaaccgtttgttgccagcactctgcctgggcgcaaccacgatggatcagctgaaaactaa

SEQ ID NO: 139288 - DNA, 894 bp, Homo sapiens
atgaatttccgccacctgctggagcagcatcaactggcccgccaattgttcaagaccatcaatcgctggctggccgaagcaggcgtcatgatgactcaaggcaccttggtcgatgccaccatcattgaggcacccagctcgaccaagaacaaagagcagcaacgcgatccggagatgcatcagaccaagaaaggcaatcagtggcactttggcatgaaggcccacattggtgtcgatgccaagagtggcctgacccacagcctggtcaccaccgcggccaacgagcatgacctcaatcagctgggtaatctgctgcatggagaggagcaatttgtctcagccgatgccggctaccaaggggcgccacagcgcgaggagctggccgaggtggatgtggactggctgatcgccgagcgccccggcaaggtaagaaccttgaaacagcatccacgcaagaacaaaacggccatcaacatcgaatacatggaagccagcatccgggccagggtggagcaccatttcggatcatcaagcgacagttcggttcgtggaagccagaccaatctgtcagaggcagtcttcgacggcctgctacagtgctctaaagtgcacttggtgcattggagcagcagcaaggagaaagccaggaggagctggggagatccagcggggaagcgagagaaagaacggcaggaaacggagggcccaagccacaggcctttccagctttgtgagagccgtattacaggtgcggtgataattgaaaaccatgtggagttaaccgaccacgccgtcgttgaagcctttgatggcgacacggttcatgtccgtggtccaaaagtcattaacggcgaggagcgcattacgcgaacgccgctggcagggttattgtga

SEQ ID NO: 139289 - DNA, 1617 bp, Homo sapiens
atgctgaagtttattcagaacaaccgtgaaatcacggcactgctggcggtggtgctgctgtttgtattacccggttttctcgaccgccagtatttaagtgtgcaaacgctgaccatggtttatagcagcgcgcaaatcctgatcctgctggcaatgggcgcgacgctggtaatgcttacgcgcaatattgatgtttcagtgggttcgattaccggaatgtgcgcggtgctgttggggatgttactgaacgcaggatattcactacctgttgcttgtgtcgcgactttactgcttggtttgctcgcgggatttttcaacggtgtcctggtcgcgtggctaaagatccctgccattgttgccacccttggcacgttagggttgtacagaggcatcatgttgctgtggactggcggcaaatggattgaagggttacccgccgaactgaaacagctctccgccccgctgctgcttggcgtttcagcaattggttggttgacgataattctggtggcatttatggcctggctgctggcaaagacggcgtttggacgcagtttttatgccacgggcgataatttacagggcgctcgtcaactgggcgttcgtactgaagccattcgcattgtggcattttcgttgaacggctgcatggcggcactggcgggaattgtgtttgcttcgcagattggttttatccccaaccagaccggtaccgggctggagatgaaagcaattgcagcctgcgtgctgggcggcattagtttgctcggtggttccggtgcgatcattggtgcggtactcggcgcatggttcctgacgcagatcgatagcgtactggtgctgttgcgcattccggcatggtggaatgattttatcgcgggtctggttctgctggcggtgctggtgtttgatggacgcctgcgttgtgcgctggaacgtaatctacggcggcaaaaatatgcccgctttatgacgccaccgccatccgttaaacccgcttcgtcagcaaccagtgactttatctgcattggcattgtcgccctaccgctaacgatggtgattgtcagtggcgggatcgatatttcgtttggttcgaccatcggcctctgcgccattgcattgggcgtactgtttcaaagtgagccttctctgcatgatggcttcttatatgccatgcagaattctcaccatgaatttgtgatctgcaatattaaaaatgttctctttgtggctgttgaacatggaaaggagtcctttcggccagcaaagttgccaaggcttagctgcgagcccgtcatggaggaaaaaggtcaggagaaaagcagtctgttggagaacgggacagtccaccagggagacacctcatggggctccagcggttccgcatctcagtccagacagggcagggacagccactcctccaacctgtccgaacagtaccccgaatggccagccgaagacatgtttcaccatcccgcgtcatgcaagctcatcaagggaaagactaagtcagaggagtccctctctgatcttacaggttccctcctccccctgcagcttgatattgggccctcacttttggatgaggggctgaatgtcacggaaaaaaataagtaa

SEQ ID NO: 139290 - DNA, 1051 bp, Homo sapiens
atggacggcatcgccacgctgaaagagatcaaagcgttaaacccggcaattccggtgctgattatgactgcgtactccagcgtcgagacggcggtagaggcactgaaaactggggcgctggattatctcatcaagccgctggatttcgataacctacaggcgacgctggaaaaagcgctcgcgcatacgcacagtattgatgctgaaacacctgcggtgactgccagccagttcggtatggtcggtaaaagcccggcgatgcaacacctgctcagtgaaatcgccctcgtcgcgccatcggaagccacggtactgatccacggcgattccggcaccggaaagagctggtcgccagggcgattcacgccagtagcgcacgtagcagaaaaccgctggttggttgcaattacaggcaactggctactgtttatctgggccgagaacaaacaccatatgctggaagcgagccttggttactttatgaacccgctggtgaacattgtgctggggatgattttcctcggcgagcgattccgccggatgcaatggctggcggtgattctggcgatatgtggcgtgttagtccagctgtggacttttggttcgctacctattatcgcgctgggactggcatttagttttgccttctacggtctggtacgcaagaagattgccgttgaagcgcaaaccggcatgttaatcgaaaccatgtggctgctgcccgtggcggcaatttacctgtttgctattgccgacagctcaaccagccatatggggcaaaacccgatgtcgctgaatttactgctgatcgccgccggtattgtcactaccgtaccgctgttgtgttttaccgccgctgccacgcgcttgcgtctctcaacgttaggctttttccagtacattggcccgacgctgatgttcctgctggctgtgacgtatttatggtgaaaaaccgggtgccgataagatggtgactttcgcctttatttgggtggcgctggcaatttttgtgatggatgcgatttatacgcagcgtagaacgtccaaataa

SEQ ID NO: 139291 - DNA, 1848 bp, Homo sapiens
tcaatttatcggttgcagcggatggatggtggacatatcaatgaccagcgcatcggtagataagccttcgcaaacgccgttttcaccgaacaacacgttgcgcaccagatcgccattcggcaacatggtaatgataaattcggcatctttagcggcctgcgccgggttggcggcgggagtcgcacctttgtctaccagatgccgcacagcttcggcgttcacatcaaagacgcgaagttgatgcccttgctgcaataaattgctcgccattggcgaacccatttgtcgggcggacgggtcgtcaccgacgagcgccttatcacgtctgcgcagcacgccgatatccctgtggccgacggaaaccacggcaacacccccagtgcccacaaactcgttatatgcactgttcctgatttcagttacatctggccagttgtcatctatctgctgggatcctctagagtcgacataatgcatgcagctgcatgcagtgctgcccttctcttcgatttttgccgtcaccatcacgatcggaatgtcagaaaaaggtatacccgagagacgtggtcctctcttaataaactcacttaacgccgcttctgggctgccatcttttggctgataatcatattcccagcgtaccagtggcggcattgacatcaggatagactcggtgcgcccgccagtttgcaggccaaacagcgtgccgcgatcccagaccagattgaactcgacataacgaccgcgacgatataactggaaattgcgctcgcgctcgccgtaggccatcgctttccgtcgctcgacaattggtaaataagcgtcggtgtagcctttgcctaccgcctgcataaaggcaaaacagcggtcgaaatctggcgtgttcaggtcatcaaagaacagcccgccaataccgcgctgttcgttgcgatgtttgaggtagaagtattcgtcgcaccactttttgtaacggggataaacgtcttcgccaaatggcatgcacaggtcacgggcggtgcgatgccaatgaatagcatcttcttcaaaaccatagaatggggttaagtcgaagccaccgccaaaccaccagacgggatcggcacccggtttttcggcaataaaaaaccgcacattcgcgtggccaaccttacccaataccagttgctgggccaacactatgctgattggctcaagggaattgggaatccgctcaagccagtcaggtccattgctaggcgtaagggtgtggtgctcaggtgcagagggacacaggggcttctcaggggaaggatggaaaccagaaaatggcattcgcgcgtataagttcacatcatcataggcatcattcaggaactcagcctgtttcaggcaaccttcaaggataaaaccattgcgcaaagcgacctggttgctttgcggattgtccacccgacatttgatcacgaagcgtctaagttcaccagactgggcgtaatgatgaatcaatgcctgcagcgcctgagaaatgatcccctgcccctgatgagattcgtccagccagtagcctatttcagcggttttattcagtggttcaatacgattaaacgagataacgccgataagttcatcttctttgaaaatcatgaacattttggcatagccgcgttgatgcaacatcacattaccctgcaccgtttttcgcgtgtcctctttgacgctctcctgctgcaggattttgagcatctcatcttttaactgtagcttttgttttttcatgcggaccacttccgcattgtaccctcgaccgtcggaaccttcctttctggcaatttcatgatcaagtttattgtgtttatcgaacaaggacat

SEQ ID NO: 139292 - DNA, 2941 bp, Homo sapiens
atggcgatccagctttcggaaatcccggaaagaaaaacagcgcccggcaaccccattaacagccagccgctcatatccgacgcacccgccgataatgccgtcacgaatggcccaagactacgaccgcccagaatatagtcgtcaaagttttcgttgatcgccaggcgataaacccaatcaatatcatgccaaagattagacacaaaatgtcaccaacatcgctggacgaatatcctttaattcgagcaaaggcgtcattgtgcagctcctggtttggcctcaccaatcaccacttcatcgcccgctacaagccatatgacaatcaaaacatcggtatcgttacgtgcgccaatcgtcacttcacgctcgcgtgtttcaccattacgcaacaatttgactttataacgattatcgccaaccggacgcctaacgccgacagagggatcgtcagcacatttttcacatcggtgagtgaatatgcacttgcgcagtcatatccagcacgcagcgaaggtccaggcaacagtgcggttagaccctatcaggcgaatatgttaattccgttgggtgaatccgggaacctctgtcggagtggatacccacgatcagcgaatcagatttccgatggaacgccagggtttaagcgccgggatgagatacttgacagcgtaggcatgatgaaaagtatcatggcaatgagcgggccgctatcgcgtaaatcatcgaaatcgcgttcggcgttcaacgaaaatgccacaatgcgaatggcttcagtacgaacgcccagtgacgagcgccctgtaaattatcgcccgtggcataaaaactgcgtccaaagccgtctttgccagcagccaggccataaatgccaccagaattatcgtcaccaaccaattgctgaaacgccaagcagcagcggggcggagagctgtttcgttcggcggcgctattaccgccgccatggtgatattgtcatcgctgctgttgacggcgagtttacgtggcagattaacacctcggttgaacgctgccagccaaaatttaatggaactggtcaattgacgcttgtggtgattacagccgcgtacgaatcctggtttgggaatgggttatcggattcgggatggttttctcacaggttccctctggttaacctagcggaacaatggggtacaacttctgtgccaagtaaaatctatgagagtcgttttacggctctcatagacagagaagttaccagcttaccttcgcctcaaatccaccttgttccgcattcccaaattcaccattcatgccatgcaatttggcgattcgctggacaatcgatagcccaagcccgctgccggtagcggtttgtccgggtgggcgatagaagcgttcgccaattcgcgccagtgcctctggtgtcacaccggggccgttatccctcacgatgaaattatcagcattcagcgtgacctcaaccagcatatggggcaaaacccgatgtcgctgaatttactgctgatcgccgccgtattgtcactaccgtaccgctgttgtgttttaccgccgctgccacgcgctgcgtctctcaacgttaggctttttccagtacattggcccgacgctgatttcctgctggctgtgacgttttatggtgaaaaaccgggtgccgataagagttgtgtaggcggtctcgtagtgggctatcacctcgaaagacactcgtatctcgatcaatacgccgcggtacttataatcgagcagcccaagtgcaacaagtaccactccgatgtcggtatgaacttggcattatgggtgacgcgttccagttatctgactagtaaactgtttgtcggaacacagattggtgccccgtccattttcggctcccttattaatgaacgctgggacaaaacaaaggaggcaatgttcgtccaccgaaggggagtgccgttttttgtacgcttgtacgtcgccttaaatgttctcgcgtttcccgtgcgttccgatgaaccgtccttggcgtggtcgtgcaacggtttccacataggatttgctgattcgccagatgcctctgctttcgcggcgcgtgattccggtaatacgcgttccggtcaccggcgtgctctggaagagttttacgccacggataacaatatttggtcacgcctaattgatcaacattctatgatcgtcgccgcacaaggcttaacgcccgaccatcaactcctgctccaaatttatgatcgcgcaagggttagcgcctcgcgtattgtccaccaggcacaaatttatggcgatgccgtcgtccggtatgcttttattgaacatcgcgccgaagtttttgattttgccagtattgaaggtaatgaagagaacaatgtctggctatgcgattgcgctaaagtctacggtcacgcgcaggtgaaagctggcatagaagaagatgccattccgacgattcattacagttcgcaggtggcggaatatgccattgtggaaggtaattgtgtgttaaaacatcatgtcttggttggcggaaatgccgtggtacgtggcggaccgattctgctcgacgagcacgttgtcatacaaggtgagagccgtattacaggtgcggtgataattgaaaaccatgtggagttaaccgaccacgccgtcgttgaagcctttgatggcgacacggttcatgtccgtggtccaaaagtcattaacggcgaggagcgcattacgcgaacgccgctggcagggttattgtgaatcgataatacgcgcgtataagttcacatcatcataggcatcattcaggaactcagcctgtttcaggcaaccttcaaggataaaaccattgcgcaaagcgacctggttgctttgcggattgtccacccgacatttgatcacgaagcgtctaagttcaccagactgggcgtaatgatgaagaatggccataggtcta

SEQ ID NO: 139293 - DNA, 2571 bp, Homo sapiens
  misc_feature (1)...(2571): n = a,t,c or g
ttaccaacagttcgtttgcatcgcagggacctgcggcgcaagctggcgcgagaatagacccatataggcgcattcttcgagtactacggcgttatgcacggcatcggcggcgtttttaccccatgcgaacggnccgtgagaatgcaccagcaccgccgggatttgtgccggactcctgccacgttcttcgaaggtttcaatgatcacttcgccggtctgatattcatattcgccgttaatctcctctgcggtcatctgtcgcgtgcaggggatggcaccgtaaaaataatcggcgtgggtggtgccccaggcggggagatccagcccggcctgtgaccagatggtggcgtggcgcgagtgggtatgcacaataccgccaatttcggcatagcgacggtagagcgccagatgcgttggtgtatcggaagagggttttttgctgccttccaccaccttaccgctggctatctcaaccaccaccatatcgtcggcggtcatcacgtcgtactcgacgccggaaggtttgattaccatccattgccgcgtttcgtctaccgcgggcacgtcgcggaactgtccgggactttgcccggtgactggctgggtgtctttcaggtggatcgcggcgatacggtcaatgcccagtttcagttcggcgggaacatcattgccccaggcgctgaggttgccgacgtccgggtagacggtgaaccacggtgaggcgagcatctcgtgccattctgtccatttgttgtgatgccagcgcctgtgcgactgccacgccagcccttcagcaaacgttgccgggtagccttcgtcgtggtcttcgtaatagacgtcataacctgccagctggatggtgcgaatgccgagatcgcgcgccaggcgaatcgctttactcatgatggcccgcgcccgttcgcgcactgcctcgtcacggctaccaaagggaaagcgacgatgtgcggacaggcacatcgacgggatcccaacacctgtttcgatcatcgcggcaaccagcgaagtcctttgtgcggcgctccagtcaagacgtgagagccgttcgtcggtttcatccaccgacatttcgacaaaatcaaaaccgcagctttttgccagcaccagccgctccggccaggagagatctttcgccagcgctttttcataaatccctaactgatgattacgcacgcgcacctccccagatagcgtcgatttgcgcatggaaatcgccagccacttgcgccggatttgccgcgcctggcagccactcccagagccgctggaactctggcccaaggctctctgactgacttcttcttggcttagcggctgaaactgatgctgcctgatcactcggaagcaccgtagaccatcacggatgccgagctttaggtaactctcacagtggaaggtaagtccgtccccttgtgtgccggtctgacgaacacccagggtcaagcctaaaccatgcacgccagccatccgcccagtcagttgtccgtagattttgcatcgattcttgactcgcatacaaccttccacgcactgactgccgtccttgagccgactctgaccgtagtcgctcggtagggcaaccgcgacatttactagttgggccgagacatccacgccgcgcgtcggctcatcgacaatcaatacttgcggcgaagcttccaagcatttggcaatgaggattttttgctggttgccaccggataatgtccgtgcagcttgttccggttggttgaatttaatattcagcgcccgacgataacgttccagggtggcattatctttcgcggttttcgcccagaatccacgaaggttatgagtaagggcgcagacgttccaggccagcgaagcatcgagattcagtccggatgactggcgatcttccggcagataaaccagaccgcgcagtaaacgttctccagtggataatttattgatctctttaccattcagcataatgcgtccgccacgcaaagtacgcagaccatagagcgtctcggccagttctgtgcgtccggcccccaccagcccagccaggcccagaatttctccggcattgagcgtcaggctgacattcctgaaaccttcgccggtcagattttccagtgtcagcaccggcgttccggcggcatgttgtgggcggttaccaggtaactccagccataatttttggctggcagagagcgatttttcccgtaccgctggggtgatggcctgaataatgtcgtcggtagacagttcgctggttttgccgcttaaggcgatggttccgtcgcgcatcacgctaattcgatcggcaatctggcgaatttccggcagcttatgcgagataaaaacaatacccacgccagtagcaagcagctcttgcaagcgactaaacaagcgttcggtttccgcaggggtaagcgaggcggtaggttcatcgaggatcagaatccgcgagtcgcgcatcagcccgcggaggatttccaccatttggcgatcggcgacatccagcgatcctgccagactatgcagatcaaactggcagcccagcgccgccagcaagttcttcat

SEQ ID NO: 139294 - DNA, 2106 bp, Homo sapiens
  misc_feature (1)...(2106): n = a,t,c or g
atgcgtcttaccggcaggctgggacatagtgtgtcagacgaagtcacaggcgtcctgccagcagtggctggaagcccactggcgtactctgacaccgacgaattttacccagttgcaggaggcacaatgagccagcatttacctttggtcgccgcacagcccggcatctggatggcagaaaaactgtcagaattaccctccgcctggagcgtggcgcattacgttgagttaaccggagaggttgattcgccattactggcccgcgcggtggttgccggactagcgcaagcagatacgctgcggatgcgttttacggaagataacggcgaagtctggcagtgggtcgatgatgcgctgacgttcgaactgccagaaattatcgacctacgaaccaacattgatccgcacggtactgcgcaggcattaatgcaggcggatttgcaacaagatctgcgcgtcgatagcggtaaaccactggtctttcatcagctgatacaggtggcggataaccgctggtactggtatcagcgttatcaccatttgctggtcgatggctttagtttcccggccattacccgccagatcgccaatatttactgcacatggctgcgtggcgaaccaacgcctgcttcgccatttacgcctttcgctgatgtagtggaagagtaccagcaataccgcgaaagcgaagcctggcagcgtgatggcggtcgatctaaggatcccaatacgtttcggcgtcatgctgtcagcagcattggtgatgatgtcgttgatctgattgctcaggttgatttagtcactaccgccgttggcccggttgtgctggaacgtattgctccggcaatcgccaaagggcaggtgaaacgtaaagaacaaggtcatgaatccccgctgaacatcatcgcctgtgaaaacatggtacgcggtaccacgcagctgaaaggccatgtgatgaacgccctgccggaagacgccaaagcgtgggtagaagaacacgttggctttgtcgattccgccgttgaccgcatcgtaccgccttcggcttcggcaactaacgatccgctggaagtgacggtagaaaccttcagcgaatggattgtcgataaaacgcagttcaaaggcgcactgccgaacatcccaggcatggagttaaccgacaacctgatggcatttgtcgaacgtaaactcttcaccctgaaacacgnngaccattcggacgcgattctcgacgagaaaatccgcgcggtggtaaaaggtgcgatggaagaaagtggtgcagtattgatcaagcgctacggctttgacgctgacaagcatgcggcgtacatccagaaaattctcggccgttttgagaacccgtatctgaaagatgatgtagagcgcgtaggccgtcagccactgcgtaaactgagtgctggcgaccgtctgatcaagccactgctcggtacgctggaatatggtctgccacataaaaacctgattgaaggtattgccgctgcaatgcacttccgcagtgaagatgatccgcaggctcaggaactggcagcactgatcgctgacaaaggtccgcaggcggcgctggcacagatttccggtcttgatgccaacagcgaggttgtatccgaggcggcgaccgaaagctgggtgaaaacaccgatgcgccagaccccgttccccggcattgtgccggacgagagcgatcgcgcggcagaaacccggtcaacgctgacctcttccggtgcgatggcggcggtgattggcttccagtcgccgtataacgaccagcgcagcgtgattgcgctgttggcagatagcccacgcggttatgaaatgcttaacgatgcggtgaacgatagcggcaaacgcgccaccatgttcggttcggtcgcggtgatccgcgagtccggtatcaacagcctacgtgttggcgacgtttattacgtaggtcatctgccgtggttcgagcgcgtgtggtatgcgctggcaaaccatccgattctgctggcggtgctggcggctatcagtgtgatattgctggcatgggtactgtggcgtctgctgcgaattattagtcgtcgtcgtcttaacccggataacgagtaa

SEQ ID NO: 139295 - DNA, 785 bp, Homo sapiens
gcaatcgcgtcggaacagttaccggcaaaagagaggtagggacttacggcatgatggtgacctcagttaagagaagccagttaagtgtagttcgaatttatacagatgagaggcggcctgataagacgcgcgagcgtcgcatcagcagttggcactgttgccggatgcggcgtaaacgccttatccggcctacgaggcatcgaagagctacctttcaccttcagatctttaatgatgtaacgctgtcgccgtcagccagcagattgccgttagcatctttaacgatagctcgtcgctttcctgtgcaggttctgcgtcgttccattcgtaggcacttccgggcagatgtacatgccgttatcttccgaacggtacaatttatgcagctcgtcgacatctggttaaaggtttttgcaagcagaccaagctcattcggcagttggtatccagcggcggcgagtcgaactgcccgtgttcaatacgctgacggcggtaaccagctgattcagcggggcaaccacctgatggcgtatgcgggcaaagtaaaaaagaccagcgtgaaaataccgatgccgccagccagggaatcgccaccaccagcagcattttgcgttcagcgtagtgctgtaaagccatacgaacaggtctatctgattaacataattattaatattggcctgatacacggcaaatcgcccttgctgagccgattattcatctccagccagttggcttcagatgcgcatagcgagtttttactgcttctggcacataccagacgtgag

SEQ ID NO: 139296 - DNA, 5421 bp, Homo sapiens
atggtgaaagttgcaggggagtgccgagtaagagcctcagcacacttgccagggcttaacaggagcacaaaaaacacagaggaccgaggcgcaaacaaccaagaaggcacaaacacacagaagacacgcggagaaacaaacgagagactcaaaaagaacgaacacagagatctgcgcttagctcgttacccagcaaaggagaacaacaaacaaggcgataaaaacaaaccacgaacgtacgaaaagttaaccggcacagtaacacaccaggagccacctcatcacgcggatcaatctccaggcctgtgtctctttcgtacttctcgagctcaggtggagagaggtcccacagtgttgctgctgatatctcaagaaaatcaaatagaaagatatgacagtgacaaccattcacagctcaacctctgcctcagagtgccgaccgtcaccacacaaaggagagattatgatattgctgaacggtaccgacagaaaggcatcaaattgcctgccaggaaggagagattaatgactattgctgaacggctgcggcaggaaggacatcaaattggctggcaggaaggtaaattagaaggtttgcatgaacaagccattaaaattgctttgcgcatgctggaacagggctttgatcgtgaccagggcatcgctgtagagcatcgtgtcaacgccaacagcgacaaagttcgctccccacgccaggcattgctgcgccatatcaggagccacagccagaaaaccagccgctttacccgcagcacggatccgccgaatactggtttcaataattcgctgcacttccgggtgcccggcgttatccgggtagcccaacgacgcagaaagatccgcaggtccaataaacacgccatcaatcccttcgacgtcgaggatttcgtccaggttatccagtgccgttttactttccacctgcaccaacagacaaagcgaatcgtaacttgcgccatagaaatcattcatcgcctgttcaacatggtcatagaccgcgttgtaccatgggttggtggcttcgcgagactggaaataagtgtcaggattggcggacgtaccgcggatcaccggatgttccgggttgagtgcccgggcgcgatgagcatcaatttcgacctgcggcatgagatcaagaatcgtgtcatcggccagcgggacaattttattgatttcgtgggacgtgcggaaaccatcaaagaaatgaataaatggcacgcggcttttcagcgtcgcgatttgcgaaatgagagcaaagtcttgcgcttcctggacgtttgctgcacacaacatcgcgcaacccgtctggcgcaccgccataacgtcggaatgatcgccaaaaatagagagtgcatgtgtggcaacggtacgtgccgctacatgcaggacaaacgggttttcaacatccggagtgctccattgcgtcatcaagtcggcagccagatagggagacacgaagctggtcggcgaaccctaagaagcccgcccccggaccccccgcccaatgcccccggggtccgaaccccccgagttcgggaaagcacggcaactggcccgatggccactacgcgctgggaaaaacgccatatcgccgaagagatccccatctggaaagaggaactctgtacccaatgtaaccactgcgttgccgcttgcccacactcagctattcgcgcaaaagtggtgccgcctgaagcgatggaaaacgcccctgccagcctgcattcgctggatgtgaaatcgcgtgatatgcgcgggcagaaatatgtcttgcaggtggcaccggaagattgcaccggttgtaacctgtgcgtcgaagtttgcccggcgaaagaccgtcagaatccagagattaaagccatcaatatgatgtctcgcctggaacatgtcgaagaagagaaaatcaattacgatttcttcctcaacctgccagaaatcgaccgtagcaaactggaacgtattgatattcgtacatcgcagctgattacaccgctgtttgaatattcaggtgcttgctccggttgtggcgagacgccgtatattaaattactgactcagctctatggcgaccggatgttgatcgctaacgccactggctgttcttcaatttatggcggtaacctgccctctacaccgtataccaccgatgccaacggtcgtgggccggcatgggcgaactctctatttgaagataatgccgaatttggcttgtttccgcctgacggtcgatcaacaccgtgtccgcatgctgcgtcggaccggctagtacgggaaatccacaagtcattaccacacggcccaaaatgcaactccgaatacacctacgaagataacggcatgtacatctgcccggaatgtgcctacgaatggaacgacgcagaacctgcacaggaaagcgacgagctgatcgttaaagatgctaacggcaatctgctggctgacggcgacagcgttaccatcattaaagatctgaaggtgaaaggtagctcttcgatgctgaaaattggcaccaaagtgaaaaacatccgcctggttgaaggcgaccataacatcgattgcaaaatcgacggttttggccggataaggcgtttacgccgcatccggcaacagtgccaactgcctgatgcgacgcttgcgcgtcttatcaggcctacaaattcccgcaccatccgtaggccgataaggcgttacccgcatccgcaacagttgaaaagctggagaaaatgccgcatcaccgacgataccgccgagaatcgccactgcgttcagaccgatttggaccacggtaaagaacatgccgggattttcctgcatattcagaacgcgttgggcatttatattgccttcatcagccaccagtttaagtttgattttgcgccagatcctcggaaggggaagttgattaatttgtgtgaaatacacattgaaagccgattcgaagaaagtgaaccggcatttctcagtggcatagtactacgccgtcatatgacagacgccaattccgccaattccaaaatgcatgcagctgccttaccccaccacgtgctaagggcaggagttgagtcagctgtggcctgccctgggggctggggtccttggggagaacacgggcatgttgatttggacactcattcagcaaacatctacgaagcacctgctgtagaatgcactggacgttgccaatccgtacaacaggtgatagtgaacgccaagagaggccccctttgtcctcacggaccttctcttgtaggagcaggaagagtgaggaaaacttttaacagctcccagcagatgcccgtatgtctcattgagcctgtgttcgcttctaaactgatccctgttagagcgatcttcggatcaatcggtccgatcgtgcagggtaaatcgaccctgttccgtatgatctctgctcaggaacagccggacagcggcaccatcactttgggtgaaacggtgaaactggcgtcggttgatcagttccgtgactcaatggataacagcaaaaccgtttgggaagaagtttccggcgggctggatatcatgaagatcggcaacaccgagatgccaagccgcgcctacgttggccgctttaactttaaaggggttgatcagggtaaacgcgttggtgaactctccggtggtgagcgcggtcgtctgcatctggcgaagctgctgcaggttggcggcaacatgctgctgctcgacgaaccaaccaacgacctggatatcgaaaccctgcgcgcgctggaaaacgccctgctggagttcccgggctgtgcgatggttatctcgcacgaccgttggttcctcgaccgtatcgccacgcacattctggattaccaggatgaaggtaaagttgagttcttcgaaggtaactttaccgagtacgaagagtacaagaaacgcacgctgggcgcagacgcgctggagccgaagcgtatcaagtacaagcgtattgcgaacttcagcaccaagttactttttgtcgacctgcttaagaatgcctacctatacgatctccatttaccgttgttaaacctgatgctgacgccagatgagcgcgaagcgttggggactcgcgtgcgtattgtcgaagagctgttgcgcggcgaaatgagccagcgtgagttaaaaaatgaactcggcgcaggcatcgcgacgattacgcgtggatctaacagcctgaaagccgcgcccgtcgagctgcgccagtggctggaagagaatcaccgcaggcaacggcaaagtagccgaacgcgcctcgccgcgctggctggcgttttcaatcaccacccaactgaaagtgctgtcaccatcgatgccagcttcaatcgccacccaggtgaggagacgaggcaaagccgatacgaggacgaaggagaagacacccgagagcgaggagtgatattatctgtacatggggagccaaagcagcaatctccagcaaagtcgcgcgttattcagtttttccagcagggctttgttatccggacgtacagcgatgcccaggccggtgccaaaatattgcggatcggtcactttctcagtagcaacaccaagttgtggattggttttcagccattcgtttaccaccgctgtgtcaccaaataccccatcaatacgaccatttttcagatcgataaaggcattctgataactgtcataagagacagttttcacttccgggtgctgatcctgaatatatttctggccagtacagggggtcacttcctgtctcgtattacctgtcgggtccagtactttctcagcaaatccttgcgtatttctgggagttttctgtggtcgaaaagggcacggttgttcagcttctgcggaggtggattacccgcgtatggaccactccgggttatttggctttggatgctgctggatctgcgttcatgtctgccggcaccgatgtcttctcgtggatccggtcaccgttgtttcggtgattcccagccggccaccgttgttctgcgcaccagacgctggaaactgttcctgatcccggaagagtattcgccgccgcaggtgctggttgataccgatcggttccttgagatgaatcgtcaacgctcccttgatgatggctttatgcacgcagtgtttaacccgtcatttaacgctctggcaaccgcaatggcgaccgcgcgtcaccgcgccagtaaggtgctggaaatcgcccgtgaccgccacgttgaacaggcgctgaacgagacgccagagaagctgaatcgcgatcgtcgcctggtgctgctaagcgatccggtgacgatggcccgtctgcatttccgtgtctggaattccccggagagatattcttcatgggtgagttattacgaagggataaagctcaatccactggcattgcgtaaaccggatgcggcttcgcaataa

SEQ ID NO: 139297 - DNA, 1428 bp, Homo sapiens
ctaaacacggtgacggaggcgatgggcgtcgggcagattgatatcgatccgatggtcgctggtattatcactctcggttttatctacggtgcttattttaccgaaacgttccgtggtgcttttatggcagtgccgaaaggacatatagaggcggcgacggcgttcggttttactcgtgggcaagtgtttcggcggatcatgtttccgtcgatgatgcgttacgcccagaagcttggtgacgatgtcctccccagagctgtcttcttgcagagggcagatggtgtggatgaaaggtaggaaggtgtcggtgtagtcaaacaggtacaggtagagcagactcagcctgggggagctcttgagggcgtatagcaggaacagggacctgcctgggttcacagcggtagcgcccgtgtactggtcgcgactgatgttgctgcgcgtggtctggatattaaatcgcttgagctggtggtgaactttgagctggcgtgggaacctgaagttaatgtacatcgcatcggtcgtacagctcgtgcaggaaatagcggtctggcgatcagtttctgtgctccggaagaagcacagcgggccaatatcacttctagaccaccgcaccctgcgcacattgcctctgatcaccagtccacgccctgaagctgttttacgcagttgcagatgtgtcaccacgccacgaacgtagttagcccattgatagttttcatgtgcgacaatgggcgcatcgagggaaaactcgtcgagctgattttcataatcggctgccatcacgcgaactttacggtcatcgcgtggtgcacaactggatttgcccccattacaagcccgctgccgcagatattcccgtggcgagcgataacccagcgcactatgcggatgccattcgttataatgctcgaacgcctctgcaaggttctttgctgccgttaacccgtctggtttgggcatgatactgatgtagtcacgctttatcgttttcacgaagctctctgctattccgttactctccggactccgcaccgccgtgttcttcggttcaagtcccaacatccgggcgaactggcgtgtttcattagcccggtagcatgaaccattatccgtcagccactccactggagacgacggaagatcgttgccgaagcggcgttccaccgctcccagcatgacgtcctgtactgtttcactgttgaagccgccggtagtgaccgcccagtgcagtgcctcacgatcacagcagtccagcgcgaacgtgacacgcagtctctctccgttatcacagcagaactccaccggcccggtcagactggcggtttgatgcagtacatctttgcgcaccaggtaagtgccactaccgtggcggcggaccaccagcccccacgctaccagcaggtcaatggctttacggatggtcat

SEQ ID NO: 139298 - DNA, 2862 bp, Homo sapiens
atgcgcacaatcctgacgatagatatccagctccgctatccacggcgaccaggcgcgtacgggactcataccttcctgaagtgtgcgttcagcaacaaacagcgtcgctttaccgtcaaacggtacgctatgagcagtcgtcagcaggcgcacagcatcagcgtagttgccttcaatggtgttttgcgtttctggcggccaggtatccagcaagccaagaaatgccacctgttcgccacgggcacgcagtcgcgccgcaataccctgcgccagcgtaccgccaagggaataccccagcagatgcgcttcgcagacttcatccaggtttgccgccgtctgcatggggccattggggcgcgggtgactgaaatgcccgaaaaatcgacccatttgtggaattcgaagaaaaacggcgagaagcaaccgctgaaactgcccaaggccaaaaacccggaacgccaaggaattggaacaccaaaaaacaagccgttccgggcccaattaaccctttcaccgcaaaccggcagaattggtttcgaatcccaatacgcccgggaagggctgaacaacattgtgaaacatgctgatgccagcgcggtcaccctgcaaggctggcagcaggatgaacggttgatgctggttattgaagacgatggcagcggtttgccgccgggttccgggcaacaaggttttggcctcaccggaatgcgcgagcgcgtaacggcgctgggtttgatgatgttgccgtttctgaaagcgcctgccgatgcgccattaatgactgataaatatgaaattgatgcccgctatcgctactggcgtcggcatattctgctgaccatctggctgggttacgcgctgttttacttcacgcggaaaagttttaacgccgccgtaccagaaatccttgctaacggcgtgctcagccgtagcgatatcggcctgttagcgaccctgttttacattacctatggcgtgtcgaagtttgtctccggcattgtcagcgatcgctcaaatgcccgttattttatggggatagggcttatcgccacgggcattatcaacattctgtttggcttctcgacgtcgctatgggcgtttgccgtgctctgggtgctgaacgcctttttccagggctggggttcaccggtgtgtgcgcgtctgttaacggcctggtattcacgtaccgagcgcggcggttggtgggcattatggaacacggcgcataacgtcggcggcgcactcattcccattgtgatggcagcggctgcgctgcattacggctggcgtgccgggatgatgattgctggttgtatggcgatagtcgtggggatttttctctgctggcggctacgcgatcgcccgcaggcgttaggtttaccggcggtcggtgaatggcgacacgacgcgctggaaattgctcaacaacaagaaggggcagggttgacgcgtaaagagatcctcaccaaatatgtgttgctgaatccgtatatctggctgctttcgttttgctatgtgctggtctatgtgtccggcggcgatcaacgactggggcaagaaacgcggcagctgcatgctaaaacgggctgtggtgagctgaagcgcaatgcccagcctattatgtttgccccgtcgttggttaatgaaggccagatcccgttcatcaagatgaaaatagcgcgccagttgcacgtcattaggttctgcagcataacaaccgtaattctgtttttggtcagagacactgcttgtccgatatttgatttaggatacatttttatgcgactttttggttacgcacgggtatcaaccagccagcaatctctcgatattcaggttcgggcactcaaagacgcaggcgtgaaagcaaatcgcatctttactgacaaggcatcgggcagttcaagcgatcggaaagggctggacttgctgaggatgaaggtggaggaaggtgacgtcatcttggtgaagaaacttgaccgccttgggcgcgatactgctgacatgatccagttaataaaagagtttgacgcccaaggtgtatccattcggtttattgatgacggaatcagtaccgatggggagatggccaggacgtttcagaccaagcaagtcgatggtttgcaggtcatgtgccatgtggagtattacttcgacggcaaaaacaaagcggttaaattcccgtgggatgacggcatgaaagtcgaaaatatggagcagtattacgacaaaattgccttctctgactggactaactccctgtcgaaaacgccaatgctgaaagcgcagcacccggaatatgaaacctggacagcgggcattcacggtaaaaacaacgtgacctgtatcgactgccatatgccaaaagtgcagaacgccgaaggcaaactctacaccgaccataaaattggtaatccgtttgataacttcgcccagacttgtgcgaactgccatacccaggacaaagctgccttgcaaaaagtggtcgcggaacgtaagcagtcgattaacgacctgaaaatcaaggttgaagatcaactggttcacgctcacttcgaagcgaaagcagcgctggatgcaggcgcgacggaagctgaaatgaagccaattcaggacgatatccgtcatgcccagtggcgctgggatctggcgatcgcttcccacggcattcatatgcacgcaccggaagaaggtttacggatgctcggtacggcgatggataaagcggcggatgcacgcaccaaactggcgcgcctgctggcgaccaaaggcatcacccatgaaatacccttttgtaatcccatgatcgcgggctgggttctgagaaggtccaacaaagttgataactgttaccaagactaa

SEQ ID NO: 139299 - DNA, 1347 bp, Homo sapiens
atgcgtcttaccggcaggctgggacattgtgtgtcagccgcagtcacaggcgtcctgccagcagtggctggaagcccactggcgtactctgacaccgacgaattttacccagttgcaggaggcacaatgagccagcatttacctttggtcgccgcacagcccggcatctggatggcagaaaaactgtcagaattaccctccgcctggagcgtggcgcattacgttgagttaaccggagaggttgattcgccattactggcccgcgcggtggttgccggactagcgcaagcagatacgctgcggatgcgttttacggaagataacggcgaagtctggcagtgggtcgatgatgcgctgacgttcgaactgccagaaattatcgacctacgaaccaacattgatccgcacggcattaatgcaggcggatttgcacaagatctgcgcgtcgatagcggtaaaccactggtctttcatcagctgatacaggtggcggataaccgctggtactggtatcagcgttatcaccatttgctggtcgatggctttagtttcccggccattacccgccagatcgccaatatttactgcacatggctgcgtggcgaaccaacgcctgcttcgccatttacgcctttcgctgatgtagtggaagagtaccagcaataccgcgaaagcgaagcctggcagcgtgatgcggcattctgggcagaacagcgtcgtcaactgccgccgcccgcgtcactttctccggcacctttaccggggcgcagcgcctcggcagatattctgcgcctgaaactggaatttaccgacggggaattccgccagctggtacgcaactttcagctgcaactctctatggacccgatgctcgatatgatgggaatgcagatgctaatggagaaatatggcgatcaggcgatggccgggatggatcacagccagatgatgggccatatggggcacggcaatatgaatcatatgaaccacggcgggaagttcgatttccaccatgccaacaaaatcaacggtcaggcgtttgatatgaacaagccgatgtttgcggcggcgaaagggcaatacgaacgttgggttatctctggcgtgggcgacatgatgctgcatccgttccatatccacggcacgcagttccgtatcttgtcagaaaatggcaaaccgccagcggctcatcgcgcgggctggaaagataccgttaaggtagaaggtaatgtcagcgaagtgctggtgaagtttaatcacgatgcaccgaaagaacatgcttatatggcgcactgccatctgctggagcatgaagatacggggatgatgttagggtttacggtataa

SEQ ID NO: 139300 - DNA, 3224 bp, Homo sapiens; identical to SEQ ID NO: 132548

SEQ ID NO: 139301 - DNA, 1880 bp, Homo sapiens
ccgcatcatgtgcctgagcctgttctggcacttcctggatgtggtttggatctgtgtgttcctgttgtttactgatgggggcgatgtatgagtatctacgatccagggcggtccaggaaggtaaacctctgaaggttatccgtacatcgagggaacgactgagggagaagacgcctccggattggaaactgcaggcggacgtcggcaggtgccggctaaccacatagggcaagggcacggaacacggggccggcattcccatcgcgttgatgaaatagttccaggtcaggaaactcaccatcaccgccagacaagcacgcccctgcgcttgcttagcaaggccaatgggtaaaccgacagcaaaaatcagcggcatattacggaataccgtccaaccgccctcttcaataatgtgtacgatttgcgcgaataaactgttcggatcggtcagtgattccccgacaaacatcgggttttgcagcaagatggcaagacccaccacaatcccggcgaagggaaacagcagcactggcgtgaacatcgcgccgccaaagcgttgaatttgactgagcatttccacatcctcttttctcaattctgtaagtaggaagcctgattggttatgcggcaggcctggagcgaggataggaagatgcgatcggcagaacatgacgacccaatgggattcgtgatcgctttcatgcttttcgttgggcggtagagatctacgttttcgcgaaaaagtagacctctgtgagcacaggtacacagcatcgaacacatcttcctgaagtgtgcgttcagcaacaaacagcgtcgctttaccgtcaaacggtacgctatgagcagtcgtcagcaggcgcacagcatcagcgtagttgccttcaatggtggtaaacaactccgttgaagtacttccctgctgtgctgccaggaaggcctcgcgttcgcggttaatctccgccagcacttccgggtccagaccattagcttctttttcctgccagttttgcgtttctggcggccaggtatccagcaagccaagaaatgccacctgttcgccacgggcacgcagtcgcgccgcaataccctgcgccagcgtaccgccaagggaataccccagcaggtaataagggccatgcggttgttgttcaagtaacgttgccagatgcgcttcgcagacttcatccaggtttgccgccgtctgcatggggccattggggcgcggtgactgaatgccgataatcgaccattgtggatcgagataacgcgagagcacgctgaactgccaggcaaaaccggacgcaggatggaaacaaaacagcgtcgggccattaccttcacgcaacggcagaatggtttcgaatcccatacgccgggtgctgtcttcttcagcatcaataatcgttgccagtttggcgacaggtgacgcgaccatcacttgccccggggttacctggcgggcaacctgccgacttaactgcgctgccagtttcattgccagtagcgaatgacgccaccgaaagaaatagagtatcacattggtgtccatggttattcccgttctccagtacgctcaggcggttcaccaggttgaattgttggaatatgtagccggtatgggcgcggcttttgcggatatcgcgggccaggcggccttcgcgctggactgtgcggcccagcagctcgatatggctaccgacagatttatcgccggtaatcaaaccgcttaagtgacgtaaaagggtggattttccggaacccgacggcccaagcagagccaccatttcaccgtgatgaatgttcagatcaaccgcatgcagcgcctgatgctgattgaaggttttggcgagcttctcgacacggataatcgtttgcat

SEQ ID NO: 139302 - DNA, 767 bp, Homo sapiens
aatttgtaggccggataaggcgtttacgccgcatccggcgatattagtttacgccgttaacagattagctatcgtgcgcacaccaagtcccgtagcgcccgcagaccactgttcaaccggcgctttacgtcgccgagcagtcgatatgcagccagccttgctgatagttctcaacaaagtgcgacaggaagcccgccgccgtgctcgcgcctgccggatacgccgcgcttccggtattgttcagttcggcaaagttagacggcagctggctgcggtggaactccgccagcggcagacgccagaacggttcgttctcctgcgcggcactcgccagcaagcgaccggccagcgcatcgtcaaaactgaacagcgcgtgataatcattacccagcgcagttttcgccgccccggtgagggtcgccgcatcaatgatcatttccggtttctgcgcactggcatcaatcagaccatcggcaagcaccagacgcccttcggcatcagtgttcatcacttcaacttttttaccgttgcgatagaacctgcacaggaaagcgacgagctgatcgttaaagatgctaacggcaatctgctggctgacggcgacagcgttaccatcattaaagatctgaaggtgaaaggccggataaggcgtttacgccgcatccggcaacggtgccgactgcctgatgcgacgcttgcgcgtcttatcaggcctacaattcccgaccctccgtaggccggataaggttttacccgcatccgcacag

SEQ ID NO: 139303 - DNA, 3028 bp, Homo sapiens; identical to SEQ ID NO: 132545

SEQ ID NO: 139304 - DNA, 1128 bp, Homo sapiens
ctgctgtaactgcggggaatcttccagcaacatggatttcgagagtggaggtcgttcataaggaagatgtcgctcatcggaaaacagatgcagctcaccggtgaacccttgctggcgtacgaggccgcagccattgccgccgcttgcccgccaccgacaataatgatcgttttttctttcatcgtgcttccttaaagatccagcccagccgctacgtggcgaatgcgcgaatcgcttccaccgccagaatatgttcgccaaatcgctgacgcagactggcgacttttgccgccgacagttccagcgtggcaacctgcgcgccttcttcgataaatcgctcgaccagcgccagccctaatcccgatccgccgccggtaataaaaatggactcgttatgcagatcgctcatggctgcgcctccggtaagtcgatgaaaatgtcaccaccttcaacgtgtactggataagtggtgagcggatcggtggcgggcaggcataacgctttccccgttttcaggcaaaaactggcggcgtgtagcgggcactccaccgtggcgtcatcttccagatacccttctgacattgacgcattaccatggctgcaacgatcgttaatggcataaaactcgccgccaacgttgaacagggcgatgacgggcgaggtatcgatccggagagcctcagcctccggcacatccgcaacgggacacgcataaattcgattcatcagaacagtacaacccgcaacgcgttgggccgccggggaagcgtcgacagtgccagcaccattactggccgtccgccacttattctcctgaagcccggtacgacaggcacgttgcgcttgctgagaacggaaagcgacatcttgccctttttgtttcaggtagtcggcagccacttttttggcatccagtccttccacagcaatgctggcattcagttgctgcaatgtttttgcatcgaggctggcgaagactggctgtagccactgtgccatttgcggatactccctcaacaccgactcacgcaccactggtgcaggcgcgtagataggttgcacaccttgcggatcgcttaaggtttgcagccccagcgccgctaccgggccgtcagtgccgtaagccat

SEQ ID NO: 139305 - DNA, 868 bp, Homo sapiens
  misc_feature (1)...(868): n = a,t,c or g
cctgctggtcgactttagaggatcttctgagtagcgaaagatggcaggaagtgctcgataaaaccgccgcttaccatcaggaggtgatgaaatgagtgcgcaagtttcactagagttacatcaccgcattaggccagttttctcgttcaggaatccagctgctggaccgactgggaaatttcgggacggggtggcccaacttcgaccgaaagaggttcggttccaccatgcgcaccacagttaacgggcaaacacgcgtcccccgcaaaggcgtccagccgccgacaacctggatttttaatgacaccaaagaccagctggagcggcgaatcgcccgtctggaaacgggcatggcctgggcagaagagccgccgtcacgcacccgtcacttaatcagcaactgccagataagcgaaaccgacatcccaaacgtatttgctgtgcgggtaaattatctgctttatcgggcacaaaaaggagcgcgatgaaacattctatgttggaacgcgtttcgacaaagttcccccttctgaagaatacaacctggcgctgcttgaaacgggatatcgtcctggatcaagcggtaatcacttcccataacctgagtgtactgttctgatgaatcgaatttatgcgtgtcccgttgcggatgtgccggagggtgaggctctccggatcgatacctcgcccgtcatcgccctgttcaacgttggcggcgagttttatgccattaacgatcgttgcagccatggtaatgcgtcaatgtcagaagggtatctggaagatgacgccacggtggagtgcccgctacacgccgccagtttttgcctgaaaacggggaaagcgttatgcntgtccgccnncgatc

SEQ ID NO: 139306 - DNA, 318 bp, Homo sapiens
aacttggcgagctacgacgtctgcagcatcctcctgggcacctcgacgctgctggtgtgggtgggcgtgatccgctacctgaccttcttccacaactacaatttccgctcactctccatggtgtctgagtgcctgttctcgctcatcaatggggacgacatgtttgtgacgttcgccgccatgcaggcgcagcagggccgcagcagcctggtgtggctcttctcccagctctacctttactccttcatcagcctcttcatctacatggtgctcagcctcttcatcgcgctcatcaccggcgcctacgacaccatcaag

SEQ ID NO: 139307 - DNA, 513 bp, Homo sapiens
atggataagttcctggacacatacacactccaaagtctaaagcaggaagaagttgaatacctgaatagaccaataacaagttctgacattgaggcagtaattaatagcctatcaatcaaaaaaaaagtccagtaccagacagactcacagccaaattctaccagaggggaaaatctgggcaataccattcaggacacaggcatgggcaaagacttcataactaaaacaccaaaagcaatggcaacaaaagccaaaattgacaaatgggatctaattaaactaaagagcttctgcacagcaaaagaaactatcatcagagtgaacagggacatggatgaagctggaaaccatcattctcagcaaactatcacagatcagaaaaccaaacaccgcatgttctctcttggtgacctgagattattgaaggctgtgccttttcaactcatgggtaacagtgatattgttgtctccctctgggtgactcttctgaattgtgtccagtattctgtgtga

SEQ ID NO: 139308 - DNA, 380 bp, Homo sapiens
atggatgaagctggaaaccatcattctcagcaaactatcacaagaacagaaaaccaaacaccacatgttctcactcataagtgggagttgaacaaggagaacacatggaccccgggagaggaacatcacacactgggccctgttggcgggtgggggtgctgcggaaggatagcattaggagaaatacctaatgtaggcctagataatatattacttagccttgagaaactgagaaatcccccactgtgtcaccttctagagcccctgtcaaccctttgcaactccaagagacaagtcactcctactttccagaaaacattcagaagcaagcaccagcccttccccagaggtcaagcagcagaaagggccttccactgcag

SEQ ID NO: 139309 - DNA, 361 bp, Homo sapiens
atggatgaagctggaaaccatcattctcagcaaaatatcacaaggacagaaaatcaaacactacaggttctcactcataagtgggagttgaacaatgaggacacatggacacagggaggggaacatcacagactggggcctgttgctagaaaatctggaagcagaaactgctccgttgccctaacagggtctcatgccattccgaccttcaccaagcttagaagccaccatgtatgtggaagcaggttgcttcaagaatgtgtaggaggctctaattctctaggaaagtgcctgcttttaggtcatccaacctctttcctctctggccactctgctctgcacattagagggacagccaaaa

SEQ ID NO: 139310 - DNA, 1758 bp, Homo sapiens
tcactgactttctccccaggcccaaggtactgtcctcttttcatatctgttttggggcctctggggcttgaatatctgagaaaatataaacatttcaataatgttctgtacattttgcagtccaccagcaatgaatgagagttcctgctgctccacatctttgccagcatttggtgtcagtgttctggattctggccattccagtaggtgtgtagtggtaactccttgtttcaatttgtatttccctacattaggtatttcgcctaatgttatccctcccctagccccaaactccttgacaggccctggtgtgtgatgttcccttccgtgtgtccatgtgttctcattgttcaactcccacttatgagtgagaacatgcagtttctggttttctgttcttgtggtagtttgctgagaatgatggtttccagcttcatccatgtccgcattctggaatttgtactctccaagctgctcaaaaagctcacaattttgtttgattaaattctgaggctcttccacaagaggtttaaattcatcgaacactttggcatagcattcatgaggatctgcagcggcacagcacttctctagagtggtttcatatgtcttggcaagtctcagcagcagcacgacagagtaatcaggatgccttcttgcatattcatacaaaaacatgcccaggaagacatcctttgcctcagcatagtttttgcaaacatccttactttcaacaaaatcagcagctaatgaaggcaagtcagcaggcatctcatcattttccacttcggcaatgcagtgggatttttccaacagaggtttttcacagcattccttcagtttactggagatcgaatcttgattttcacagatatacttggcaaggtccgccctgtcatcagcacattcaagcagatctccatggcagcattccgtgtggactttggtaagatctgtcactaacttggaaacttctgcaaactcagctttgggaaatctctggctcaggcgagctactgcccatgctttgaaagctctttctccaaatttttggagactggcacacttgagtctctgtttggcagacgaagccttcccttcatcccgaagttcatcgagctttggcaacaggcaggcagctttatcagcagcttggcaacattctgtaaaagcagctttataccttttagcaaagaaaaggagttccggggcataaaagtaaggatgtcttctggcaatttcatataagtattttttcaaaaatgtctcttcattgtcatgaaaagcagtgcacatcacatcaacctctggtctcaccaatcgggggaggtttgggttgtcatctttgtgttgcaagaagcattcatttctctcaggttcttgttttgcacagcagtcagccatttcaccataggtttcacgaagagttgcaactgtgcataatttgtctccaaaaagggtatgaagtgatttgtcacaattttcagctgactcatcagcaacacatgtttttgcaaattcagttacttcattcactaattttacatgatcttcaaatggacactgctgaagatactgagcaaaggcaatcaacaccaaggctttgaaattttcttctcccaaatctttaaaccgatgagcaacctcactcttgtgtgcatctcgacgaaacacacccctggaataagccgagcttttaagtccctctgcccccagatcttccatgatgaaagagtccctctccttgactttcttcat

SEQ ID NO: 139311 - DNA, 2279 bp, Homo sapiens
tcccgggatgtgcttggtctaagattcacccccttgctcctctggattgtgcattccagagcgtgggcattagtggagtctgcagtgatgtcaacatgggagtgttgggtgggagatgagaggggtactggtgtgaaattggctggggcccacacagagctgccaacaggccctggtgtgtgatattcccctccctgtgtccaagtgttctcattgttcaattcccacctatgagtgagaacatgcggtgtttggttttctgtctttgcgatagtttgctgagaatgatggtttccagcttcatccatgtctctgttgtttcctgactttttaatggtcgctattctaactggtgtgagatgatatctcattgtggttttgatttgcatttctctgatggccagtgatggtgagcattttttcctgtgtctgttggctgcataaatgtcttcttttgagaagtgtctgttcatatccttcacccactttttactggggttgtttgtttttttcttgtaaatttgtatgagttctttgtagattctggatattagcactttatcagatgagtagactgcaaaaattttctcccattctgtaggttgcctgttcactctgatggtagttccctttgctgtgcagaagctctttagtttaattagatcccatttgtcaattttggcttttgttgccattgcttttggtgttttagacatgaagtccttgcccatgcctatgtcctgaatggtaatgcctaggtcttcttctggggtttttatggttttaggtctcatatttaagtctttaatccatcttgaattaatttttgtataaggtgtaaggaagggatccagtttcagctttctacatatggctagccagttttcccagcaccatttgttaaatagggtatcctttccccatttcttgtttttgtcaggtttgtcaaagatcagatagttgtagatgtgtggtattatttctgagggctctgttctgttccattggtcgatatctctgttttggtaccagtaccatgctgttttggttactgtagtcttgtagtatagtttgaagtcaggtagtgtgatgcctccagctttgttcttttggcttaggattgactcagcaatgcgagctcttttttggttccatatgaactttaaagtagttttttccaattctgtgaagaaagtcattggtagcttgatggggatggcattgaatctataaattacctctggcagtatggccattttcatgatattgattattcctatccatgagcatggaatgttcttccgtttgtttgtgtccccttttatttcattgagcagtggtttgtagttcttcttgaagaggtccttcacatccattgtaagttggattcctaggtattttattctctgcaaaaagttgtggagatgcttgaagaagtggtagtctgttgatgagaggtcaggtgaatatgaaggatgagccaaaacttggtagcccaatgcattgaacttttgaagcattggttgtgcgacgtgtggttgggcgttgtcatggagaagaattgggccctttctattgaccaatgccagttgcaggtgtggcagtttttggtgcatctcatagatttgctgagcatagtcctcagatataatggtttcaccaggattcagaaagttattgagctttttcacctttccaatttgcttcaaatgccaagcgaccctggaatggtcgacgtcaagctctttggcaacttcttgtgtggttgtaagaggatcagcttcaataattgctctcagttggcagttgttaacttctgatggctggtcactatgctcctcatcttcaaggctctcgtctcctctgcaaaacttcttgagcactgtacatttgttagcagttccttggccaaatgcgttgttgatattgcgagttgtctctgctgctttatgacccatttttaaattgaataagaaaatcactcgaatttgctttttgtctgacaccatttccatagtcacctgctgagttagtcttctacctcttgatgcctcatcttcctcaatgagattcatcagttgaaaatgatcacttctaacttgaaattctataatgttgaaagtcgttattttcctgaactttctgtagaagttgcaatggaagctggctgtaactagactggtagaaagatggcctcggtacaaatatggtggatctgcagtcaaccatgcttctccaacaggttttctagaaggagatccaagcagtacccactccat

SEQ ID NO: 139312 - DNA, 1878 bp, Homo sapiens
atgctgctcagcaccctgcagtgcccagagcggttgagcatgaaagaccagctgatcgcacagagcctcctagagaaacagcagatctacctggagatggccgagatgggcggcctcgaagacctgccccagccccgaggcctattccgtggaggggacccatccgagaccctgcagggggagctaattctcaagtcggccatgagcgagaccctgtcctctcacttagacgcagattggcctgtcctggtggccatacctgaagtaagggtgtgcgcagggacagtggggctgaaatcccacggcacacagaagggggcaggcgatcaccaccccatcgagggcatccagagcctgatctgcaggcagctgggcagcgccaacggccaggcggaagacggaggcagctccacaggcccgcccaggagggctgagaccttcgcgggctacgactgcacaaacagccccaccaagaatggcagtttcaagaagaaagtcagcagcactgaccccaggccccgagactggcgaggccccccaaacagcccggacttgaagctcagtgacagtgacattcctgggagctctgaggaatcgccgcaggtggcgaggaaccccctacagggaccaccagctttcagccggggcaggtgtggtggtgcctaccagatgccagatgtccccggctattcctttgcctttgaatcagaaggccaggtggaggcgccaggcacggaatccgatccccgtctgcccaccgtcctggagtcggagcttgtccagcggatccagacactgtcccagctgctcctgaaccttcaggcggtaatcgcccaccaggacagctatgtggagacgcagcgggctgccatccaggagcgggagaagcagttccggctgcagtcgacgcgtgggaacctgctgctggagcaggagcggcaacgcaacttcgagaagcagcgggaggagcgcgcggccctggagaagctgcagagccagctgcggcacgagcagcagcgctgggagcgcgagcgccagtggcagcaccaggagctggagcgtgcgggcgcgcggctgcaggagcgcgagggcgaggcgcggcagctacgcgagcggctggagcaggagcgggccgagctggagcgccagcgccaggcctaccagcacgacctggagcggctgcgcgaggcccagcgtgccgtggagcgcgagcgggagcgcctggagctgctgcgccgcctcaagaagcagaacaccgcgccaggcgcgctgccgcccgacacactggccgaggcccagcccccaagccaccctcccagcttcaacggggaagggctggagggccctcgtgtgagcatgctgccatccggcgtggggccagagtacgcagagcgccccgaggtggctcgccgggacagcgcccccaccgagaaccggctggccaagagcgatgtgcccatccagctgctcagcgccaccaaccagttccagaggcaggcggccgtgcagcagcagatccccaccaagctggcggcctccaccaagggtggcaaggacaagggcggcaagagcaggggctctcagcgctgggagagctcagcgtccttcgacctgaagcagcagctgctgctcaacaagctcatggggaaagatgagagcacctcacggaaccgccgctcgctgagccctatcctgccccggcagacacagtcctgcgcccccaccagcccaccgccagctgacagcccctccgagggcttctctctcaaggccgggggcacagccctcctgcccgggcccccagctccctcgccactgccggccacaccactcagcgccaaggaggacgccagcaaagaagacgtcatcttcttctaa

SEQ ID NO: 139313 - DNA, 1395 bp, Homo sapiens; identical to SEQ ID NO: 120421

SEQ ID NO: 139314 - DNA, 635 bp, Homo sapiens
aactcccgcggcggaacttgccggaggtggggctgtccctggcactgtgcgatgtaaggcctgcagctcgctctcctctgcgcctgcgccgccgggatgcttgatggtgtacgtaggcgcccggtgatgagcgcgatgaagaggctgagcaccatgtagatgaagaggctgatgaaggagtaaaggtagagctgggagaagagccacaccaggttgctgcggccctgctgcgcctgcatggcggcgaacgtcacaaacatgtcgtccccattgatgagcgagaacaggcactcagacaccatggagagtgagcggaacttcacatgatagggccccagcacgatccagccacagaagcagtagcccaggtagatgacagccacgcagcagcagaagcgcatgacgctgggcagggccacccgcagtgtggcgatgaggatattgtagttgtggaagaaggtcaggtagcggatcacgcccacccacaccagcagcgtcgaggtgcccaggaggatgctgcagacgtcgtagctcgccaagttcttggcctcgatgccgatcttcatgatggtgcccgagatggtgagcacatcgctggtgacgagcaggatgtaccagccattgacaaattccag

SEQ ID NO: 139315 - DNA, 5114 bp, Homo sapiens
gctggcggagagcggcctgcgggcgatcgggccgagcctcgctcaaggagcacccccggggcaccctcctgtccgatggcagcccggccctgtccaggaatgtcggtatgacggtctctcagaaagggggtccccagccaacaccgagcccggctggccctgggacgcaactcggaccaatcacaggagagatggatgaagccgattctgcgtttttaaaatttaagcagacagctgatgactctctgtcccttacatctccaaacaccgagtccatttttgtagaagatccctacaccgcctcgctgaggagtgagattgagtcagacggccacgagtttgaagctgagtcctggagcctcgccgtggatgcagcctacgccaagaagcaaaagagggaggtggtgaaaagacaagatgtcctttatgagctgatgcagacagaggtgcaccacgtgcggacgctcaagatcatgctgaaggtgtactccagggccctgcaggaggagctgcagttcagcagcaaggccattggccgcctcttcccatgcgctgacgacctgctggagacgcacagccacttcctcgctcggctcaaggagcgccgccaggagtccctggaggagggcagtgaccggaattatgtcatccagaaaatcggcgacctcctggttcagcagttttcaggtgaaaatggggagagaatgaaagaaaagtacggtgtgttttgtagtggccacaatgaagctgttagtcattacaagttgctgcttcagcaaaacaagaaatttcaaaacttgatcaagaaaattggcaacttctccatcgtgcggcggcttggcgtgcaggagtgcattctcctggttacacaacgcataaccaaatacccagtgctggtggagcgcatcatccagaacacggaagctggcactgaggactatgaagacctgacccaggccttgaacctcatcaaagatatcatctcacaagtggacgccaaggtcagtgagtgtgagaagggccagcgcctcagggagatcgcagggaagatggacctgaagtcttccagcaaactcaagaacgggctcaccttccgcaaggaagacatgcttcagcggcagctccacctggagggcatgctatgctggaagaccacatcagggcgcttgaaagatatcctggctatcctgctgaccgacgtacttttgctgctacaagaaaaagatcagaaatacgtctttgcttctgtggactcaaagccacccgtcatctcgttacaaaagctcatcgtgagggaagtggccaacgaggagaaagcgatgtttctgatcagcgcctccttgcaagggccggagatgtatgaaatctacacgagctccaaagaggacaggaacgcctggatggcccacatccaaagggctgtggagagctgccctgacgaggaggaggggcccttcagcctgcccgaagaggaaaggaaggtggtcgaggcccgcgccacgagactccgggactttcaagagcggttgagcatgaaagaccagctgatcgcacagagcctcctagagaaacagcagatctacctggagatggccgagatgggcggcctcgaagacctgccccagccccgaggcctattccgtggagaggacccaatccgagaccctgcagggggagctaattctcaggtcggccatgagcgagatggagggcatccagagcctgatctgcaggcggctgggcagcgccaacggccaggcggaagacggaggcagctccacaggcccgcccaggagggctgagaccttcgcgggctacgactgcacaaacagccccaccaagaatggcagtttcaagaagaaagtcagcagcactgaccccaggccccgagactggcgaggccccccaaacagcccggacttgaagctcagtgacagtgacattcctgggagctctgaggaatcgccgcaggtggtggaggcgccaggcacggaatccgatccccgtctgcccaccgtcctggagtcggagcttgtccagcggatccagacactgtcccagctgctcctgaaccttcaggcggtaatcgcccaccaggacagctatgtggagacgcagcgggctgccatccaggagcgggagaagcagttccggctgcagtcgacgcgtgggaacctgctgctggagcaggagcggcaacgcaacttcgagaagcagcgggaggagcgcgcggccctggagaagctgcagagccagctgcggcacgagcagcagcgctgggagcgcgagcgccagtggcagcaccaggagctggagcgtgcgggcgcgcggctgcaggagcgcgagggcgaggcgcggcagctacgcgagcggctggagcaggagcgggccgagctggagcgccagcgccaggcctaccagcacgacctggagcggctgcgcgaggcccagcgtgccgtggagcgcgagcgggagcgcctggagctgctgcgccgcctcaagaagcagaacaccgcgccaggcgcgctgccgcccgacacactggccgaggcccagcccccaagccaccctcccagcttcaacggggaagggctggagggccctcgggtgagcatgctgccatccggcgtggggccagagtacgcagagcgccccgaggtggctcgccgggacagcgcccccaccgagagccggctggccaagagcgatgtgcccatccagctgctcagcgccaccaaccagttccagaggcaggcggccgtgcagcagcagatccccaccaagctggcggcctccaccaagggtggcaaggacaagggcggcaagagcaggggctctcagcgctgggagagctcagcgtccttcgacctgaagcagcagctgctgctcaacaagctcatggggaaagatgagagcacctcacggaaccgccgctcgctgagccctatcctgcccggcagacacagtcctgcgcccccaccagaccctggcttccccgccccgagcccaccgccagctgacagcccctccgagggcttctctctcaaggccgggggcacagccctcctgcccggccccccagctccctcgccactgccggccacaccactcagcgccaaggaggacgccagcaaagaagacgtcatcttcttctaaaagggccgtgactcaaggaaagtttttaatggaaagttgagccagaactaaaccagggagctgtctgaaatcatagcaccccatccgggtggcggggagatcaactccgagctgtttttccgaggcagtgaggaacggtgccggctctgcacggagctgaggacaggacagaccttgctttgagaaggagctgccggccggggccacgctccacagccgccgcgcgacagtggagccaagggttagggcaccaggaggggccaggtggcgtcggcagcatctgtccccagaatcaggcagaatccacttcccaaacagagccccacgcaggttcaccatgaacctcagggtcagggaatgagccaggcacgggggcatgggcagagagggccacggggcagggcccactgagggaacatcagtggccctccagtcaggttctgtgggtttggaagcccatcgtgaaaggggctgacctttgcccctttttacttggcattggttttgaaaccagctgtttcccaaactctgcttcccaagggcaaccgttgctgttcacacgctcagcctgtctgggggagcgggcctctagcttcagccagggcgggtacacaccctgggcacagggtcctcagcccccgggaaatgagctcccagggctggcgtcccaccttccaggtgggggctggcacatcacagactgtcgagagcgccatgtcccagggcatgcagaggttgcacctagagacgttgcagcaagtggacaagtggccgctgtgcgggcccctcgcttgtagtgagctgttgcagcttacggtccgttccctggaggggtggaggaaggaggtgttgggcagcatcaaaggtgctgggacatcccagggtggtgagatccatccacgatccagctccggtggagaaagggcccatgtcaagccttgttctgcaccccaagcattggtggtaggactgggtcctggctgatcgtccttgttcccagtggggtacatgtgagcccctgccagggccaagtccttctcccgaacccagggtcctgggaactgcagatcccggggggattcagcccttctcccactgtgctggcagaggcactcctgtgacgctgaatacagtgaacagggacattcccgccactcggggacagatgggcacaagggaggggaaactccatcaggaagtgctcccctgggcagaggcgcccactgggtgctgtgggctcaggagggggcggggcaggagctggtgccaaccgggaaccagagccccacagccatacagcccattggtgacaaggtcctgagaacacagtggccaggtgtccccaggctcctggcccctccgacgacctcaactctgcccagcccggtccctggccatcagcgacgctgtccgccccccgtcagatcccatgtgtgccatgtttatcatcagtgttttgtatttttgtactgagtatcggagcactttacagaagctgactgtacattcctgttctgttgtgaagagaacattcccagaccctggcaccctcctgagccggcgtgtgccggtccagccctccgagatgccacaattccttggatgggggagaagttcaaggaatttctgctcggccacgcggtgggaaccccgcgtccccgccatgtggcagaggggtctcagtcgtgctaggcatcgggcggcagcgccgacagcccttccctcgccagtgcccctcggccactcctgggttggagcccgattttatttgtaaagttgacagtcgagcaaatgttcctattttcgtgggatctgcacacgtctttgtcagttgtggtcatgatcttagtcacctgctaattatttttacaatgattacaacatttcctcactgcgggatatttctgacccgctttagaacttaagacctgattctagcaataaacgtgtccgagatg

SEQ ID NO: 139316 - DNA, 2053 bp, Homo sapiens
cttgtgccaagtccccaaggcaggaaagagcgtggcttatctcatctaagggactgaaggaaggctggtttgaaatgaaatgtgaggacagccaaaaacgagcttgaagatcaggaaggtccaaacacctgacagccttgaagttctgctcagggtctggactcctccgcacaacaagccccggtgtgtgatgttccccttcctgtgtccatgtgttctcattgttcaattcccacctatgagtgagaacatgcggtgtttggttttttgtccttgtgatagtttgctgagaatgatggtttccagcttcatccatgtcccatgctgttttggttactgtagccttgtagtatagtttgaagtcaggtagtgtgatgcctccagctttgttcttttggcttaggattgacttggcgacgtgggctcttttttggttccatatgaactttaaagtagttttttccaattctgtgaagaaagtcattggtagcttgatgaggatggcattgaatctataaattaccttgggcagtatggccattttcacgatattgattcttcctacccatgagcatggaatgttcttccatttgtttgtatcctcttttatttcattgagcagtggtttgtagttctccttgaagaggtccttcacatcccttgtaagttggattcctaggtattttattctctttgaagcaattgtgaaggggagttcactcatgatttggctctctgtttgtctgttattggtgtgtaagaatgcttgtgatttttgtacattgattttgtattctgagactttgctgaagttgcttatcagcttaaggagattttgggctgagacaagggggttttctagatatacaatcatgtcatctgcaaacagggacaatttgacttcctcttttcctaattgaataccctttatttccttctcctgcctaattgccctggccagaacttccaacattgagttttgaaacaggttgaagtcaaagaagctgagagtcaggaattctttggagagtgttgttgacatgctgttcttcccctctccctttctttggaagagaaggatgttgaggaacgtgagggtctcttggagtttgagggatagagtgtctgatatttggctcatgcctgaggaagcccaaaaatgtgtatcacggctgctgctgctgcagggtaaaggagcaagcacattgagcacccttgctttcactgttcccgctaagggggacctgccttccctaggctcacagtacagccaccttgcttctgcctgagcattttggctgtggcctggcacccttctgagagcccagcccccagaggcctgcagtctgccctggggatcctgctgctgttgctgcaactgccaccaccatgaatggtcgtatctgtaaacttctctcttacataccatttcgataaaccatctgatttccacttggataagtgaacatcccccaacaggccctggtgtgtgatgtttccctccatgtgtccatgtgttttcattgttcaattcccacttatgagtgagaagatgtgctgttcggttttctgttggtgtgttagtttgctgagaatgatggtttccagcttcatccatgtcccagccaaaaaaagcccaggaccagacggattcacagccaaattctaccagaggtacagagaggagctggtaccattccttctgaaatggttccaaacaatagaaaaagagcaactcctccccaacacattttatgaggccagcatcatcctgataccaaaacctcatttttggcaatctgatttgagtttccatggaaacagaagtgacagctgaggcctccaaactcttgtaactgatggggctcaggttaagtcttgcaaatgtcagttgtcccaaggtacccctgacaggccctggtgtgtgatgttcccctccctgtgtccatgtgttctcattgttcaactcccacttatgagtgagaacatgaggtgtttggttttcggatcttgtgatggtttgctgagaatgatggtttgcagcttcatccat

SEQ ID NO: 139317 - DNA, 774 bp, Homo sapiens
ccagactttccgatacatcctctgaaattttggtcgaagctgccaagcctccttcatttttgcattctgtgcacctgcaggcttattgtcctgtggaggccgccatgggttatggtttgtgccctccaaagcatcccaagctgtacctgggaccttttgatctgaggctggaactggggttgcctgtatgcaggaagcagtgtcttgaggcttctttggggcagcagggccctgggcctggcccgtgaaaccattctttcttcccagggctctgggccccctgacaggccccggtgtgtgatgttccccatccctgtgtccatgtgttctcattgttcaactcccacctatgagtgagaacatgcggtgtttggttttttgtccttgtgacagtttgctgagaatgatggtttccagcttcatccatgtccctacaaaggacatgaactcatcattttttatggctgcatagtattctgtggtgtatatgtaacatgcttgtcaatttaaaaacatgataagatgaacaccagtgaacacatcacctagagaatgaagcaaacatcaaaaattctattgcagcttcccgtgtggccctccgccatcccagctctctattccatgccagggatatcccattttgaacttcgtatttaccatgtcaatgtgctgttgacatttataggtaattttacatgtaaaactctatatatctctatgtgttgccaaacaataaatatttggccttgcttattttacagttttacaacaaaa

SEQ ID NO: 139318 - DNA, 3371 bp, Homo sapiens
atgaatagagcaccaatcccaaagcaatcaaaagacaaaacatctagagaaaccaagaacacatcacgaagcaagacacgagaacggaccgatgagctagaaggcctaagcacagacaaccacgcagaaacacaacacgctgaaaccaataccgatatgacacacgaacgatacacccaaataagaaaccatacatacaaaacaacacaccaaatggaagacaaaagaacaaaaccaaaaagagaaaaagaaatacataatagacccgatgacatggctaaggctgggatcccccgcagcattctaaacactggacaccctggaaagctgatgcagacagaggtgcaccacgtgcggacgctcaagatcatgctgaaggtgtactccagggccctgcaggaggagctgcagttcagcagcaaggccattggccgcctcttcccatgcgctgacgacctgctggagacgcacagccacttcctcgctcagactcatgagcggtccggctatgttcctctctgtgtatgcgcaactcacacgaagttctacgaattcatggaggatgtcaatacagcttatactaagcgccacacgatgttccgctcactctccatggtgtctgagtgcctgttctcgctcatcaatggggacgacatgtttgtgacgttcgccgccatgcaggcgcagcagggccgcagcagcctggtgtggctcttctcccagctctacctttactccttcatcagcctcttcatctacatggtgctcaagctcttcatcgaaagtagcggtaccacgccccctgtcttggggttctcagatggcagtttcaagaataaagtcagcagcactgaccccaggccccgagactggcgaggccccccaaacagcccggacttgaagctcagtgacagtgacattcctgggagctctgaggaatcgccgcaggtggcgaggaaccccctacagggaccaccagctttcagccggggcaggtgtggtggtgcctaccagatgccagatgtccccggctattcctttgcctttgaatcagaaggccaggtgcggattggctttcagttgagatcctcgcccagtatctctcatgtccgcaaatttctacgaggctctatagaagaatttttccgcgggcggaatctaacaaccaatatacatagaacgagctcactgaagccacaggctgaaacagggggctacatctcccagcaagctgtaacttcagaaggcgaggtgcccagagtcctaaacaacaatccacagactattttccatcatgaaggccgcagtaaagcgcaggccaacagtctgaaaggggtgaaaaaaactgcctttgcccgcaagctgcgtgagccgaaatatggcgctgcggcggacaaagttcctgccgaccaacttcgtaaaggcgatatcgtactggtagaagctggcgatattatcccctgcgatggtgaagttattgaagggggtgcatcggtcgatgaaagcgccatcaccggggaatcggcaccggtgatccgtgaatccggcggcgattttgcctccgtcaccggcggcacgcgtattctttctgactggctggtgattgagtgtagcgttaaccccggcgagacatttctggatcggatgatcgcgatggtggaaggcgcacagcgacgcaaaacgccgaacgaaattgccctgaccattctgctgattgccctgactatcgtctttttactggcaaccgccacgctgtggccgttttccgcgtggggcggtaatgcagtcagcgtaacggtactggtggcgctgctggtctgtctgatcccaaccactattggcggcctgttgtcagcgatcggcgtcgccgggatgagccggatgctaagcgcgaatgtgattgccaccagcggacgtgcagttgaagcggcaggtgacgttgacgttctgctactggataaaaccggcaccatcacactcggtaaccgtcaggcggtcggagtttatccccgcgcagggcgtggatgaaaaatacgctggcctaacgccgcacaactggcttctcctggctgatgaaaccgccggaaaggccgcagtattgtgatcctcgccaagcagcgttttaacctgcgcgagcgcgatgtgcagtcgctccatgccacctttgtaccgtttactgcgcaaagccggatgagcgggatcaacatcgacaaccgcatgatccgtaaaggttctgtcgatgccattcgtcgccatgttgaggctaacggtggtcacttccctaccgatgttgatcaaaaagtcgatcaggttgcgcgtcagggagccacgccgctggtggtggtggaaggttctcgtgtgctgggcgttattgcgctgaaagatatcgtcaaaggcggtattaaagagcgcttcgcccagctgcgcaaaatgggcattaaaacggtgatgattaccggcgataaccgtctgactgccgccgcgattgctgcggaagcgggtgtcgatgattttctcgccgaagcgacaccggaggccaagctggcattgatccgtcagtatcaggcggaaggtcgtttggtagcgatgaccggcgacggcaccaacgatgctccggcgctggcgcaggcagatgtcgcggtggcgatgaactccggcacccaggcggcgaaagaggcgggcaatatggtcgatctcgactctaacccgaccaagttgatcgaggtggtgcacattggcaaacagatgctgatgacccgtggctcgctgaccaccttcagcattgccaacgatgtgggcgaaatacttcgccattattcccggcggcattcgcggcaacgtatccgcagttaaatgcgctgaacatcatgtgcctgcattcgcccgactccgcaatcctcagtgcggtgattttcaacgccttgattatcgtctttttgattcccctggcgttaaaaggcgtgagttataaaccgcttaccgcttctgccatgttgcgccgtaacttatggatttacggtctgggtgggctgctggtgccgtttatcggtatcaaagtcattgatttactgctgaccgtttgcggtctggtggacatggatgaagctggaaaccatcattctcagcaaactatcacaagatcagaaaatcaaacaacgcacgttctcactcataagtgggagttgaacaacgagaacacatggacacagggaggggaacatcacacaccggggcctgtcaaggccaaatacagcaaggatcctctgtgcttcaaaagcacacctcgggcttcccctcaggtcttccttgccttaggcaaaaagggccagagaagtgagaaccgtctttgcattttgcccatcagcaagtag

SEQ ID NO: 139319 - DNA, 261 bp, Homo sapiens
ctgtggtggagcggatcaacaacaccttccgtcggccgatcagatccaatggtccgcgggcattgagccgggcgatccgcgcttgtcgattacttcctgccgatcgttgccgatgcggaagccggttttggcgtgtcctgaatgcctttgaactgatgaaagcgatgattgaagccgaaaaacctcgacgaaaaactattgccagcttccagcagcagctgtcggatatgggctacaagtccagttcatcacctctggcag

SEQ ID NO: 139320 - DNA, 447 bp, Homo sapiens; identical to SEQ ID NO: 127293

SEQ ID NO: 139321 - DNA, 1398 bp, Homo sapiens
  misc_feature (1)...(1398): n = a,t,c or g
atgtatccctggtctgtccgggacagccagaggcggcccctgggcgctgcgtgccgcgacctacgcgactgcgcgaccctgcgctacatgctgcgcggcaacaccgtttccgatgcgccgctgattatcggtagcctcgaccgttgctattcctgtaccgaccgcatgaccgtggtcgatgtgcgtaagaagaagagcaaagtggtgccgtacaaagaactcgagcgttacagcattgagcgaatcgccatgtttacctttatcagagaagtcatcaagaccggcacggcgacctcgtcttatccgctggagccgattgcggttgatagaaacttccgtggtaagccagagcagaacccgcagcagtgcatcggctgcgcggcctgcgtcaatgcctgcccgtcaaacgccttaacggttgaaactgacctcgccacaggagagcttgcctgggagtttaatcttgggcactgcatcttctgtggacgctgcgaagaagtctgcccgacggcggcgatcaaactgtcgcaagagtacgaactggcggtgtggaagaaagaagacttcctgcaacagtcccgcttcgcgctgtgcaactgccgcgtctgcaatcgtcctttcgccgtccagaaagagatcgactacgccattgcgctgcttaagcacaacggcgacagccgcgcaggaaaaccaccgcgaaagctcttgagacttgcccggaatttcaagcaaatgggttatcgcagtgatattcggacatttaatagtcgggatatttataccgcccgcgataatcgtaagagctggcataacgtgacggnaagtacggtgattgccgctcatgaaggcaaagcgccgcagcagatcatcattatggcgcatctggatacttacgccccgctgagcgatgctgacgccgatgccaatctcggcgggctgacgttacaaggaatggatgataacgccgcaggtttaggtgtcacgctgcaattggcagaacgcttgaaaaatacgcctaccgagtatggtattcgatttgtggcgaccagcggcgaagaggaagggaaattaggcgctgagaatttactcaagcggatgagtgacaccgaaaagaaaaatacgctgctggtgattaatctcgataacttaattgttggcgataaattgtatttcaacagcggtgtccaaacccttgaggcacgccatcaacgaagttttaacacggttaaaccgtggcccgattcggtgatctctaatcgtccgtttgcgggtaataccggcagcgtagatgataacgacgaaatacagcgcaatctgaatgacactaactacaaccgcatgtgggaatacaataaccgcggcgtgggtagtaaagtggttgcagaggcgaagaagtaa

SEQ ID NO: 139322 - DNA, 2107 bp, Homo sapiens; identical to SEQ ID NO: 127298

SEQ ID NO: 139323 - DNA, 1629 bp, Homo sapiens
ttatgggatctcaatggctaaataatcgctcgcccgccgccgaacttcatccacgcgggccatatcgtttgactgcaacgccgcatcaaaatcggtgatcacccggccgatctcttctcgctcgtcacccagcgcccgcgcccacaactcttccagtttggctttaaaggtgcgattgatgagcatatcgcgcggataaattttcaatgcggataaccgcgtccgactctcttcaatcgtgtgcgcgctcaatgttaccgggctgtggttaatcactctggacttaacgctgccgtcttccagaagcacgtcaacttcaagcaacccgttgatatcataactaaagcgaatatcaatcgactgataagccccggttttcttcaacggcacatcgaaggattccaccagaatgttgtttttaactttgtggttttctccctgatagacgttaaccgtaattgaatcctgttccgggtgcatggttgaataagtttctacacgcgacacgggcacagtggtgtttcgttcaataatcggcgagaaaatgccggaaacgccctggcggttaacttcaacgcccaacgagtaagggcaaatatcagtgaggattacctcttcaatatcttcactgcgtaagcggcaggcggcctggattgctgcgcccagcgcgacaatggtgctcggatcgtaactttgatacggtaatttgccaaacagacgcacggcgattcgctgcaccagcggcatttgtgacgcgccgccaaccagcaccagactgtcgatttgactcggcttcagacgcgcatcgcgcaacgcctgttcaatcggcactcgcaagcgattgagcagcggcaaccacaaatcttccagttcgttctcgtaaaattcgcattcccgcgtttcttcctgatactgccagcgaatgtgcaatggcgattgattgctacattttgccgcttccacacaggcgtacaaggctgccagttcactctcgttaagcgtggtcctggcgacatccgcgattatcagcaaaccaatcttgactggtataactccagaaacacgaccaagctggacgaatccgttaaccgcgtaatgccgcaattcaaagttgacggcaaaatggtctttgaacgcgatatggaaatgctggctccgggttataccaaacgctggaaccgcgcgcgcagtatttgtacgtgccgtatcgcgatcagagcgacatctataactacgactcgtctctgctgcaatctgactactctggcctgttccgggaccggacttacggcggtcttgaccgtattgcctccgtggcgtatctccgagcgttggggattgcgtggcgggattcagtacgatacacgtctggataacgtagcgaccagtaactccagcattgaataccgtcgggatgaagaccgtctggtacagctgaattaccgttacgccagcccggaatatattcaggctacgctgcctaagtactattccactgctgagcaatataagaatggtatttcgcaggtaggtgctgtcgccagctggccaattgccgatcgttggtccattgttggggcctactagttccccagtagtaaaccctgttttccttgccatagacaccat

SEQ ID NO: 139324 - DNA, 1275 bp, Homo sapiens
atgcggctggcgtccacgccctgggtgatcaacgcgctggaacggaatccgcacgttgctgggagagacgcatgttcaggtcgtgaccaccgtgctgtcggtataaccaatcacgttaaccgccgttttcggatactcttcagtaccattgccacgccgctgcgcctgctgctgcgccaatcagcgcgcctttaccgcgatctttctcgaagaagagagcgcacaaataccgcgcccagagagagccagactggggatgcaattactgttcggtcgcggcagtttggcgatgcgctgatggaactggatgtggtaatccacaagctgacgcctgctttcatggtggcgatcagcgccagttgttcatcattacgtccttcaccagctgcgcgtagtcgttgtcactttttgccgaccaggacgggtcaggtcagccgcatagccgttatattctgccccggcatccagcggaaagctgcgcatctacttccggttgcctggataggtccaagttttggggtaaatgcgagtacccgcaagcgtgttcggttaagcgccacaatgttgtgtaaggtacgtcggtatcacgatgaccggtcgcggccagttcgactcagttttgaaggagcgatagtaatgcaggtagtcgataacccctttgggttgatgttgctggcctcaatacccagttgcagcgcacgttccggcacggaccgatataaccgatattgccgcgcgcagcaggcagcaggctaccatgccatcggctttcggcagcgcgatcacttccacatcttcagtccagaagaggtcggcagcgaaaaactcgacgacaaaactattgccagcttccagcagcagctgtcggatatggctacaagttccagttcatcaccctggcagaatggggttaagtcgaagccaccgccaaccaccagacgggacggcacccggtttttcggcgataaaaaaccgcacattcgcgtggctggtggaacatacggttatgcggatgcactacacagtgaaggccggtaccgactactaggatcgaaagatgcagctggcaataccgcgctgcgcatggcgatgcagactgcgagcaacatatccgccgtgagaaagcgaactccaacatttgtacttccaggtactgctggcaaacatcgccagcctgtatgccgtttatcacggccggttggcctgaaacgtatcgctaaccgcattcaccgtctgaccgatatctggcggcgggcctgcaacaaaaaggtctga

SEQ ID NO: 139325 - DNA, 1167 bp, Homo sapiens
atggtatttgacccggtttcgctggcggccctgacgcgtaaagtcggacgcaaagtgcgttacgtcattgttctgcggggacaaattgtcacagggttacgtcactggtatgcacgccgacgcggtcacgatccgcgggcaatgagcctgaccgggagttatagcagtgtctgggctgaagacgacattcagtttgattcccgttttctggaattaaaaggcgacacaaaaattgatctgaagcgtttttccagccaggggtatgttgagcccggaaaatacaatttacaggtgacgaccggtgtcacatctcgcatatatgatgatgctgccgttgaacgttttaatatttccgttggtcaaatctactatttcacggagtctcgcactggcgatgacaacataacatgggagaatgacgacaaaacgggttcactggtgtgggcaggcgatacttactggcgtatctccgagcgttggggattgcgtggcgggattcagtacgatacacgtctggataacgtagcgaccagtaactccagcattgaataccgtcgggatgaagaccgtctggtacagctgaattaccgttacgccagcccggaatatattcaggctacgctgcctaagtactattccactgctgagcaatataagaatggtatttcgcaggtaggtgctgtcgccagctggccaattgccgatcgttggtccattgttggggcctactactacgacaccaatgctaacaagcaagccgactctatgttaggtgtgcaatacagctcctgctgctatgcaattcgcgtcggttacgagcggaagctgaacggttgggataacgataaacaacatgcggtatatgacaacgcaatcggctttaacatcgaacttcgcggcctgagctccaactacggtctggaaccaaatgttcaaatcgaggggatttctatggaagcgcgggaagcaaccgctacgggtgaatcatgcatgcgcgtcgatgccattgctaaggtcaccgggcgggcacgatatactgacgattatgttatggcgggcatgtgttatgcgaaatatgttcgtagccctatcggacatggttatgccgtaagtatttatgatgaacaaagccaaaattttgccggggcgtaccgggcgaaattttaa

SEQ ID NO: 139326 - DNA, 2427 bp, Homo sapiens
atgaaacggataataacaggatgcctgctgctgaacttcgccatggccgctcaggcagagtgtaatatctccagtagcatacaaaatatcgactatggcaaacgaagtgctgccatgcgccaagttgaccggggtaatacaacacaattagcagacagaacaatcacgctggtaatgcaatgcgatcaggacgctcatattcgtgttcagttgaataccgctaatatttccaacaacggatttggatttggcccgaatggttcattaaatctgatcgccagcgatgcattttcagtcgttcacgtgcagaataacctcgacgacaatactattgccagcttccagcaacacctgtcggatatgggctacaagttccagttcatcaccctggcaggtatccacagcatgtggttcaacatgtttgacctggcaaacgcctatgcccagggcgagggtatgaagcactacgttgagaaagtgcagcagccggaatttgccgccgcgaaagatggctataccttcgtatctcaccagcaggaagtgggtacaggcgtttacgccgcatccggcaattctctgctcctgatgagggcgctaaatgccgcgtggcctggaattattgattgctcaaaccattttgcaaggcttcgatgctcagtatggtcgattcctcgaagtgacctccggtgcgcagcagcgtttcgaacaggccgactggcatgctgtccagcaggcgatgaaaaaccgtatccatctttacgatcatcacgttggtctggtcgtggagcaactgcgctgcattactacacggccaaacggtgtaggcctgataagacgcgccagcgtcgcatcaggcaaccggctcgggcgttggatgtcggatgcggcgtgaccgccttgtctgacctaccggggtgccgcacttcacagcggtgtaggcctgataagacgcgccagcgtcgcatcaggcaaccggctcgggcgttggatgtcggatgcggcgtgaccgccttgtctgacctacggggtgccgcacttcacggcagtttagcgaactaccgcgttgtcaattttctcttccgccttccagacgcgatgattctctctgtccttcttcgttcgtgtccttttgtattccctcttctccgccgtttgcgtgctggtgcccccgtgggtccgtattgcactgggactcccatcactcctttgccatccacacggttgtttgccccattgccaaaccggtgttcgatggccggaatgtacggcggcctacaaccggtgccgcatccggcaattggtgcacgatgcctgatgcgatgcttgacgcatcttatcaggcctacaatgggtaccggatcgatggctgaagaggctctggggacgagtttcaagaggttatgtgcgcattatagccggatgcgatgctggcgcatcttatccggcctacggggagccaggccgaataaaatcgtatgccggataaggcgtttacgccgcatccggcctattttaaggctgcgttttccccggcattcgcgggtcgtctttatattcggcggtggcaatccacgccgcgcaaaacagcgtcaaacgggcgaagaagtagaaaaatgccatcagccccagcacggaaccaaatgctgcgccagagggggatttgctgcatgccttgtcttcgaatacgtagtggtcttctggacctcgctacccgactctttttgccgaaagagttttccaacccgtattcgcggatcaatggtcccctcgctgtgggatttcccacccggggtcgatggccgtaaagggaagaccagttggaacggggtcccggggccgtgtgtcacttgtggtctgggcttaacgtgccctgaatctccgtgttgtcccgggctttccctgggggatgggtaccctgaaaaggtgtctgtgggaccaccaatcccgctaaaatttcaggccattctgcaggcatttcacgagatcttcggcgaaggatcctgccatattgcatccgttgccgtcgagagcggtgtaccggaacagccctttggcagtgaggaaacgcgcgctggcgcacgaaatcgggtagccaatgcccgccgtttacttccagaggctgatttttgggtggcgattgaagctggcatcgatggtgacagcactttcagttgggtggtgattgaaaacgccagccagcgcggcgaggcgcgttcggctactttgccgttgcctgcggtgattctggaaaaagtgcgtgaaggtgaggcgcttggtcccgtgatgtcgcgttataccggtattgatgagattggtcgtaaggaaggggcgatcggcgtgtttaccgccgggaaactcactcgcgccagcgtctatcaccaggcggtgatcctggcgctgagtccgtttcataatgccgtgtattaa

SEQ ID NO: 139327 - DNA, 1197 bp, Homo sapiens
ttaacggcggtattgcaggatcacggtacgctggcagagcatgatatctatattgccggacgttttgagatggcgaaaattgcccgcgatctgttttgcagtgagcgtaatgcgcgggaagatcgcctgtttggcgatgcgtttgcatttattgcacatcctccattctttggccagaaccactctgttgttggtggttgcagtgttgaatactgggtggttgcagtgtgggaaggaatactgggtggttgcagtgttgaaattggaagttggactggtggcaccacctcgaggcccgggtctcgatttaaccttgtgttcccgttctaccaaaaagtcgattccccccctttgttccctcgcaagggaaaagacagctgcctgctgtatgcaaccaaatctaatcccaaaagcttggttctgccctgccctggtcgcacataacatcttttcttcttcttcttcctcttcttcttcttcttcttcctcttcttcttcttcttcttcttcttcctcttcctcctcttcctcctcttcctcctcttcctcctcttcctcttcttcctcttcttcttcctcttcttcttcctcttcttcttcttcttcttcttcttctttttttttttttgacagggtcttattcttcgcctctgcaaccactttactacccacgccgcggttattgtattcccacatgcggttgtagttagtgtcattcagattgcgctgtatttcgtcgttatcatctacgctgccggtattacccgcaaacggacgattagagatcaccgcatcggcccacggtttagccgtgttaaaaccttcgttgatggcgctatcacggatcaccacctgaccgttggtattggcatcaacatccagcgagcggcccagttgcgccacaccatcaccgaaagcattgaaacggctgtttacggcgaggaaaccgtagtaaatgttggacagcgtagccggtgcaaacacatacgcttcttgctgagtacgtgagttcaccacgcggaattcggtgttatcgaacaccactgcgccgcgaccagaaacgatattcacattcccttcaatgtagctgttggtcaccagcgtacgcggctgacgatcggttccacacggtctgccaccgttgttggtgcacaagggttttggcacgaaagttacgtgtaatgtgctggcccacat

SEQ ID NO: 139328 - DNA, 2922 bp, Homo sapiens; identical to SEQ ID NO: 116324

SEQ ID NO: 139329 - DNA, 1669 bp, Homo sapiens
ttagcgattatcgagctgagcgcgaactttattcagctcggtggtgttgattcgatagggctggccattgacggacttgataagttttttggttttgagttttttgaagacggcgagcgtgcagtcggtcagcaacagcccttcgcggctgtagcattcaacggaagtgacgcggcctgaagaatcgcggacgtgcgcaatacgtctaccgcggtgtccgcattcgatttcggcgcattgataatcagtccggcccagaccgtagttggagctcaggccgcgaagttcgatgttaaagccgattgcgttgtcatataccgcatgttgtttatcgttatcccaaccgttcagcttccgctcgtaaccgacgcgaattgcatagcagcaggagctgtattgcacacctaacatagagtcggcttgcttgttagcattggtgtcgtagtagtaggccccaacaatggaccaacgatcggcaattggccagctggcgttctgtcctacctgcgaaagcacgcattcttatatgtgatcagcaagtgggatagtacttacacacgcgtagcctggttatattccggactggcgaagcgggaattcagctgtaccagacggtcttcatcccgacggtattcaatgctggtgatactggtcgctacgttatccagacgtgtatcgtactgaatcccgccacgcaatccccaacgctcggagatacgccagtaagtatcgcctgcccacaccagtgaacccgttttgtggtcattctcccatgttatgttgtcatcgccagtgcgagactccgtgaaatagtagatttgaccaacggaaatattaaaacgttcaacggcagcatcatcatatatgcgagatgtgacaccggtcgtcacctggttagcggaggcaatacgggcaagaccgccgtaagtccggtcccggaacaggccagagtagtcagattgcagcagagacgagtcgtagctatagatgtcgctctgatcgcgatacggcacgtacaaatactgcgcgcgcggttccagcgtttgggtataacccggagccagcatttccatatcgcgttcaaagaccattttgccgtcaactttgaattgcggcattaccgcggttaacaggatgtcgtccagcgttgggtcgtgatttccggacatataccagtcaagattggtttgctgataatgggttgccagcaacttcgctttggtattgatgctgccccagttattacagagcggcaaattgatggtcggttccaggtgaacacgggttgcttcaggcatgtcgtctctggtggtaacaaagtgcactgcctggccgtaaatacgcgtatcaaacggaccaacatcattctgggagtaattaacgtctaactgcggctctgccgagtagctactggtgttctgttcgctgaaaacctggaactgcttggttgaaacggtggcattgaagttttgcaccgcatagccaacgctgaatttttgcgttgcgtagccgtcagtactggaaccgtacttgttatcgaaatcattgaagtagctaggatcgctgaccttggtgtagtcgacgttgaaacgccacacctgatccatgaccccggagtggttccagtagaataaccaacgacgtgaactgtcatcgttcgggtgttcat

SEQ ID NO: 139330 - DNA, 2690 bp, Homo sapiens
  misc_feature (1)...(2690): n = a,t,c or g
atgctgcatgcctgtaggtcgactttgaggatccccttgaggaaacaacgtggcgaaaaccgctataccattctggataacggtagctttacctcctgtctgccgggttctgacacctggagcgtggtaggtagcgaaattattcatgaccgcgaagaacaagttgcggagatctggaacgcccgctttaaggtgggtccggtaccgatcttttatagcccctatttgcagttgccggtgggtgacaaacgtcgctctggtttcttgatcccgaacgccaagtacaccaccaccaactactttgagttctacctgccatattactggaacatcgcgccaaatatggatgccaccatcacgccgcattatatgcatcgtcgtggcaacatcatgtgggagaacgaattccgctacctctcccaggcgggcgctggcttgatggaactggactatctgccttcagataaagtctatgaagatgaacacccgaacgatgacagttcacgtcgttggttattctactggaaccactccggggtcatggatcaggtgtggcgtttcaacgtcgactacaccaaggtcagcgatcctagctacttcaatgatttcgataacaagtacggttccagtactgacggctacgcaacgcanaaattcagcgttggctatgcggtgcaaaacttcaatgccaccgtttcaaccaagcagttccaggttttcagcgaacagaacaccagtagctacttcgcagagccgcagttagacgttaattactaccagaatgatgttgtgcactttgtaaccaccagagacgacatgcctgaagcaacccgtgttcacctggaaccgaccatcaatttgccgctctctaataactggggcagcatcaataccgaagcgaagttgctggcaacccattatcagcaaaccaatcttgactggtataactccagaaacacgaccaagctggacgaatccgttaaccgcgtaatgccgcaattcaaagttgacggcagaatggtctttgaacgcgatatggaaatgctggctccgggttatacccaaacgctggaaccgcgcgcgcagtatttgtacgtgccgtatcgcgatcagagcgacatctataactacgactcgtctctgctgcaatctgactactctggcctgttccgggaccggacttacggcggtcttgaccgtattgcctccgctaaccaggtgacgaccggtgtcacatctcgcatatatgatgatgctgccgttgaacgttttaatatttccgttggtcaaatctactatttcacggagtctcgcactggcgatgacaacataacatgggagaatgacgacaaaacgggttcactggtgtgggcaggcgatacttactggcgtatctccgagcgttggggattgcgtggcgggattcagtacgatacacgtctggataacgtagcgaccagtaactccagcattgaataccgtcgggatgaagaccgactggtacagctgaattaccgttacgccagcccggaatatattcaggctacgctgcctaacgtaaaccaccacataactatggagcatctgcacatgaaaacccgtacacaacaaattgaagaattacagaaagagtggactcaaccgcgttgggaaggcattactgcgcccatacagtgcggaagatgtggtgaaattacgcggttcagtcaatcctgaatgcacgctggcgcaactgggcgcagcgaaaatgtggcgtctgctgcacggtgagtcgaaaaaaggctacatcaacagcctcggcgcactgactggcggtcaggcgctgcaacaggcgaaagcgggtattgaagcagtctatctgtcgggatggcaggtagcggcggacgctaacctggcggccagcatgtatccggatcagtcgctctatccggcaaactcggtgccagctgtggtggagcggatcaacaacaccttccgtcgtgccgatcagatccaatggtccgcgggcattgagccgggcgatccgcgctatgtcgattacttcctgccgatcgttgccgatgcggaagccggttttggcggtgtcctgaatgcctttgaactgatgaaagcgatgattgaagccggtgcagcggcagttcacttcgaagatcagctggcgtcagtgaagaaaatgcgtcacatgggccgcanagcaagcgatcagccgtggcttgcgtatgcgccatatgctgacctggtctggtgtgaacctccaccgccggatctggaactggcgcgtcgttttgcacaagctatccacgcgaaatatccgggcaaactgctggcttataactgctcgccgtcgttcaactggcagaaaaacctcgacgacaaaactattgccagcttccagcagcagctgtcggatatgggctacaagttccagttcatcacctctggcaggtatccacagcatgtggttcaacatgtttgacctggcaaacgcctatgcccagggcgagggtatgaagcactacgttgagaaagtgcagcagccggaatttgccgccgcgaaagatggctataccttcgtatctcaccagcaggaagtgggtacaggttacttcgataaagtgacgactattattcagggcggcacgtcttcagtcaccgcgctgaccggctccactgaagaatcgcagttctaa

SEQ ID NO: 139331 - DNA, 1698 bp, Homo sapiens
tgctcagccagatgctgggcgaagagatgaaagtcattgccagcgaactgggcgaagaacgtttctcccaggggcgttttgacgatgccgcacgcttgatggaacagatcaccacttccgatgagttaattgatttcctgaccctgccaggctaccgcctgttagcgtaaaccaccacataactatggagcatctgcacatgaaaacccgtacacaacaaattgaagaattacagaaagagtggactcaaccgcgttgggaaggcattactcgcccatacagtgcggaagatggggggaaattacgcgggtcagtcaatcctgaatgcacgctggcgcaactgggcgcagcgaaaatgtggcgtctgctgcacggtgagtcgaaaaaaggctacatcaacagcctcggcgcactgactggcggtcaggcgctgcaacaggcgaaagcgggtattgaagcagtctatctgtcgggatggcaggtagcggcggacgctaacctggcggccagcatgtatccggatcagtcgctctatccggcaaactcggtgccagctgtggtggagcggatcaacaacaccttccgtcgtgccgatcagatccatggtccgcgggcattgagccgggcgatccgcgctatgtcgattacttcctgccgatcgttgccgatgcggaagccggttttggcggtgtcctgaatgcctttgaactgatgaaagcgatgattgaagccggtgcagcggcagttcacttcgaagatcagctggcgtcagtgaagaaatgcggtcacatgggcggcaaagttttagtgccaactcaggaagctattcagaaactggtcgcggcgcgtctggcagctgacgtgacgggcgttccaaccctgctggttgcccgtaccgatgctgatgcggcggatctgatcacctccgattgcgacccgtatgacagcgaatttattaccggcgagcgtaccagtgaaggcttcttccgtactcatgcgggcattgagcaagcgatcagccgtggcctggcgtatgcgccatatgctgacctggtctggtgtgaaacctccacgccggatctggaactggcgcgtcgctttgcacaagctatccacgcgaaatatccgggcaaactgctggcttataactgctcgccgtcgttcaactggcagaaaaacctcgacgacaaaactattgccagcttccagcagcagctgtcggatatgggctacaagttccagttcatcaccctggcaggtatccacagcatgtggttcaacatgtttgacctggcaaaagcctatgcccagggcgagggtatgaagcactacgttgagaaagtgcagcagccggaatttgccgccgcgaaagatggctataccttcgtatctcaccagcaggaaaatcgcagttctaagcaacaacaaccgttgctgactgtaggccggataaggcgttcacgccgcatccggcaatcggtgccccggaccggcatcggttgcgcatcacgaaggtttaacacggctaaaccgtgggccgatgcggtgatctctaatcgtccgtttgcgggtaataccggcagcgtagatgataacgacgaaatacagcgcaatctgaatgacactaactacaaccgcatgtgggaatacaataaccgcggcgtgggtagtaaagtggttgcagaggcgaagaagtaa

SEQ ID NO: 139332 - DNA, 517 bp, Homo sapiens
gtctgtcgatggcactgaacaagtcggtagtaaataacgattcgcaaagggtatccgaaccgcgttcgtcagcagcggcaacgggcatttgggtctatgaacgttatcctgccgtatatggtgcgctgccgtacaccatcgatagtaagacaggggaagttatgtggaaatatcaggtagaaaacaacctgatgacaaccgaagctggagttgcagctgctgaagatgagatggcaacaggaacgcgttatgctttattgagaggcgatcaaaacagagattctctgaaggctgcaagagaaatttctcgccgcgttctcgggctgaagagtgtactaatccgacatatcactatgagctcactcctgaaatatcgtcatgacacggagatccggaaaactgcgatggtgcagcatgcgaatttagccaccaacattcagcgtctgtatcagcatgagctctactaccggaccaatggtcgcaaaggtgagcgtctgagcagcgtcgatctggaaac

SEQ ID NO: 139333 - DNA, 1463 bp, Homo sapiens
ttagcccagaactttagcaacaacgcccgcgccaacggtacggccgccttcacggattgcgaaacgcagaccgtcgtccatcgcgatcgggtggatcagggtaacaaccattttgatgttgtcgcccggcattaccatctctacgccttcctgcgaaaagagcggcagctcatcttcttcaaattcaaatacgcccgcatccaatacgccggctaatggcggttcggctacaccagcacagggcactgttccgtctaattcttctgtagttgcctcctctgcaagcatgtgtcttatgttactacctaatgaaacgctcttcttaagcaccggattaaaggtgcgtttaatcatacgctcgccatcagacaatcctggagtgtccctttcaggccatccatctcccatggacagaaggctcttggcttggctaatgactgctgactgacgtccagacttaaccccagacctcagctccagtagcagggacgctgtccaaggtcttcttaccgccctccaggtactcaggccacagagagtcttgagagaggccccaggacctagggagatcccctcgagttgcaacagcacgtccccgacgccgcgctggccgcgctccaggatctctccggcaccgggaccgatgcaggggccacggggagcggtggtgtccagggcccggtcggaagtcagcaagtccagcttcagcgcgtttccctcgaggcgcccttgagcaagtctgtggccattcttggtgtagaagcaggtgccattgatgaggttgacacagcagccgatcacgtctcctgtggtgaatgtgggaccatagggctggccagtccctgaggagcagaacgaatgcccatcatcaccatggtaaccataggaatgtttgtcccaaccatgtggactctgtgaggtgctctcaagcacccgtagccggggctgctccgtgggcagcaagctgaagcggtccacctggagatagaactctgcgggcgcgccgccctcagcgacctggacatgaaccccgcagtcctgcagcagcagcagccggccctctgtcccgcggaagccgaactccttctcctcccagtccgaggtgtccagggcctcccgcgtcaccaggcatcggacactgtgggtcccgtcagacacaagcagcgtggccccgacgtcggacgtatcaggggcgtgggatgggcccgcgaccgcggcctcggcgtcctgtagtacgttctccataggcgcggtcatataggctatacatgtacccactctctttacgcacatgagcatccttcctccataagaatgcccattggtgtgattggcccattcttgcttgccctgtccctgaggcaccagggttttatgcagaggagggatacggtagatcatgctggtgtccacctgaaggtggtactggagccaaattggagcaaaagaacccaggtaggagg

SEQ ID NO: 139334 - DNA, 476 bp, Homo sapiens
atcatcaaagttggtgaagaagttgaaatcgttggtatcaaagagactcagaagtctacctgtactggcgttgaaatgttccgcaaactgctggacgaaggccgtgctggtgagaacgtaggtgttctgctgcgtggtatcaaacgtgaagaaatcgaacgtggtcaggtactggctaagccgggcaccatcaagccgcacaccaagttcgaatctgaagtgtacattctgtccaaagatgaaggcggccgtcatactccgttcttcaaaggctaccgtccgcagttctacttccgtactactgacgtgactggtaccatcgaactgccggaaggcgtagagatggtaatgccgggcgacaacatcaaaatggttgttaccctgatccacccgatcgcgatggacgacggtctgcgtttcgcaatccgtgaaggcggccgtaccgttggcgcgggcgttgttgctaaagttctggg

SEQ ID NO: 139335 - DNA, 1221 bp, Homo sapiens
ttaaattagagctcggtgcccactgcgggttccaggtataaccacctccgagcaccacgatatagtccactttttgcgaattattccatgtcggataggtgctgcaaaccatttggtcggattcgagtacaggctgatggtttcagtaacgttctgtccctcttccgatactgctcccggatacttctcgacatcaactttgatgttcagatcccaccaggaacggcccagcatcaggcgtgtcagcggtttttccatatagttgagcgggtagctcgggttcatcatgcccgctttgctgctaccgtcaccgtagatcatgttgttatcgaccagcgattttttcagatctgcagaacacttggtgccgcctgcataggcatcattggcgtagcagttcaggaactcggtgaacgttttaaagcccagctcgtcatttttgccttcttcataacgatagctcgtatcgttccacagccagaccgacatgttctggtacagacgttccagatcgacgctgctcagacgctcacctttgcgaccattggtccggaagtagagctcatgctgatacagacgctgaatgttggtgcctaaatccgcagcctgcaccatcgcttttgcagtgtcggcgttaaggcttagttgcgtatactgtggaacatacatgccaccagtaaccggaacccccgtgccaggacgatattccaggcagttgacctcatagtgatatgccggattagtacactctttcagccccgggaacgcggcgaaaattttctccttcgcagccttcagagaatcctctgttttatgatcggcctcatcaataaaggcataacgcgtttcctgtttgccatctacatcttccagccagctggcaacttccagcttcggtttgtcatcaggtttgttttctacctgatatttccacttaacttcccctgtcttactatcgatggtgtacggcagcgcaccatctacggcaggataacgttcatagaagcgacatgcccgttgcgcgctgctgacgaacgcggttcggataccttgcggatcgtaaactgcctcatcgagcaaagcctggctggcggtgacaccggtaacaattttttgcaccgtctctttgccttccacctgcaaaccattcggcgcgtaatcactaatcgccgcgctgttcagtttttcgttaatcagttgttccagttcggtgtttttcat

SEQ ID NO: 139336 - DNA, 1624 bp, Homo sapiens
atgtgcgaactcgatattttacacgactctctttaccaattctgccccgaattacacttaaaacgactcaacagcttaacgttggcttgccacgcattacttgactgtaaaactctcactcttaccgaacttggccgtaacctgccaaccaaagcgagaacaaaacataacatcaaacgaatcgaccgattgttaggtaatcgtcacctccacaaagagcgactcgctgtataccgttggcatgctagctttatctgttcgggcaatacgatgcccattgtacttgttgactggtctgatattcgtgagcaaaaacgacttatggtattgcgagcttcagtcgcactacacggtcgttctgttactctttatgagaaagcgttcccgctttcagagcaatgttcaaagaaagctcatgaccaatttctagccgaccttgcgagcattctaccgagtaacaccacaccgctcattgtcagtgatgctggctttaaagtgccatggtataaatccgttgagaagctgggttggtactggttaagtcgagtaagaggaaaagtacaatatgcagacctaggagcggaaaactggaaacctatcagcaacttacatgatatgtcatctagtcactcaaagactttaggctataagaggctgactaaaagcaatccaatctcatgccaaattctattgtataaatctcgctctaaaggccgaaaaaatcagcgctcgacacggactcattgtcaccacccgtcacctaaaatctactcagcgtcggcaaaggagccatgggttctagcaactaacttacctgttgaaaattcgaacacccaaacaacttgttaatatctattcgaagcgaatgcagattgaagaaaccttccgagacttgaaaagtcctgcctacggactaggcctacgccatagccgaacgagcagctcagagcgttttgatatcatgctgctaatcgccctgatgcttcaactaacatgttggcttgcgggcgttcatgctcagaaacaaggttgggacaagcacttccaggctaacacagtcagaaatcgaaacaatcttaccgggaaagtgtggacgtgcgatgagctggagatcatggctgacctgtgcgagcgtcatggtgtgcgggttatttccgatgaaatccatatggatatggtttggggcgagcagccgcatattccctggagtaatgtggctcgcggagactgggcgttgctaacgtcgggctcgaaaagtttcaatattcccgccctgaccggtgcttacgggattatagaaaatagcagtagccgcgatgcctatttatcggcactgaaaggccgtgatgggctttcttccccttcggtactggcgttaactgcccatatcgccgcctatcagcaaggcgcgccgtggctggatgccttacgcatctatctgaaagataacctgacgtatatcgcagataaaatgaacgccgcgtttcctgaactcaactggcagatcccacaatccacttatctggcatggcttgatttacgtccgttgaatattgacgacaacgcgttgcaaaaagcacttatcgaacatgaaaaagtcgctatcatgacccgcaacccatga

SEQ ID NO: 139337 - DNA, 894 bp, Homo sapiens
cgccatcgctttttgaccactgatgacggcaaatttgcggtagccaatggctccttcagttagcgtggcttgcaccaccgactgggttgcttcggcgttttccggcaatttgttgaggtcgatatacgcctgattgcgataataattgttaacgtcagaaacgacggctttaccaaacatattggtataaacagcagccccgttaccttccaccggaacatcggcaacgccatcggcatcaatcagcaggcgtgtcccgcccatattctgggtacggtgaagtgcgccgccgtgggtagtaagcgttgcgccgccctgtaacgacaagcccgcagaggtgtattgcccttcatggtagttcgcactgaggtcaacctgcgccagcgaaccatcatggctgtagtagccatcaacgctggtgtgtttgtcactggtgaaactgctggacgaaggccgtgcaagttcgaatctgaagtgtacattctgtccaaagatgaaggcggccgtcatactccgttcttcaaaggctaccgtccgcagttctacttccgtactactgacgtgactggtaccatcgaactgccggaaggcgtagagatggtaatgccgggcgacaacatcaaaatggttgttaccctgatccacccgatcgcgatggacgacggtctgcgtttcgcaatccgtgaaggcggccgtaccgttggcgcgggcgttgttgctaaagttcttgagcagctgcaaaaacaccagggaaataccattgaaattcgttacaccacgcatgaacaattcaaacaacaaaccgcagaaagtcaggcggtaattcgcagcggagaatgttctccgtatgcgaatatcattctctgtgctggcgtgacgttctgaggccgtcat

SEQ ID NO: 139338 - DNA, 2063 bp, Homo sapiens
atgaagaacttcatggagaacgtgctgcgctatctgtccgacgataaatggaagccggacgcgaaagccagcatgaccgtaggcaccaacctggatactgtctattttaaacgtcatggtcaggttacaggaaacagcgctgcgttcgacttccatccggattttgcgggcatctctgttgagcatttaagtagctatggcgatctcgatccgcaggaaatgccgctgctgatccttaacggctttgaatatgtgactcaggtgggtaacgatccttatgcaatcccgctgcgtgcagataccagcaaaccgaagctgactcagcaggatgtgaccgatctgatcgcctatctgaacaaaggtggatcggtgctgatcatggaaaacgtgatgagcaatcttaaggaagagagcgcgtctggttttgtgcgtctgttggatgccgcaggtctgtcgatggcactgaacaagtcggtagtaaataacgatccgcaagggtatccgaaccgcgttcgtcagcagcgcgcaacgggcatttgggtctatgaacgttatcctgccgtagatggtgcgctgccgtacaccatcgatagtaagacaggggaagttaagtggaaatatcacgtagaaaacaaacctgatgacaaaccgaagctggaagttgccagctggctggaagatgtagatgggaacaggaaacgcaactttagcaacgacgcccgcgccaacggtacggccgccttcacggattgcgaaacgcagaccgtcgtccatcgcgatcgggtggatcagggtcacaaccattttgatcttgtcgcccggcattaccatctctacgccttccggcagttcgatggtaccagtcacgtcagtagtacggaagtagaactgcggacggtagcctttgaagaacggagtatgacggccgccttcatctcttggacagaatgtacacttcagattcgcacttgcccacagaatcctaccgggaaagtgtggacgtgcgatgagctggagatcatggctgacctgtgcgagcgtcatggtgtgcgggttatttccgatgaaatccatatggatatggtttggggcgagcagccgcatattccctggagtaatgtggctcgcggagactgggcgttgctaacgtcgggctcgaaaagtttcaatattcccgccctgaccggtgcttacgggattatagaaaatagcagtagccgcgatgcctatttatcggcactgaaaggccgtgatgggctttcttccccttcggtactggcgttaactgcccatatcgccgcctatcagcaaggcgcgccgtggctggatgccttacgcatctatctgaaagataacctgacgtatatcgcagataaaatgaacgccgcgtttcctgaactcaactggcagatcccacaatccacttatctggcatggcttgatttacgtccgttgaatattgacgacaacgcgttgcaaaaagcactctatcgatcaagaaaaagtcgcgatcatgccggggtatacctacggtgaagaaggtcgtggttttgtccgtctcaatgccggctgcccacgttcgaaactggaaaaaggtgtggctggattaattaacgccatccgcgctaaaaagagtgcgaccatgattgataccaccctgccattaactgatatccatcgccaccttgatggcaacattcgtccccagaccattcttgaacttggccgccagtataatatctcgcttcctgcacaatccctggaaacactgattccccacgttcaggtcattgccaacgaacccgatctggtgagctttctgaccaaacttgactggggcgttaaagttctcgcctctcttgatgcctgtcgccgcgtggcatttgaaaacattgaagatgcagcccgtcacggcctgcactatgtcgagctgcgtttttcaccaggctacatggcaatggcacatcagctgcctgtagcgggtgttgtcgaagcggtgatcgatggcgtacgtgaaggttgccgcacctttggtgtgcaggcgaagcttatcggcattatga

SEQ ID NO: 139339 - DNA, 371 bp, Homo sapiens
attcagtttcaccgcgtatcccagcgcagaaccgtaaacagataggcatcagcaattgtaaatctttgccgcagatcccagtgctcaatccttcagtgcctcgttcacatattgcagttcttctccagctgcgcgcgaactgtcggtttgtactcttccggtgtatagggcgaaacagagcgggaaatactgtttaccggtgccagaactggcggtcggggacgctgtcggcaagatactgcataatcgctacgcttccgtcagcaaagtaccgtcatccagcagcaatgcaggcacctgcccctagggttaacggcaaagtaatcgtcaccgttttcgagacgttttttcataaatccacactgacgagg

SEQ ID NO: 139340 - DNA, 616 bp, Homo sapiens
ctaaggatccctcacgcattgctcgacggcttcatctgccagagttgcgtcgccttgcatgatcccggttgggattttggtgtaaccttcccatgccgtgtcctgtcccccttccccgccgtgctgctgcgcgtgttgcatggtcaggcgaacggtatcgtcatagttcatatccgtgacgatgcactcggcaccgaggttcagaatggcgtcaacgcgttcctgagcagaacctttcggcatgtaatcaccgcattctgtccgagttgctgtgctgcccacgccacaccgcgcccgtggttgccgtcggtggtggtcgcgaaagtcattttttcgccgatggcatttttcaggtgcgccaagcattttgaaggcgttcagaccgaatcgttttgattcgtctttgacgagaattttcttcacaccaaaaaggtttgcgagatcgtccagcgcacaaagcggtgttgggcgataaccagctattttctggtggaactggcgcgccagtttggcctggctttgcgaaaagagcggtgatgtttcgccgttgaaaaatttgttatcggcgatatcaatcttcaatgcgaaacacggacatatactcatcatttggcct

SEQ ID NO: 139341 - DNA, 489 bp, Homo sapiens
tcaccgcgtatgcccagcgcagaaccgtaaacagatagcatcagcaattgtaaatctttgcccgcagatccagtgctcatccttcaggcctcgttcacatattgcagcttcttctccagctgcgcgcgaactgtcgtttgtactcttccggtgtatcagggcgaaacagaggtgtgaaacctttagcagctcggtggcgatgtaattcagccattcgatggttttatagcgggaatactgtttaccggtgccagcaactggcggtcggggacgttgcttaaacccgcgcagcatctgcggcaggctctctttctctttcgtgcgccgcgcagttcctttggcgtaagtacccacttccatgacgtgctcaaaccgatatagatcggaatcagcgtaactcggaacggtgccgccacgcacatcgcctgaatggtcatcgacagcgtaccagttttcggatccagcaaagctccgtacgggaacgaccgc

SEQ ID NO: 139342 - DNA, 1065 bp, Homo sapiens
ctatgttttattaacataatacagtacaatgatcacatttttgtaaatcacgggtgcggcgcttagaactagtggatccccgaccaggttgggattttggtgtaaccttcccatgccgtgtctgtaccacttcccagccgtgctgctgcgcgtgtgcatggtcaggcgaacggtatcgtcatagttcatatccgtgacgatgcactcggcaccgaggttcagaatggcgtcaacgcgttcctgagcagaacctttcggcatgtaaatcaccgcattctgtccgagttgctgtgctgcccacgccacaccgcgcccgtggttgccgtcggtggtggtcgcgaaagtcattttttcgccgatggcatttttcaggtgctcaaatgacagcgtttcgatatcaagatgatatttttcacacaataattgagcgatggcgtacgcaccgccaagcattttgaaggcgttcagaccgaatcgtttggattcgtctttgacgagaattttcttcacaccaaaaaggtttgcgagatcgtccagcgcacaaagcggtgttgggcgataaccagctattttctggtggaactggcgcgccagtttggcctggccaagtgagaacgtagtgcctgttgatccaactgatgaaaaggttgccggatgatgtgaatcatccggcactggattattactggcgattgtcattcgcctgacgcaatgacacgcggctttcactctgaaacgctgtgcgtaatcgccgaaccagtgctccaccttgcggaaactgtcaataaacgcctgcttatcgccctgctccagcaactcaatcgcctcgccgaaacgcttatagtaacgtttgattaacgccagattacgctctgacgacataatgatgtcggcataaagctgcggatcctgagcaaacagtcgcccgaccatcgccagctcaaggcggtaaatcggcgaagagagcgccagaagttgctcaagctgaacattttcttcgttacccgtagctgagcgcgacgttggatttacaacgttcgtgactggtaccacagcccgatacat

SEQ ID NO: 139343 - DNA, 1716 bp, Homo sapiens; identical to SEQ ID NO: 121479

SEQ ID NO: 139344 - DNA, 3036 bp, Homo sapiens
ttattcttcttctggctcgtcgtcaacgtccacttccggagcgatttcatcgtccccttccgcggcactgccgtcgatggtatccagatcttcctcgtcaaccggttcagcaacacgttgcagacccactacgttttcatcttccgcagtacggatgaggatcacgccctgggtgttacggcccacgatgctgatttccgaaacgcgagtacgtaccagcgtaccggcatcggtgatcatcatgatctggtcgcagtcatctacctgtaccgcgccaacaactaaaccgttacgttcggtaaccttgatggagataacccctttcgtcgcacgcgacttggttgggtattccgccactgcggtacgtttaccgtaaccgttttgcgttgcggtgaggattgcgccatcgccacgaggcacgatcagagagacgactttatcgccttcacttaccgggtacgcaacggtgactcgagaggacgtctctccggaccgtactgcgcatgaaacttccccctttttaactggcactgtgaagcgacttcgcgtgtgacactcttcgtaggatttccctgcacatcggaagtcttgcctgtccgagagggttaaggtgggataccatatgtaagcctcggggagatttcgtgaagtcaccggctggaagaagccttcaaagacgcagacatcgttatccgcagtcatgggcaccttacaaagtgatggaagagcgtactgtattgctgcgtgcgaacgatcacgaaggcttaaaagccactggaaaaacagtgtctggcacagaacgcgcaacacaaagactggcattgtactgaagagatgatggaactgacccgtgatggcgaagccctgtacatgcactgctggccagctgatatcagcggcgtatcctgtaaagaaggtgaagtgactgaaggcgtattcgaaaaataccgtatcgctacctacaaagaagccagctggaagccttatatcatcgccgcgatgatcctgtcccgtaaatacgccaaaccaggtgcactgctcgagcaactgctgaaagaagcgcaagaacgcgtgaaataacccctcgggccgatcagctggtcggccctcgcattgctggcgggctgtgctcacgattcgccctgcgttccggtttatgacgatcagggtcgtctggttcacaccaatacgggttttccaatccttgatccctgctggtgaacttctccggacaccaccgcgtgccaatctgagtttgttctgcactggcactggcgcgatatcagattcggtcccgcattgaaagttaagggtaattgtcacgctaccgccgaaatcgctgatgaagaacatatacatcaggtaatcgatcccgttcatattctgttcgataacttgcgtccccggatcctggcccgtttggggctcagccgcccggatagtttgctgaaccagaaaccgcagccggtgcaattgttggatattcgatgcagtatctgcgggggtatcggtagtggctttaacctgctctcccggacgcgctttttgcaggccgctgacaatgacttgatcgccagatttcagtccttcactaatcaaccatttatcgccaatcgcctgactggcaacgacagggcgcgcttcaacctgacttttatcgttaacaatcagcacggttgcatcaccacgcggtgtgcggctaacgcccctgttggtagcttggataagctggaggtgcttgccatactgctgccaggaatgccggggttgaatggcatcccgcatgtgggcaaaaaagcggtcctggttatgtgtgccgatcgcggcgtgcggggcgacatcttgcaggacagattcgctgatagcttccagcgtttgcaggtttaatggcgcattttgtgcagtctgttcggcatgttggcagcgaatcggcgttggcgcggcaacaccaaatgccaggcgtaattcgctgaaattgccgttatccagtcggcaatgtgcggcgcagccaatcgttgaaatatccattgcgtcgcgcatggcatatttaaaatgcgcgctgcccgcgtgttctttcggctgtggcggaaaatgaaaggcgacgaggatttcgtcatgctcaagagacactttgcccggcccggtgtgaaagccattaatcgggacgaaacgaacaccgcgcggggagtggatctccagtttcgcgtcataaattagcgttggcgtggcagaatctgcgctggtggcaccgttgcaaatatttccaccgtaggtagcgacgttacggatctgcggtccagcaatggacgtggccgcagcacataacgccgggagatgacgttgagttataggatcttctattagctgggtaaatgtcgttgcagagccgatacgtagcgagccatcttccgccagcgtaattccccgcagctccgccagattaccatcggagagtggcgcattccacgaaatacccatatttgcaccgcaggccaataacaaacgttcatcggtggcgcgcaggctagcggtattttcccgcacgagattattcatcgcactaccgcgctggcgacgcagggtatgaatgttgcgggccagtggctcgatttgcgcattttgctgtaaagaaaagaccaccgtcgccgcctgagcggtacgggcttcattgaacaggacttcgttattgttgaacagttgccagtgttccgatagcggcggcgcaccttccagtacagcaacattactcagaatgcgtttttcgtcgctgcgtggttggatctccgcctcttcgctttgaactaatgtccagataccattttgttgctgaacgctaagctgctgacgggcgctgacccctttttcgttgcaccagaaggcaatatccagcaaatgttggtcaccctgaaaacgcaaactggcaagaccaaaaagtgaacggtattcctcaagcaacaatgaaaattgtttatcgttattattttcgggattaattaccaaaagcgaacaatggtttaacctgctccatttattcat

SEQ ID NO: 139345 - DNA, 3345 bp, Homo sapiens
ctacagcgtgttgccttcccagacaacttcgcggtagtgcttcacgtcggtgtcgccttcagtgctgataaccagcaccacggcatctttgttcagcgccagtttttccatcaggctttgacgttgcgggtgataatgaaccgctgcgagaacgcccaaaccgacagcgccggattcaccggagatgatgcgcgggtcgttgccgtacggattacccagcacgcgcatacctaatgcggcaacgcgccaacggttgacgatgtcgcctttgacgccggagcgataaatacagtcagctttgtcaggttcaacaataatgctgtgcagattttgcgggctatagacgtcgaccagataacccagcacaccaccggccattgctccgacaccggcttgcagcagaacgtgcgtcggggttacgcccatttcacgcatttgctcgacggcttcatctgccagggttgcgtagccttgcatgatccaggttgggattttggtgtaaccttcccatgccgtgtcctgtaccacttcccagccgtgctgctgcgcgtgttgcatggtcaggcgaacggtatcgtcatagttcatatccgtgacgatgcactcggcaccgaggttcagaatggcgtcaacgcgttcctgagcagaacctttcggcatgtaaatcaccgcattctgtccgagttgctgtgctgcccacgccacaccgcgcccgtggttgccgtcggtggtggtcgcgaaagtcattttttcgccgatggcatttttcaggtgctcaaatgacagcgtttcgatatcaagatgatatttttcacacaataattgagcgatggcgtacgcaccgccaagcattttgaaggcgttcagaccgaatcgttttgattcgtctttgacgagaattttcttcacaccaaaaaggtttgcgagatcgtccagcgcataaagcggtaatacctggcccggccatacatgaatcatgaaagccagcatccgggccaggttggagcacccatttcgcatcatcaagcgacagttcggcttcgtgaaagccagatacaaggggttgctgaaaaacgataaccaactggcgatgttattcacgctggccaacgcttcgagatacttaacgccaaacaccagcgaaatgagcggcttgccgacgatcaacaccgcgagcgccaccagaataccgattccgcccgccagtaaaccggacttcacacctaacaaccacggtctggtggtgcgcggatctaaacgcatcacctctgggtaaaaacttttacccagcaaacccgctggcgttccggcggcgtcgaagaatgtcatggcgattttaaataacccggcggcagcgggtcctaacacgatccccaccaacactgtgctgcacgagttacgcgccgaccagatggagtgggcaatgttggttgaccagacaaaactccacgcgcctttaatgtatcgggcagactcaaacagattcaatttgaaggcgttatggatatttcggcggcgtaattcgcgcgcggcaaaccaccagtacatggtgccgccaaccagattcgacacgtaccaggcaataacaaaacccgcaaaaccaaagtcaaaataccaggctacgacgctccccgctgcgcgcagaacaggtttcgtcgcctgctgtacagcaattaaatcgaagcgatctaccggacgccaaatgccgtcggcgtggaggaagccttgaaggattgacgggcataaagggtgcagccaaaattggtctccgaccatgacgggcaggatggggtagggaggcccgaaatgccccggccgtaaaattccggaacggaccatctcgttctgttgctgtgtgccagagatacagcgccgcttcgtcggcttcgccggtacgaatacgaatgacgcgttgcaattcagcgacgaagatttgccgtcgccaatttttccggtgtaagccgcttttggcaggaaattgacgctgtattccgccccccggtacagctcggcatgccctttctgacgcccgaaacctttcacttcggtgacggtcaggccctgaataccaatggaagataacgcttcacgaacgtcttccagcttgaatggtttgattatcacggtcaccagcttcatagatcccctccggtcagaattcggtaatggttgcacgctggctgccagctcttcgcccgcaagttgcagttgatacatctgccagtagcgtccctgggccgccagcagttgctggtgagtgccctgctccacggcttgcccacgatgaagcaccagaatggtgtcggcatcacaatggtcgataagcggtgagcaatcacgccgcagagcatgttgaatcgcctgttcagtaccggagtcaatgctggcggttgcctcatcaaggatcaggatttgcggcgtctcgaccagcacgcgcgccagtgccagcagttgcttttgcccaactgagagattattcccctgctcgcccagcggcgtgtaaataccgtcgctcatgctacgcgccagctccgccagttgcacggtttccagcgcctgccagacgcgttcttcggagatatcccgacccagcgtcacgttggcgaggaaggtatccgccagcaccaccggatcttgctgcaccattgccacgccctggcgcagcgcgctgtgacttagcgaacttaatggacgaccatcaaggcgaatctcaccttccgttagcgggtaatagcccatcaataaactggcgagggtgcttttgccactgccggtatgcccgaccagcgccacaaaattgcgcgaaggcacagagagattaatgttctttaacaccagatagtcatcgcgataagcaaatgacacgttatcgacttcgatggtgccactctggtactgtggctgattaaggccgatgaccgggcgctgacggtggcatgaacatttttcatccatcaggtgcattggagaggtataccaggcataaggtgctgtttgttcatccagcagtcggataaggccgaacctaccagcggtgggggaccagttgtcccacggcgccacaacagcaatatcagccgcaaaatctgcctgctgcatgagctgttccagcccgtccatccggtgtgtgctgtgtcggtccgtcgtattatatactgaggattggcccatcagagaagcgggcgtaccaagatcgaccagcatatcgatgcgtaaacctaaggtgtacggcagctcgttacgacgggagatcatacaccccgcaggcttgacatcgacatcccagttcggctcgcatcccctcaaaggttctctcctattaacagcctcatgtgtccaggtcat

SEQ ID NO: 139346 - DNA, 3810 bp, Homo sapiens; identical to SEQ ID NO: 132498

SEQ ID NO: 139347 - DNA, 2196 bp, Homo sapiens; identical to SEQ ID NO: 132499

SEQ ID NO: 139348 - DNA, 1878 bp, Homo sapiens; identical to SEQ ID NO: 132500

SEQ ID NO: 139349 - DNA, 3122 bp, Homo sapiens
atgggcattgtggcatctgcatctgtacaggctgcagaaatatataataaagacggtaataaactggatgtctatggcaaagttaaagccatgcattatatgagtgataacgccagtaaagatggcgaccagagttatatccgttttggtttcaaaggcgaaacacaaattaacgatcaactgactggttatggtcgttgggaagcagagtttgccgcctggaccgatatgttcccggaatttggtggcgattcctcggcgcagaccgacaactttatgaccaaacgcgccagcggtctggcgacgtatcggaaaacgacttcttcggcgtatcgatggcctgaacttaacctgcaatatcacagatgcacatctgcggcgcgcgccatgctgctctccgggcgaccggtgatgcagattaacgagaggacagcagtgcgccgacagatgactgtgtatctgcgcgtagagcggatccacgagatagatccgttagtatctttgtcacacagcatgagtgtgatccccatagatgtggagcggccaatcgccgccgccccctgcacccccgggctctggcgaacaaaaacgccgctgcgcgtgccctcgacttatcccttacggctaccgggtcgggcgcgagtagtgtgtcatcgcacatttcgacttcatctttgcaaggactgggttttcatgttttctgggctgttaatcattctggttccactgattgtgggttacctcattccgcttcgccaacaagctgcgttaaaagttattaatcagctattaagctggatggtttaccttattctcttttttatgggtatcagtctggcgtttctcgataaccctcggccatatcttgccgacagcgtccccgaccgccagttgctggcaccggtaaacagtatttcccgctataaaaccatcgaatggctgaattacatcgccaccgagctgcataaaggtttcacacctctgtttcgccctgatacaccggaagagtacaaaccgacagttcgcgcgcactcggagaagaagctgcaatatgtgaacgaggcactgaaggatgagcactggatctgcgggcaaagatttacaattgctgatgcctatctgtttacggttctgcgctgggcatacgcggtgaaactgaatctggaagggttagagcacattgcagcatttatgcaacgtatggctgaacgtccggaagtacaagacgcgctgtcagcggaaggcttaaaaggatcccgtcatttgagtgccggggcgcggcggttgatcctcggtatcatcgtcaccttctcgctgattctggcgttaatctgcgttactcagccgtttaacccgctggcgcagtttatcttcctgatgctgctgtggggggtagcgctgatcgtacggcggatgccggggcgcttctcggcgctaatgttgattgtgctgtcgctgaccgtttcttgccgttatatctggtggcgttacacctctacgctgaactgggacgatccggtcagcctggtgtgcgggcttattctgctcttcgctgaaacgtacgcgtggattgtgctggtgctcggctacttccaggtagtatggccgctgaatcgtcagccggtgccattgccgaaagatatgtcgctgtggccgtcggtggatatctttgtcccgacttacaacgaagatctcaacgtgacgccagatgaactgaaacaagtactggacgttgccgcagcattaaaagcactgcgtgctgaaaacatctcaaccaaagtctttaatagtggattaggtatttccgtattccgcgacaactccacccgtacccgcttctcttatgcttccgcgcttaacctgctcggccttgcacaacaagatctcgacgaaggcaaatcacaaatcgctcacggcgaaaccgtgcgtgaaaccgccaatatgatctccttctgcgccgacgctattggtattcgcgacgatatgtatctgggcgcaggcaacgcctatatgcgtgaagttggcgctgcacttgatgacggttacaagcagggtgtactggcacaacggcccggctttagtgaacctgcaatggcggaattgaccacccgactcagtcaatggctgacctcgcgtggttacgtgaacactttggttcactggaaaacctgaaaggtaaaaaaatcgccatgacctgggcctactctccaagctatggcaaaccgctctctgtaccacaaggcatcatcggtctgatgactcgcttcggtatggatgtcaccctggcccattccggaaggctacgacctgatcccggatgtggttgaagtggcgaaaaacaatgctgaaagcctccggtggtagcttccgtcaggtcaccagcatggaagaagccttcaaagacgcagtacatcgtttatccgaagtcatgggcaccttacaaagtgatggaagagcgtactgaattgctgcgtgcgaacgatcacgaaggcttaaaagcactggaaaaacagtgtctggcacagaacgcgcaacacaaagactggcattgtactgaagagatgatggaactgacccgtgatggcgaagccctgtacatgcactgcctgccagctgatatcagcggcgtatcctgtaaagaaggtgaagtgactgaaggcgtattcgaaaaataccgtatcgctacctacaaagaagccagctggaagccttatatcatcgccgcgatgatcctgtcccgtaaatacgccaaaccaggtgcactgctcgagcaactgctgaaagaagcgcaagaacgcattgatatcgccgataacaaatttttcaacggcgaaacatcaccgctcttttcgcaaagccaggccaaactggcgcgccagttccaccagaaaatagctggttatcgcccaacaccgctttgtgcgctggacgatctcgcaaacctttttggtgtgaagaaaattctcgtcaaagacgaatcaaaacgattcggtctgaacgccttcaaaatgcttggcggtgcgtacgccatcgctcaattattgtgtgaaaaatatcatcttgatatcgaaacgctgtcatttgagcacctgaaaaatgccatcggcagaaaaggaggataa

SEQ ID NO: 139350 - DNA, 409 bp, Homo sapiens
atgttcagcatcgcttttgcggtccaccttcctgaagctcgtagagttcatcgactttatcctgacaatcgacatactgcgataatccgccagtacctgtatcacgcggtttgtagccctgacgacgcagttcttccacttcttccgctggttaccaaaaataaagatattgtcagcaccgacatgatccagcatctcgcattcgcaccgtccaacgtaccgatagtcagcgcaccgttaagcgcaaattcatgttactggtgccggaagcttccgtccctgccagcgaaatctgttagacagatctgccgccggaatgatcaactgcgccaggctaacgctgtagtcgggatgaacacgactttcagcttatcgccaatctgcggatcgttgttatcactttcgctac

SEQ ID NO: 139351 - DNA, 473 bp, Homo sapiens
tatcacgcggtttgtagccctgacgacgcagttcttccacttcttccgctggttaccaaaaataaagatattgtcagcaccgacatgatccagcatctcgcattcgcaccgtccaacgtaccgatagtcagcgcaccgttaagcgcaaattcatgttactggtgccggaagcttccgtccctgccagcgaaatctgttagacagatctgccgccggaatgatcaactgcgccaggctaacgctgtagtcgggatgaacacgactttcagcttatcgccaatctgcggatcgttgttatcactttcgctaccttcgcctgatgcacagcgtgattaccattgggaaatcacagtgttgttgcagctcattaagcaggctaaggtggtgcgccagttacggcccaggtgttcgtccagcacggctgaaagcgatggttcgctaccgccagccagcgacgcggcgtcacaccgttg

SEQ ID NO: 139352 - DNA, 1428 bp, Homo sapiens
atggtgcaatcgttgtttgccgactttgcgaaaatcttcccgggtcgtttcaccaacgtcaccaacggtgtgacgccgcgtcgctggctggcggtagcgaacccatcgctttcagccgtgctggacgaacacctgggccgtaactggcgcaccgaccttagcctgcttaatgagctgcaacaacactgtgatttcccaatggttaatcacgctgtgcatcaggcgaactcggagaacaaaaagcgtctggcagagtatatcgcccagcagctgaatgtggtggtgaatccaaaggcgttgttcgatgtacaaatcaaacgtattcacgaatacaaacgtcaattgatgaatgtgttgcatgtgattacccgctataaccgcatcaaggccgacccggatgcgaagtgggtaccgcgcgtgaatatttttggcgcgaaagtgatcaacaacgatccgcagattggcgataagctgaaagtcgtgttcatcccgaactacagcgttaccctggcgcagttgatcattccggcggcagatctgtctgaacagatttcgctgggcaggacggaagcttccggcaccagtaacatgaagtttgcgcttaacggtgcgctgactatcggtacgttggaacgtgcgaatgtcgagatgctggatcatgtcggtgctgacaatatcttatttttggttacacagcgggagagtgaagactgcgtcaaaaaaggcatcgaggttccacaaacccagcaaggggacattggcgcgaaagatatcccctcctggcggcggatatgcaaagttttactcaataacgattactggtgtcgggcattatcatttagccccacaaaatcgaagaactatcagcgttataacgaacggataaaaggaaaacgtcaggatttaacgcaatttctcgccagcttgccggaagatgatcgcatcaaagcgattaatgaaatccgcatggcgatccatcaggttagcccctttcgtgaagagccagtggattgcgttctgtgggttaaaaacagccaacttatgcctaatgattacaacccaaacaacgtggcaccacccgaaaaaaaactgctgcaaaaatccattgaaatagatggttttacccaacccattgtggtcacacatacggataaaaatgccatggaaatcgtggatggttttcaccgccatgaaattggtaaaggctcatcatcattaaaattacgcttaaaaggttatttgccggtgacctgtctggaaggtacgcgtaatcaacgcatcgccgcgactattcgtcataatcgcgctcgtggacgccatcaaatcaccgccatgtcggaaatcgtccgtgaacttagccagttgggatgggacgataataaaattggcaaagagctgggaatggacagcgacgaatgctgcgcctga

SEQ ID NO: 139353 - DNA, 3159 bp, Homo sapiens
ttaggagatggagtctcgctctatcagccaggccacacagttcttgccgtcagggctgagctcgaagcctgcattgcagacacactggaagctgccctctgtgttgacacagcggcccaggtgacaaaggccaccactgacaatgcactcgtccacatccacgcatgcctgcctggtgggcgtggcctggaagcccgggtagcaccggcagtggtaggtgccggggatgttgacgcagtcaccgtggtggcaggggctgctggtgcattcgtctacatcaatgcactcgccgcgcacgtcctgggtgtagcccacgttacactcgcagcggtagctggaaggcgtgggcaggcagcggccattcagacacaggttggtgaagtgtcggcagatgtcaatggttgtccaccaaaggacaccaaaagctttgttgcaaaagcccctgttaaaaaattgggcggaatgggtaattagcaatgctatgtacgcgtagagggttgtgaggtggacaaatgcaaaaagtgggtcaaatgaatgggtaataatgacgttcggataacctgaaacaagcacctgggtgaaacgtgtgccgcaaagggcaaaccctgttttggcgggagggacgcaaggcaacgttaagacacacttgagcaccaggagcgtcaagatcagcctgggcagtatagggacatccccatctgtggcgctgcgacggccacccagactgtcccgactccagcgacgagctcggctgtggtatgcacctgcggggctggggtggactcgtgggtagatggggacacccactgcctgctggggcgtggccaggctgggggcgtggacacatgcctttgcccgtgcctgcatcccagccccgtaatcctgtgtaatgatatctatataccacggccgattggaccgtcttaccagcgctgtttctcttggcgtccctctatttggtctttcggtgtctctcctctggcgcctttcattcactccgtcttcctgtttgcactctgtgacggattgattgaccccctctgtgagatgttcctgcgtctgtgatgatagtcgcagtgacttgatacacgcacgctctgtcgacgctggcaagcctcgattgacccacgcctggacgcacgcgcccaagccgcggatacacgagtcacgacgcacggcaagccgcaggatacaagtggaggccgccttggccttttggatcgaggcgacgcagatttcctcgttcatcacatgcggcgccagacagaccacgcccttcacatccggcgcgggggtgccgccggcatggatcagggagatcgaggcgccgtcggaatggccgaccaacaccacccggacccagtcttgagatcgttttcccctgttagggccaaacacaggggaaacatgcgaccagcaattgggaaatacaaacacggggggtgcaagcacagcccggaacagagcccacgcggccactagtttccggcacagcccgacaccaatgagcaggacggccagactcgttccggtcttgactgcacccgttgcattcatccaccattctgtaggcgcgcctgcggtgaaggcttctgctcccagccctacctgtgcacctgtgcggatgggactctggctcccagcatcgcaggtgacacccgtcatccgggcaaagccccgggcacaggcagggtctgcaactgggagaacaagagtgaagagaggagtcattttctcatgccagcccaaggggggacccgccccatggagggcttttcccatgggtgcctgggaggcctcaaggaggatactaccgatctcgcagcgttcgcaggggctcccccaggctgccccgagggtggcgcagcactcagaccgcaggctggctccctgaaggttcacctcacagcggctctcctggatcttcagccagcaggtgcccttggtgctgtctagacagaaggtaccagaggggtccagccggctgccagggccacatttgcaggtgtaggagccggccaggttccgacagacgccactcacacacgggctggacaggcattcgtcgacatcttcacatgcggcgctgctgtcactgagccggtgtccaactggacagcggcaatggaaggagcccaccatgttgacgcagctgcctccctggcacaggcctggcacagcctggcactcatccacatcttggcaggcccccgtgtggatattggggatgaagccgcggcggcaggggtgtggctgtgcagggcaaagttcacatggaaggccccaggcacggcccacagtggcacagcaaagtgcatagtgcacgcggtaccgatccagctcgagctcccaaagcacacacagacaagcagaccacgacacagcaacagacaacgacactgactggcttaataattgccgtgctgcttttaatgcagtttcatgggtataaccgccatcaacaatccattcatcacgcactgcaatattatgcgcacccaggctctgcttataaccattaacgcgatcaaccgaaacatggacatcaagcggagcatgcaggcaggcaatattttgatgcccactttcaattaatgcatcggtcaacgcaatgctgtcgccaaaattatcggtatcgacagaataaacatgggcatattgaccttcaactttgccaatcaccaccaccggaatatcatatttatcgagttgggcaaaaaatgactcatccgctggcgaactgagcataataatgcctttaatcattttctgcttaattttgctttcgcatttttgcagatcttctgccggattgtgcgacgtttgtaatatcacgtcgaaaccttcttcttcagctttggcggtgatggcatgcaaaacttcagagaaaaacggattacccgccgtagttttggtcgaacgggtagaaatcaccataatggcatcaaaacccgaagaggtcagcgcgcgggccagcttgtttggctgatactgtaattcttcaatggcccgtaacactttttcgcgcgcttccggggagatattagtttgcttattcagcacgcgtgatacggtggattttgatacgcctgcaacccttctgccgtgagtaaaagctccttgaggcttccccagaagctgggcagatgctggagccat

SEQ ID NO: 139354 - DNA, 1553 bp, Homo sapiens
ttgctagtggcaaatggcgataaggcatatgtgacaccttgtgtcccgatcgatatattaccacacgatcgtagactgtggaacaaccctgtgctgttacccacactataatacgcacttgtcagacaacaatccacacgcagtattatcaagacacaaagaacatgggacagataacatacgctgacagacggcccgacacacgagtcggcccgttcaccaacagattgcagcagaccatggaagtagtgcagcataggactgcactgcacgtcatattcccaggcaattttggtcagttcgcccagcgtatgcagctcggcaaactgcgcttcatcgttggcgtcctgaatagaaccggggcgcagaccgtcgcccagcgacagcgaaacgtcataagcggcacagatttcacaaatttcgcggaagtgttgatagaggaaattttcctgatgatgggagaggcaccatttcgccataatcgaaccgccgcgagagacgataccggtcaggcgtttcgcggtcatcggcacatagcgcagcagtacgcccgcatggatagtgaagtaatccacaccttgctcggcctgttccagcagcgtgtcgcggaacgcttcccaggtaagatcttcggcgatcccgttaaccttctccagcgcctggtagatcggcactgtaccgatcggcaccgggctgttacgcaaaatccactcgcgggtttcgtgaatatagcgaccggtggagagatccatcaccgtatccgctccccagcgcgtggaccataccagcttttccacttcttcttcgatggaagaggtgaccgccgagttgccgatattggcgttaacttttaccaggaaattgcgaacaataatcatcggctccgattccggatgattaatgttggccgggataatcgcacgtccggcagcaacttcatcacggacaaattccgcagtgatattttccggcagatgtgcgccaaagctcattcccggatgctggtggcgtaaaacctcgctacggatgcgctcgcggcccatattctcgcggatggcgatgaattccatttccggcgtgatgatgccctggcgggcgtagtgcagttgggtgacacggcgtcctgctttggcgcgttttggtgttagtacgccgctaaaacgcagttcgtcgaggccatcatctgccagccgcgctttagtgtaatcggaactgcgcacggtaagttcttcggtatcgccgcgcgcatcgatccacggctggcgtagttttgccagcccttgctgcacgttaatggcaatctgcggatcaccatacgggccggaggtgtcgtagaccggaatcgcttcgttttcttcgtactgcggctgttctttgctaccgccaattagcgtcgggctaagctggatctcacgcatcggcacgcgcacgccggggtgtgtgccagtgatataaatgcgttttgagttgggaaaggcggtgccttccagggtgtcgataaaatgttgggcccgggcgcgttgttcgcggcgggtcagttttgttgcagacat

SEQ ID NO: 139355 - DNA, 3900 bp, Homo sapiens
ttatcgcattatgcccatgaagccatgtacgcccatatacacaccgactaagccaatcaacagactggaaaaatagggggcgcgtttagcgagagtgttaaatccgctccagcgttttgcgacctgctgaacgctgattgctgcgccaacgcctacggtgacaagcgttaacgccaggccaatgctgaaactgacgaccagtgttgcgcccagtgtcagggctttcaactgaatgcatatcaacagcacggtaattgctgccgggcaggggataaggccaccggttaagccaaataacaaaatttgccagttggtgacctctctaccatcaaagcgtcgtttaatgtcattggcatgggctcgtgcatgggcatcctgatactcgccatgttcgtgatggtgatgatgtccatggtcgtggtgatgttcgtgatcgtgatgatgatgctcataatcatgcccgtgcatattctccagccagttgcgtacgacgcgccaggtacgccagaacatccagaacgcggggctaataatgatccgtgcggaaatccagtggagccagggtttggaattactgttgttttcgaactgctgcgttaagtagctgctggtgctgtttaacgaggtcattaaaacgtccagttgggtaaattgttctttgtagcgagcgacctgcgcatcaatgcgatcgctggcggcgttgtagtctttagttaatttattcagggtcttactaacgccatcggtagcggctttaataatgcccgttgtcgaaagccaactggtcaggttgctgccgatggtggtcgtgatgccggtttttttaccatcgccaacaatcaatgcacctacgccgctggcatcttttttcagtgcagcggtgagtttgtcggcatccagttccagtttgccatcgctgggatcggtcgtgataccaatctgcgccaacgttttatagctggaagaactgacggtattactcagcatcgatttcaactgcgtctgaatcgtccgcagcgtggagtcgccgagcagtgcaccattgctagaactctggctatcagctcccgcatggcggtgtatttggtcaggctgctgaaggtatctattagcgagttgtagcgcattcacccagtctttaatcgccgtttgcgctttggaggtgtcctgagtgatggttagcgtctggttgcccgtggtgacctccttcacgttcaggctgatgtttccagcgcgtcgctgatggtttgctgctgtctcgatggcgagttgttgactgtagttggcatgttggcagctctccgataacatggtgtatacggagaagcacatccgtatcatcagtgtgacgactgcggcggccatccatccagtcatcggttcgtctgagaatgacgtgcaatccccatccccgggcaataagggcgcgtgcgctatccacttttttgcccgtccatattcaacggcttctttgaggagttcattttccatcgttttcttgccgagcaggcgctggagttctttaatctgcttcatggcggcagcaagttcagaggcaggaacaacctgttctccggcggcgacagcagtaagacttccttcctggtattgcttacgccagagaaataactggctggctgctacaccatgttgccgggcaacgagggagaccgtcatccccggttcaaagctctgctgaacaattgcgatcttttcctgtgtggtacgccgtctgcgtttctccggccctaagacatcaatcatcgttcccgcattgccgagcagcagctcgctgttgctgccgtaagtgcgagcgtaatgacgcgccagcgattcagtcaggaacggatagcggcggcgcaggcgagcggcataatcgtcgcggtcgccttcaatggcgccacccggtagcacactctctttcgtccatgccgggccaataccctgataatacggcgttagtttttccagcgcatgttccgccagttttcggtaggtggtcagcttaccgccgaataccgacagcagcggtgctttgccattttcatcatgaatatcaagggtgtaatcacgggtaatagcctgcggcgagtcggactcatcatcacacagcggacgcacaccggagtaggtccagacgatatcgtcacggcttaactgctttttaaagtgcgtgttacaaaaaatagtggcacgtgcacgctgccctgccctgttttggtcgaccttgccgctggtggctgtatcgagatgcaccaccgggttttcggcgaatagatagcggtcggcattgaactcgaagtcgtcgctggtttcgttaaataacatgatcttggtgttttccagatgctgccacattgccagcttagcagcatgaggatctttgcgaatcagcgccttgaggatttgatcgtggtcatcacaccagttatcgacggtacgggaatcactgtgttcgtgccgttttttccccagtacgggtttatgaattacgcccttctctgctgctctggccgcagtagtcttcagctttgccttcccttctaccctgcatttatccagtagcgcgggtgatatttcgccgccgtcaggcattgtcgaagtgatgcgcgggacagcaaagaacaagaaaaacaggaacaccgaataacacatcatcagcgaccatgggcgacaaagagcgggaagaaaatcacaataatggtcgcggctttcaccctgcgggaagtaaccgttgatcacggtgacattacccagcagtgaggggatttccgccataataatccgccgctgcgcctcttcgtcgtcaccgggaaagccgcgacgcacggcaatcggcgtctctttggtcagcagcgccacgccataatggcctttctgcccgtgataaaacacgttgtagccgagcttcgccacctcttcgagcggaaacatatcgtcatgaacttttgtctcctgcaggccaatcacatccggttggtgcttttcgacgatggcttcaagctggtgaggtatatcgcctttttgctcagcctgagccggtaagttctgctccagcaacacattgatggtcgccagcgccgccgcacaggccagcgggttgccgccaaaggtggtggtatgcaggaatgggttgtcgaacagaactgaaaacacctcttcagtggcgatggtcgcgccaatcggcatcacgccgccgccgagcgctttggcaaggcagaggatatccggctgtacgttctcatgctcgcaggcgaacatcttgcccgtgcgccccatgcccgtttgtacttcatcgaggatcatcagtgcgccgaactcatcgcatagcttacgtacggcggtgagatagcccggcggcggcagaattacgccaccttcaccctgaatcggttcgaggatcaccgcagccacatcatcaccggtttttttgcactcgttaagagccgtgcgcatggcttcgatattgccaaacggcacatgacggaagcccggcagtaacggcataaacggtttgcggaaggtcgatttcgccgtggccgacagcgcgccaagtgatttaccgtggaacgcgccgctggtggcaataaaagtaaacttgccgcgcggtgactggtaagctttcgccagcttcagcgctgcttcaacggactcggtgccgctattacagaagaagctgtatttcagtttaccgggcgttagcgcagccaagggttttcgccaacatcgcccgtaacggatcgagcagctcctggctgtgcagcggatgtttcgcaagtggattctgtacggcgggagacacaagtggattacgggtgcccacggttgaaaattccaaaacttcccggccggcgataaactccgggcccgggttgtaccgagcgattttaaattccgcat

SEQ ID NO: 139356 - DNA, 1769 bp, Homo sapiens
atggcaattaaattagaaattaaaaatctttataaaatatttggcgagcatccacagcgagcgttcaaatatatcgaacaaggactttcaaaagaacaaattctggaaaaaactgggctatcgcttggcgtaaaagacgccagtctggccattgaagaaggcgagatatttgtcatcatgggattatccggctcgggtaaatccacaatggtacgccttctcaatcgcctgattgaacccacccgcgggcaagtgctgattgatggtgtggatatggccaaaatatccgacgccgaactccgtgaggtgcgcagaaaaaagattgcgatggtcttccagtcctttgacttaatggcgcatatgaccgtgctggacaatactgcgttcgctcgcaccgctaccgaaacgcggattgaaagagaggcgctggcgctacaaaaactcaatgtcttttgcctcgcggacgatgccaactggcgaactcaaaacgcatggtggcaaagctgcgtggcaacggtaacctacatttactcgacgctgaatcgctacgatcccacctcttttgctgattctcaggcaattattgaattccgacaaaaattagcttcagaaatcaacaagctgcagcatgccgttgctgaaggtcagtgctggcaaagcgactggcggatcagtgaaagtgaagcgatggcggcacgggaatgtaacctggagaatatctgccagacgttgttacaactgggtcagatggacccgaatacgccgccaacgcccgcagccaaaccgccatcaatggccgccgatgcttttaccaatccagactatatgcgctacgcggtaaaaacgctgctcgcctgtttgatctgttacaccttttacagcggcgtggactgggaaggcattcacacctgtatgctgacatgcgtgatcgtcgctaacccaaatgtcgaagatggtgctgcgttttggcggggccttttgcggcgcgattctggcgctgttattcacgctactggtcatgccctggctggacaatattgtcgaattgctgtttgtactggcaccgattttactgttgggcgcatggattgccaccagctctgaacgctcttcttatatcggcacacagatggtggtcaccttcgcgctcgccacgctcgaaaacgtttttggcccagtgtacgacctggtggaaattcgcgatcgcaccctgggtatcatcattggtaccgtggtgtccgcagtgatttacacctttgtctggcctgaaagtgaagcgcgcacactgccgcaaaaactggctggcacgctgggtatgttaagtaaagtaatgcggatcccacgccagcaggaagtcacggctctgcgcacttatctgcaaattcgtatcggtctgcatgcagcgtttaatgcctgtaaagagatgtgccaacgcgtggcgctggagcgtcaactggacagcgaagaacgcgcattacttgttgaacgttcgcaaacagttattcgtcagggccgcgatcttcttcacgcctgggattgccacctggaactcggcgcaggcgctggataacgcactacagccggacagagcaggtcagtttgccgacgccctggagaaatacgctgccggtctggcaaccgcactcagccgttctcctcaaataacgcttgaagagacacccgcctctcaggccatcctggccaccttattaaacaggagcacacgtctggcacttttcgccgcttgcaaactggaagcccgggattaa

SEQ ID NO: 139357 - DNA, 5823 bp, Homo sapiens
atgaaagatgacattttctttcgcacgtccggcggcggcgtcacgctttctggcggcgaagtgttaatgcaggcggagtttgctacccgttttttacagcgactgcggctgtggggtgtgtcatgcgccattgaaactgccggagacgcaccagccagcaagctattaccgctggcgaaattgtgcgatgaagtgttgttcgatttaaaaattatggacgcgactcaggcgcgggatgtggtgaagatgaacctgccacgcgtgctggagaatctgcgtttgctggtgagtgagggcgtcaacgtgatcccgcgtttaccgctgatccctggtttcacgctcagccgggagaatatgcagcaggcgctggatgtactgatcccgctgaatatcaggcagatccatctgttaccgtttcatcagtacggcgaaccgaaataccgcctgctggggaaaacatggtcgatgaaagaggtgcctgcgccgtcgtcagctgatgtggcaacgatgcgcgaaatggcagaacgggccggacttcaggttaccgtgggagagaagtggggagtcagcattgaaactcagggcgcgctgggaacggagaatcgtttagcggatgaggatatccgccgggcggatgttgctctgttgattacggatatcgagcttgccggtgccgagcgatttgaacattgccgctatgtgcaatgcagcatctacgcattcctgcgtgagccgcagcgggtaatgagcgcggtgcgagaggtaatttggcgaaatataaaacgcctgtgcaacagattcgcgggtgctgcgctgccggtgaataaagcggtggtgactaccgccacctggaaagacaacgacgttattaaggcgctgggtgaactaccgaatcagctaatcggtgaactgccaaatattcaggtttattggcgcacttattactgctgggcggtctggtggcgtggccgatggtgtcgaatatcgaaatcagttatttacgtctgccgctcaatccccaacatcgagtcaacgtttgtaggggtgagcaactatgtgcgtatcctctccgatccccgcttctggcattcgctgtggattaccgtctggtattaccgggctgatgaggagacagatgatatcgcggcgtggacttaccgcgcaccggttgaagatcaggcgcgtttaggttttgccatcgcccatgcgctggataactctgcaccagcggttgacggtatcgaacctgagctgcaaagcaaaatcgacgtcatcgtgcaggcactggcaggtgcgaagaaaccgttgattatctccgggacgaacgccggtagcttagaggtgattcaggcggcggctaacgtcgcgaaagccctgaaaggtcgcggcgctgacgtcggtatcaccatgattgcccgttccgtcaacagcatggggctgggcattatgggtggcggttcgcttgaagaagcgttaaccgaactggaaaccggacgcgccgacgcggtggtggtgttggaaaacgatctgcatcgtcacgcttctgctatccgcgtgaatgctgcgctggctaaagcaccgctggtgatggtggttgatcatcaacgcacagcgattatggaaaacgcccatctggtactttctgctgccagctttgctgaaagcgacggtacggtgatcaacaacgaaggccgcgcccaacgtttcttccaggtttacgatcctgcttattacgacagcaaaactgtcatgctggaaagctggcgctggttacactcgctgcacagcaccctgctgagccgtgaagtggactggacgcagctcgaccatgtgattgacgctgttgtggcgaaaatcccggaactggcaggtatcaaagatgctgcgccggatgcgacattccgtattcgtgggcagaaactggcccgtgaaccgcaccgttacagcggtcgtaccgccatgcgcgccaatatcagcgttcatgagccgcgtcagccgcaggatattgacaccatgttcaccttctcgatggaaggtaacaaccagccgactgcgcaccgttcgcaagtgccgtttgcctgggcgccgggctggaactccccgcaggcgtggaacaaattccaggacgaagtgggcggcaaactgcgctttggcgatccgggcgtgcgtctgtttgaaaccagcgaaaatggtctggattacttcaccagcgtaccggcacgcttccagccgcaggacgggaaatggcagccgtatgccgcagccgacatcaaactcaacccaacgatatcttcaccaaaagcgcgaatgcaacaaatgcgagctgccggcatttcagtgcatgcatcattttccggcaacggccacacaagtctatctctggtcattctcatgggcgggctgggcgcgctggtgctggcgttacgtaacccagatgaatatgtcagcgtctcggcgttttcgcccattgtctccccatcgcaagtgccgtggggacagcaagcctttgctgcatatcttgctgaaaataaagatgcctggttggattacgacccgcacgactgccggatgcggcgtgaacgccttatccggcctacacttcgcccgcactttgaagtcggcatacgggtcgtcttcatcctgctcttcggcgctgagcgcgctgtgcaacactatactgctggcatcgcgctgagcaattttatcggcaacgctggcgggaataatggcgtattcaccttcgctattgttatcgaccaacaagcgggcaatcgccagacgaccattaatcaactgcgcctgtgtgagcttatcgacaaaaatcttcttaatcagattgccgtcagtgaagttaaaaccaatatcgccattggcaatggtgattcgcttgctgcttcagtcgactctagaggatcccgtggtgtcgcggtgattacacctttgtctggcctgaaagtgaagcgcgcacactgccgcaaaaactggctggcacgctgggaagtcacggctctgcgcacttatctgcaaattcgtatcggtctgcatgcggcgtttaatgcctgtgaagagatgtgccaacgcgtggcgctggagcgtcaactggacagcgaagaacgcgcattactgattgaacgttcgcaaacggttattcgtcagggccgcgatcttcttcacgcctgggatgccacctggaactcggcgcaggcgctggataacgcactacagccggacagagcaggtcagtttgccgacgccctggagaaatacgctgccggagcaacacgtctgccagcttttcgcccgcttgccagactggacagccccggcattaacgcccgccacggaacaggcacaaggagccacgcaatgatcaatcgtcaactttcacgtctgctgttgtgcagcattctcggcagcacgacgctgatttccggctgtgccctggtacgtaaggattctgcacctcatcaacagctcaaaccggaacaaatcaaactggccgacgatattcatcttgccagctccggctggccgcaggcgcagtggtggaaacaactcaatgacccgcagctggatgcgctgatccaacggacgctaagtggttcacacaccctcgccgaagcgaaactgcgggaagaaaaagcgcagtcccaggccgatttgttagatgccggttcacaattacaggtcgcagcgttagggatgctcaaccgccaacgtgtctcggcgaacggctttttaagcccttattcaatggatgcgccagcactgggtggacgggccgtactacggaagccacacatgttgtttgtgcctggtgccaatgccgcgatggtcagcaactccttcatctacccggctgatgccctgatgtttgacctcgaagactccgtagcattgcgtgaaaaagacaccgcccgccgcatggtttaccacgcgctgcaacatccgctgtatcgcgatattgaaaccattgtgcgtgtcaacgcgctggattccgaatggggtgttaacgacctggaagccgtcgttcgcggtggtgcggacgttgtgcgtctgccgaaaaccgataccgctcaggatgttctggatattgaaaaagagatcctgcgtatcgaaaaagcctgtggtcgtgaacccggcagcaccggcctgctggcggcgattgaatctccgctggggattacccgcgcagtggaaatcgctcacgcttccgagcgtttgatcggtatcgccctcggtgcagaagactatgtgcgcaacctgcgtacagaacgctccccggaaggaactgaactgctgttcgcacgctgttccattttgcaggccgcgcgctctgcgggtattcaggcgttcgataccgtctattccgacgctaacaacgaagccggatttctgcaagaagccggccacatcaaacagctgggctttgacggcaaatcgctgatcaacccgcgtcagattgatctgctgcacaacctctacgcaccgacccagaaagaacgcgatatcgccagccgcctgaacgctcagggtcgccctattccgctcatcgctgaaagcggcggcatgaacgcgatgattgtcgattcttcagcactgaccgaacaggtcgtcgtggatgtactggcctcggcgttcgacagtgcgggtcagcgttgttcggcgctgcgcgtgctgtgcctgcaagatgagattgccgaccacacgttgaaaatgctgcgcggcgcaatggccgaatgccggatgggtaatccgggtcgcctgaccaccgatatcggtccagtgattgatagcgaagcgaaagccaatattgagcgccatattcagaccatgcgtagcaaaggccgtccggtgttccaggcggtgcgggaaaacagcgaagatgcccgtgaatggcaaagcggcacctttgtcgccccgacgctgatcgaactggatgactttgccgaattgcaaaaagaggtctttggtccggtgctgcatgtggtgcgttacaaccgtaaccagctaccagagctgatcgagcagattaacgcttccggttatggtctgacgcttggcgtccatacgcgcattgatgaaccatcgcgcagtcactggctcggcccatgttgtaacctgtatgtaccgtatatggtggcgcagtgttgtggcaccgttcgcggcgaaggtgtccgtaccgcggagccgcgtccgctctatctctacctctgctggcgaatcgcccggaaagatgcaaagtatccggtcgatgcgcagttgaaagccgcattgactcagccgctaaatgcactgcgggaatgggcagcaaatcgtccagaattgcaggcgttatgtacgcaatatggcgagctggcgcaggcaggaacacaacgattgctgccggggccgacgggtgaacgcaacacctggacgctgctgccgcgtgagcgcgtgttgtgtattgccgatgatgagcaggatgcgctgactcagctcgccgccgtgctggcggtgggcagccaggtactgtggccggatgacgcgctgcatcgtcagttagtgaaggcattgccatcggcagtcagcgaacgtattcaactggcgaaagcggaaaatataaccgctcaaccgtttgatgcggtgatcttccacggtgattcggatcagcttcgcgcattgtgtgaagcagttgccgcgcgggatggcacaattgtttcggtgcagggttttgcccgtggcgaaagcaatatccttctggaacggctgtatatcgagcgttcgctgagtgtgaataccgctgccgctggcggtaacgccagcttaatgactataggttaa

SEQ ID NO: 139358 - DNA, 5095 bp, Homo sapiens
atgatttctttttcttttgccagagcaagaaaagaaaagaagagcaagtgcggtcagcgtccggctgttcgcgtcaaacttaacgctcaggcgattgccgccctcggcctgaccagcgaaaccgtgcgcaccgccattaccggcgctaacgttaactcggcaaaaggtagcctcgacggcccttcccgtgcggtcacgctttccgcgaacgaccagatgcaatccgccgaagagtatcgccagctaatcatcgcctaccagaacggcgcgccaattcgtctgggcgatgtcgcaactgtagagcaaggtgcagaaaacagctggctcggcgcgtgggcgaacaaagaacaggccattgtgatgaatgttcagcgccagcccggtgctaacattatctccaccgccgacagcattcggcagatgctgccacagctcactgagagtctgccgaaatcggtgaaggtgacagtgctttccgatcgcaccaccaatatccgcgcatccgtcgatgatactcagtttgaattgatgatggctatcgcgctggtagtcatgattatctacctgtttttgcgcaatattccggcgaccatcattcccggtgttgctgtaccgctgtcgttaatcggcactttcgcggttatggtgtttctcgatttttcaatcaataacctgacactgatggcgttaactatcgccaccggattcgtggtcgatgacgccatcgtggtgatcgaaaacatttcccgctatatcgaaaaaggggaaaaaccgttggcggggggctcaaggggccgtccagcaggctgcgctcagctcgcacttacgggccagccagataccgtgtccgccttgggtctgggctcggcccccggttggtccaggctgctgcgatgggtcttcctcgacttgggtttgttcggggcccatggtcccaaagttggactcgaccgtgtggccaaaacggtaacatggtgtgagaagaagagagagatgcaatatgaattaagagcatctggtcccacctgctactctgtccagagactaacccatgttgctccccagcgacgtcgagcacaagtaatatatacccaaaggcacagtgcgattgactatgtccacgacactcactacttcggcgcgacggaacacaacggaggctccaaacccctctggagtcagtttcccgtcaatcaacaaaactggctgcgtcattattttaaccagtatctgcgtcagcacataacgccgattttaatcaatcctgacactgacttagtgcagttcctgaaagatgattacacctatctggcggtggaaattatccgtggcgataccatccgttacgcgctgctggagatcccatcagataaagtgccgcgctttgtgaatttaccgccagaagcgccgcgtcgacgcaagccgatgattcttctggataacattctgcgttactgccttgatgatattttcaaaggcttctttgattatgacgcgctgaatgcctattcaatgaagatgacccgcgatgccgaatacgatttagtgcatgagatggaagccagcctgatggagttgatgtcttccagtctcaagcagcgtttaactgctgagccggtgcgttttgtttatcagcgcgatatgcccaatgcgctggttgaagtgttacgcgaaaaactgactatttcccgctacgactccatcgtccccggcggtcgttatcataattttaaagactttattaatttccccaatgtcggcaaagccaatctggtgaacaaaccactgccgcgtttacgccatatttggtttgataaagcccagttccgcaatggttttgatgccattcgcgaacgcgatgtgttgctctattatccttatcacacctttgagcatgtgctggaactgctgcgtcaggcttcgttcgacccgagcgtactggcgattaaaattaacatttaccgcgtggcgaaagattcacgcatcatcgactcgatgatccacgccgcacataacggtaagaaagtcaccgtggtggttgagttacaggcgcgtttcgacgaagaagccaacattcactgggcgaagcgcctgaccgaagcaggcgtgcacgttatcttctctgcgccggggctgaaaattcacgccaaactgttcctgatttcacgtaaagaaaacggtgaagtggtgcgttatgcacacatcgggaccgggaactttaacgaaaaaaccgcgcgtctttatactgactattcgttgctgaccgccgatgcgcgcatcaccaacgaagtacggcgggtatttaactttattgaaaacccataccgtccggtgacatttgattatttcatgccaaagcatgaacagcaacagcggttacagcgcccgttacgagtagtagtgatgactatgttacagttggacaagcacgagcaccgcagatattacaaggccgggcgcgaccgaagttatacgcatcagaaaaagtcctcttgtgcgcctattctgtggcagagatattataatcaacaagaacacgtcaatttcttcaggggtccagttctacaacagaacaagcctcattccgttatcccgatggccacaactcccaagagatgtcaagggatccgacgatgtgggatgcgtagcatgtcgaaacaactccgaggttggcaatttgtcgctcagatcccccgttttgttcaccgttcagcggcgttgtggtggcagaaacgaagatccaataagttgtacgagaacgctgttcgaaccggttttacacaatacggatgtggatatataactctcattggcagagtggaaatgcctgaacccttcacagagggctttgtacagggaagtgatgttggagaactacaggaacctggaggctgtgggccagctgcagccgcagtcgactcagaggatcccctaaggccgcatttgcaatggggaccgtctgaccagccagaaaggtctcgacctggatgctggaagccttaccgggtcttctggcagcagggcgggcagctggcgctactcggcgcgggcgatccggtgctgcaggaaggtttccttgcggcggcagcggaataccccggtcaggtgggcgttcagattggctatcacgaagcattttcgcatcgcattatgggcggcgcggacgtcattctggtgcccaaccgttttgaaccgtgcggcttaacgcaactttatggattgaagtacggtacgctgccgttagtgcggcgcaccggtgggcttgctgatacggtttctgactgttctcttgagaaccttgcagatggcgtcgccagtgggtttgtctttgaagatagtaatgcctggtcgctgttacgggctattcgacgtgcttttgtactgtggtcccgtccttcactgtggcggtttgtgcaacgtcaggctatggcaatggattttagctggcagggtcgcggcgaagtcgtaccgtgagctttactatcgcttgaaatagttttcaggaaacgcctatatgaatgctccgtttacatattcatcgcccacgcttagcgtagaagctcttaagcactctatcgcttacaagctgatgtttacgattggaaaggacccggtcgtcgccaataaacatgaatggctgaacgcaacgttatcttgctgggcgcgatcggctctggaccgcgggaaaggcgtgaaaaacgcgtcaaccgtatcggaagatactgcgtcgaatcaagagccgacgcttcatcgcggattacataaccgtcatattcaactgattgcgttgggtggcgcaattggtactggtctgtttcttggcattggcccggcgattcagatggcgggtccggctgtattgctgggctacggcgtcgccgggatcatcgctttcctgattatgcgccagcttggcgaaatggtggttgaggagccggtatccggttcatttgcccactttgcctataaatactggggaccgtttgcgggcttcctctctggctggaactactgggtaatgttcgtgctggtgggaatggcagagctgaccgctgcgggcatctatatgcagtactggttcccggatgttccaacgtggatttgggctgccgccttctttattatcatcaacgccgttaacctggtgaacgtgcgcttatatggcgaaaccgagttctggtttgcgttgattaaagtgctggcaatcatcggtatgatcggctttggcctgtggctgctgttttctggtcacggcggcgagaaagccagtatcgacaacctctggcgctacggtggtttcttcgccaccggctggaatgggctgattttgtcgctggcggtaattatgttctccttcggcggtctggagctgattgggattactgccgctgaagcgcgcgatccggaaaaaagcattccaaaagcggtaaatcaggtggtgtatcgcatcctgctgttttacatcggttcactggtggttttactggcgctctatccgtgggtggaagtgaaatccaacagtagcccgtttgtgatgattttccataatctcgacagcaacgtggtagcttctgcgctgaacttcgtcattctggtagcatcgctgtcagtgtataacagcggggtttactctaacagccgcatgctgtttggcctttctgtgcagggtaatgcgccgaagtttttgactcgcgtcagccgtcgcgcgaacacatgtaacgaacaccgccacaacaaaccgagcgacgagccaaaacccgacaacgaaaccacacaagagagaacagacaccaccacaagagacagaatacacagcccaccaccaattcgactcctgcaggagtcaacaaccaacaccccgccgaacacaaagcgaagacaaccgtccccggcgcttctgcccctgggacgtgggatccccacggacctggaaattctcgcctgtcttcccttcacccagagcaaattgagacgtcccgctccaccccctggaaaatgcgcttctacgggatgcaggcgtcttactccaaacccgcctgtgattactccaaacccgcctgggccaaagggatcaggagatagagagagggactga

SEQ ID NO: 139359 - DNA, 2176 bp, Homo sapiens
atgcctgcaggtcacatcgccagcttcatcttttctggtaagccaggaaccggcaaaaaccatctggcggcggcaatctgcaacgagctgctgctacgcggtaaatccgtattgatcatcaccgtggccgatattatgtcggcgatgaaagataccttcaggaatagcggtaccagcgaagaacaactgcttaacgatctgagcaacgttgatctgctggtgatcgatgagatcggcgtgcagaccgaatcgaaatacgaaaaagtgatcatcaaccagatcgtcgatcgccgctcttcttccaaacgcccaaccgggatgctgaccaacagtaatatggaagagatgaccaagttgctgggcgaacgcgtgatggaccgtatgcgcctgggtaacagtttgtgggtgatcttcaactgggatagctaccgtagccgggtaacagacgcgggcatatcttttgaggtcatgattacaagatcaacgttggacaacaggggagaaatccgtcttctcctgccgatgaattgtcagaatttttaccccgcctcattggtgaaaggttctctgtatacaccccatgttattaagggggggcttgggactacaaaaattcctgtttactcggggtcccgtgtatcggaactgcactctaatctgatggtgcaatcgttgtttgccgactttgcgaaaatcttcccgggtcgtttcaccaacgtcaccaacggtgtgacgccgcgtcgctggctggcggtagcgaacccatcgctttcagccgtgctggacgaacacctgggccgtaactggcgcaccgaccttagcctgcttaatgagctgcaacaacactgtgatttcccaatggttaatcacgctgtgcatcaggcgaagctggagaacaaaaagcgtctggcagagtatatcgcccagcagctgaatgtggtggtgaatccaaaggcgttgttcgatgtacaaatcaaacgtattcacgaatacaaacgtcaattgatgaatgtgttgcatgtgattacccgctataaccgcatcaaggccgacccggatgcgaagtgggtaccgcgcgtgaatatttttggcggtaaggcggcttcggcctattacatggcgaagcacattattcatttgatcaatgacgtagcgaaagtgatcaacaacgatccgcagattggcgataagctgaaagtcgtgttcatcccgaactacagcgttagcctggcgcagttgatcattccggcggcagatctgtctgaacagatttcgctggcagggaacgggagcttccggcaacagtaacatgaaatttgcgcttaacggtgcgctgactatcggtacgttggacggtgcgaatgtcgagatgctggatcatgtcggtgctgacaatatctttatttttggtaacacagcggaagaagtggaagaactgcgtcgtcagggctacaaaccgcgtgaatactacgagaaagatgaggagctgcatcaggtgctgacgcaaatcggcagcggtgtattcagtccggaagatccgggtcgctatcgcgatctggttgattcgctgatcaacttcggcgatcactaccaggtactgcggatatcaagctatgtcgcacagccgagcacggtaatcaactggcggaaatttgccgccagcccaagccccgccggaccaaatgacaccgccagcaacttaccgaccagtaacccggcaccaatcttgaccagtgtactggccgccgtccacaaggacgcttttgccaacgacatatcaggaaaagtagttcaacaaagtcgcaattaccgtacgctgattgacgggcgacaggttgtagaacagcggcaggcgcagcaggcgctcgctctctttggtgtagttttgccacagcgccagacgttgctggttgatacgatccgctgcttccagttgcgcccacaggtatgcagcttgcagatcggacatcaaatagctggagccaatatcgcgccaggccacacccgcgtaatggaccggcacgataacgcgcgttttgtcggtgatcgccgcttcaatcagcgtttcgtcgatgttcatggtgtccgggcgaacatccaccaaaacggattttctgccggccaacgccagccaccgaaaggccattgcgccggtcggaagacaaaaaggttgtag

SEQ ID NO: 139360 - DNA, 2011 bp, Homo sapiens
atgaaagatttattcgaagatgtgcgcgcggtggcggaaccgtgtggcgcgctggcgctggcgggaatgaaaaaatatatcgccctgcacaacattcgcggcgaacggctggcgcatattctttccggtgccaacgtgaacttccacggcctgcgctacgtctcagaacgctgcgaactgggcgaacagcgtgaagcgttgttggcggtgaccattccggaagaaaaaggcagcttcctcaaattctgccaactgcttggcgggcgttcggtcaccgagttcaactaccgttttgccgatgccaaaaacgcctgcatctttgtcgagcgcaaagaaattttgcagatgctcaacgacggcggctacagcgtggttgatctctccgacgacgaaatggcgaagctacacgtgcgctatatgttcgggcggcttcctgagcgaaccaacaagctttgtcgaagatcagatggtcctaggggaataattttgacaactgtgctcgacccgctgagtgaaacccctggagcgtacctcgacatcgtgcgtgagctgcgtgaacgtactgaattgccgattggcgcgtatcaggtgagcggtgagtatgcgatgattaagttcgccgcgctggcgggggctatagatgaagagaaagtcgtgctcgaaagcttaggttcgattaagcgtgcggggggcgaggggaccgtccactctcgtattaccccgcccgataaaacggtttatccccaaggatcgtcgcccgatgcattatccgtcgctgtggcagctcggtacccgtcgttagatgagttacgggtgaaacgagatatcgcgatggctgaagcgggtattccgcgcggagccggaatgggcatgggctacggcggctgcggtggtggcggtcatatggctcggtaccccgaagatcttacctgggaagcgttccgcgacacgctggctggaacaggccgagcaaggtgtggattacttcactatccatgcgggcgtactgctgcgctatgtgccgatgaccgcgaaacgcctgaccggtatcgtctctcgcggcggttcgattatggcgaaatggtgcctctcccatcatcaggaaaatttcctctatcaacacttccgcgaaatttgtgaaatctgtgccgcttatgacgtttcgctgtcgctgggcgacggtctgcgccccggttctattcaggacgccaacgatgaagcgcagtttgccgagctgcatacgctgggcgaactgaccaaaattgcctgggaatatgacgtgcaggtgatgattgaaggcccaggccacgtgccgatgcagatgatccgccgcaatatgaccgaggagttagagcactgccacgaagcgccgttttacactctggggccgctaactaccgatattgcgccgggctatgaccacttcacgtcggggattggtgcggcgatgattggctggtttggctgcgcgatgctctgttacgtaacgccaaaagagcatctgggtctgcccaataaagaagatgttaagcaggggcttatcacctataagattgctgcccacgccgctgacctggcgaaagggcatccgggcgcgcaaattcgcgataacgccatgtcgaaagcccgcttcgaatttcgctgggatagaccagtttaatctggccctcgacccgtttaccgcccgcgcttatcacgatgaatccctgccgcaagagtcaggtaaagtcgcccatttttgctccatgtgtgggccgggattctgctcgatgagaatcagccaggaagtgcgtgattacgccgcctcgcaaactattgaaatggaaatgccgtgtatgtcggagaacgtccgtgccagaggcggagccctttacctgcgtaaggagggagcatattgtatcgtgcgaatggatcctcattcgccttctgattctggcctgtaacagatggttattaacggcctaggagttctttaagagtcggggtccagtcacccaagcttacgactacc

SEQ ID NO: 139361 - DNA, 2826 bp, Homo sapiens
atgcgcgacaccatttactcgcgccaccagcgcgtggtggtcggtgtgcgtctgctacaggttgccggacgcgatcgtaaagtggatatcaagccgtttgccattcagggactgccgatgtcggtgcagccgacacagctggtgaccgaaaccctgaacgtacgccaggcgcgcgtgctgccgcttaacttcaactccattactgattaccactcgctgatgttcgatctgggcatcatcgcgcgtcgtctgcgctccgcatctgaccgtagcagattctatcgtctgatcgaagcttcgctgtatggcgggatctccagtgccattacccgttctctgcgcgactacctgttgccagaaaacagcggcgtgcgtaaagcgttccaggacatggaagcggcgctgcgtgaaaaccgtatgacgctggaagcgattcgtgtcacccagtcggaccgcgacctgtttaagcatctgatcagcgaagccaccaactacgtggcgccggactacatgcgtcacgccaacgagcgccgtgtccatctcgacaaagcctggagtttcgtcgcgagctacatacttcgccaactggcggctgagcagtacaaacacgtcgatatggcgcgtgagctggcagagcacaacggtgccgaaggcgatctggaagcggattatcaggcggccagtgatcacctgaacctggtgcaaaccgcactgcgtcagcaggagaagatcgaacgctacgaagcggatctcgatgagctgcagatccgtctggaagagcaaaatgaagtggtggcagaagccatcgaacgccagcaagagaatgaggctcgtgcggaagctgccgaactggaagtggacgagctgaaaagccagcttgctgactaccagcaggcgctggacgtccagcaaacgcgcgcgatccagtataaccaggcgattgctgcgcttaatcgtgccaaagaactgtgccatctgccggacttaaccgccgactgcgccgccgaatggctggaaaccttccaggcgaaagagctggaagcgactgaaaaaatgctctctcttgagcagaaaatgagcatggcgcaaaccgcgcacagccagtttgaccaggcttatcagctggtggtgccaatcaacggcccactggcgcgtaacgaggcgtgggatgtcgctcgcgaactattgcgcgaaggggtcgatcagcgtcacctggcagagcaggttcagccgctgcggatgcgattaagcgaactggaacagcgtctacgcgagcagcaagaagctgagcgtatgctgccaggttcaaaactcattcacggtggcctgcgctaccttgagcactatgaattccgcctggtcagcaaggcgctggctgaacgtgaagtgctgctgaaaatggccccgcatatcgccttcccgatgcgttttcgcctgccacatcgtccgcatctgcgcccggcgtggatgattcgcattggtctgtttatgtacgatcatctgggtaaacgcaccagcttgccgggatcaactggtttgcgttttggcgcaaattcagtgttaaaaccggaaattaagcgcggattcgaatattctgactgttgggtagacgacgcccgtctggtactcgccaacgcccagatggtggtgcgtaaaggcggcgaagtgcttactcggactcgcgccacctctgctcgccgcgaaaacggcctgtggattgtggaagcggaagatatcgataccggcaaaaaatatagctggcaagcgcgcggcttggttaacgccaccggcccgtgggtgaaacagttcttcgacgacgggatgcatctgccttcgccttatggcattcgcctgatcaaaggcagccatattgtggtgccgcgcgtgcatacccagaagcaagcctacattctgcaaaacgaagataaacgtatagtgttcgtgatcccgtggatggacgagttttccatcatcggcactaccgatgtcgagtacaaaggcgatccgaaagcggtgaagattgaagagagtgaaatcaattacctgctgaatgtgtataacacgcactttaaaaagcagttaagccgtgacgatatcgtctggacctactccggtgtgcgtccgctgtgtgatgatgagtccgactcgccggaggctattacccgtgattacacccttgatattcatgatgaaaatggcacagcaacggtggtgtcggtattcggcggtaacgctgaccacctaccgaaaactggcggaacatgcgctggaaaaactaacgccgtattatcacgggtattggcccggacatggacgaaagagagtgtgctaccgggtggcgccattgaaggcgaccgcgacgattatgccgctcgcctgcgccgacgctatccgttcctgactgaatcgctggcgcgtcattacgctcgcacttacggcagcaacagcgagctgctgctcggcaatgcgggaacggtaagcgatctcggggaagatttcggtcatgagttctacgaagcggagctgaaatacctggtgggatccacgacatgggtccgcacgcgccgacagacgccctgtggcgtcgcacaaaacaaggcatgtggctaaatgcggatcaacaatctcgtcccgctatccagcgcaacgacgctggcgcgtttgcccggtttaagcgatcccagaacaccatcaacacccagcattcgcgccggatgcagcgacgccatatggatggcttccgcaggcgttacgcccgtcaactcgaccatattgcgcactgccgcatcaacagacagcgtactgcccgccagcccaccagacgcg

SEQ ID NO: 139362 - DNA, 4917 bp, Homo sapiens
gatctcggggaagatttcggtcatgagttctacttagcggagctgaaatacctggtggatcacgaatgggtccgccgcgccgacgacgccctgtggcgtcgcacaaaacaaggcatgtggctaaatgcggatcaacaagtctcgtgtgaatcagtggctggtggagtatacgcagcagaggttatcgctggcgtcgtaaattaacgtaaggtgatcaggtcagatttcaatctggcctgagactgatgacaaacacaaaactgcctgatgcgctacgcttatcaggcctacgtggtttatgcaatatattgaatttgcatggtcttgtaggccagataagacgttcacgtcgcatccggcatgaacaaagcgcacttttgccaaaaatctaccctacttttaaattcagggaattacccgcaaagcccacgccatcatacccaacgtaacaaaactcaggcacgttccccactcgccccgagaaaaatagcattaatgcgcccagcgccagcataaaaattttgagcagaaaaggtaaattgttggcgtgataaggatattacaaacttcaataataccggcaagtccgacacccagcatggcaataaccaccgccaaaaattgcgccagtatggggatgccgaaaaaagtcattaccagcgaggtcaaaatccattttctgttttgcattattctttccattctttttgaatggggaaattatactccccgagtccccttgccccttctggacacttttccgaaatgatggcggaaaaaaacgggaccctttggcccccgtctatttattggggaaacttacaatctcaccgggaccgatatgcccagatatgatcggcgtactctttgatagtacggtcagaagagaagtagcccatattggcaatgttcagcatcgcttttgcggtccactcttcctgaagctcgtagagttcatcgactttatcctgacaatcgacatagctgcgataatccgtcagtacctggtagtgatctgcgaagttgatcagcggatcaaccagatcgcgatagcgacccggatctttcggactggatacaccgctgccgatttgcgtcagcacctgatgcagctcctcatctttctcgtagtattcacgcggtttgtagccctgacgacgcagttcttccacttcttccgctgtgttaccaaaaataaagatattgtcagcaccgacatgatccagcatctcgacattcgcaccgtccaacgtaccgatagtcagcgcaccgttaagcgcaaacttcatgttactggtgccggaagcttccgtccctgccagcgaaatctgttcagacagatctgccgccggaatgatcaactgcgccaggctaacgctgtagttcgggatgaacacgactttcagcttatcgccaatctgcggatcgttgttgatcactttcgctacgtcattgatcaaatgaataatgtgcttcgccatgtaataggccgaagccgccttaccgccaaaaatattcacgcgcggtacccacttcgcatccgggtcggccttgatgcggttatagcggaaatggccagcgggcttgacccattctggcgtcctgatgtggtgcatgcgcacgactggcatgcaggccttgcgcctgcgtatctggcggcgcgcgggcgtccggcgaagtcggagtttactgtgcacaacctggcctatcaaggcatgttttatgcacatcacatgaatgacatccaattgccatggtcattctttaatattcatgggctggaattcaacggacaaatctctttcctgaaggccggtctgtactatgccgatcacattacggcggtcagtccaacctacgctcgcgagatcaccgaaccgcagtttgcctacggtatggaaggtctgttgcaacagcgtcaccgtgaaaggcgtcttttcggcgtactgaacggcgtggacgagaaaatctggagtccagagacggacttactgttggcctcgcgttacacccgcgatacgttggaagataaagcggaaaataagcgccagttacaaaatgcaaatggggctaaaggttgacgataaagtgccgctttttgcagtggtgagccgtctgaccagccagaaaggtctcgacctggtgctggaagccttaccgggtcttctggagcagggcgggcagctggcgctactcggcgcgggcgatccggtgctgcaggaaggtttccttgcggcggcagcggaataccccggtcaggtgggcgttcagattggctatcacgaagcattttcgcatcgcattatgggcggcgcggacgtcattctggtgcccagccgttttgaaccgtgcggcttaacgcaactttatggattgaagtacggtacgctgccgttagtgcggcgcaccggtgggcttgctgatacggtttctgactgttctcttgagaaccttgcagatggcgtcgccagtgggtttgtctttgaagatagtaatgcctggtcgctgttacgggctattcgacgtgcttttgtactgtgtcaaggacagtttcatcatcggactaccgatgtcgagtacaaaggcgatccgaaagcggtgaagattgaagagagtgaaatcaattacctgctgaatgtgtataacacgcactttaaaaagcagttaagccgtgacgatatcgtctggacctactccggtgtgcgtccgctgtgtgatgatgagtccgactcgccgcaggctattacccgtgattacacccttgatattcatgatgaaaatggcaaagcaccgctgctgtcggtattcggcggtaagctgaccacctaccgaaaactggcggaacatgcgctggaaaaactaacgccgtattatcagggtattggcccggcatggacgaaagagagtgtgctaccgggtggcgccattgaaggcgaccgcgacgattatgccgctcgcctgcgccgccgctatccgttcctgactgaatcgctggcgcgtcattacgctcgcacttacggcagcaaccagcgagctgcgtgctcggcaatgcgggaacgtgaagcgcgcacactgccgcaaaaactggctggcacgctgggtatgttaagtaaagtaatgcggatcccacgccagcaggaagtcacggctctgcgcacttatctgcaaattcgtatcggtctgcatgcggcgtttaatgcctgtgaagagatgtgccaacgcgtggcgctggagcgtcaactggacagcgaagaacgcgcattactgattgaacgttcgcaaacggttattcgtcagggccgcgatcttcttcacgcctgggatgccacctggaactcggcgcaggcgctggataacgcactacagccggacagagcaggtcagtttgccgacgccctggagaaatacgctgccgatgagtcattttttgcccaactcgataaatatgatattccggtggtggtgattggcaaagttgaaggtcaatatgcccatgtttattctgtcgataccgataattttggcgacagcattgcgttgaccgatgcattaattgaaagtgggcatcaaaatattgcctgcctgcatgctccgcttgatgtccatgtttcggttgatcgcgttaatggttataagcagagcctggctgcgcataatattgcagtgcgtgatgaatggattgttgatggcggttatacccatgaaactgcattaaaagcagcacggcaattattaagccagtcaccgttgcctgaggcggtgtttgccactgacagcctgaaattaatgagcatttatcgtgcggcagcagagaaaaatattggctattccgcagcagttagcggtgcgcatcttattcgggctacatttatagatcgtattaagtactcgggccggattcggcaatttagcccattattaggacgaccccttgaatcatcgctactgtgctctaaagagcacgcaatactgacggcttgccatgccagcaccaacaggggcagcagaatcagcaaaaatgccagcattaccagttgtcgtaatgagcggggaaaaacgggccagcgtttcaaggtgttactctcgtcagacgcgaatagcctgatgctaaccgaggggaagttcagatacaacaaagccgggaattacccggctttgttatggaataaggcggtgcctaactcgacgtttcgcccgatggttgatatagctacgctgatatcagaagttggacggcaggcaccttgttgtgcgtcattcgtattttatgtagcacgtcccgaaggggctgacataataaaggaagatcttacctgggaagcgttccgcgacacgctgctggaacaggccgagcaaggtgtggattacttcactatccatgcgggcgtactgctgcgctatgtgccgatgaccgcgaaacgcctgaccggaatcgtctctcgcggcggttcgattatggcgaaatggtgcctctcccatcatcaggaaaatttcctctatcaacacttccgcgaaatttgtgaaatctgtgccgcttatgacgtttcgctgtcgctgggcgacggtctgcgccccggttctattcaggacgccaacgatgaagcgcagtttgccgagctgcatacgctgggcgaactgaccaaaattgcctgggaatatgacgtgcaggtgatgattgaaggcccaggccacgtgccgatgcagatgatccgccgcaatatgaccgaggagttagagcactgccacgaagcgccggtttacactctggggccgctaactaccgatattgcgccgggctatgaccacttcacgtcggggattggtgcggcgatgattggctggtttggctgcgcgatgctctgttacgtaacgccaaaagagcatatgggtcctgcccccccccaaaaatatttttaa

SEQ ID NO: 139363 - DNA, 1650 bp, Homo sapiens
ctaaacaggctcgttatcaaccaaacgaacacgcatgccgccacggctgatatcgacaatttccgctgcgaaacgggtgtcggtcccggctttgtctttcaggaagcgtgcgtataaccagtcaccaacatcacgttctgccatccggttgagacggcgacgctcggccatttggacagtgatttcatcctgtgggcgcgtcgcagtttcgcctttgataaccgctttcagcagacggtggttgatcatgtcgccatatttacggatcggcgaagtccaggtggcgtatgcttccagaccgaggccaaagtgaggaccgggttcagtgctaatttcagcaaatgactggaagcgacgaatgcggctgtcgaggaaaccagttggttgcgcgtccagttcacgacgcagtttgcagaaaccgtccagcgtgagcacttcttcggcatcgacatgcagaccgtgcgttttcagcaacgctgccagcgcgtcggcattcgccggatcaaagcccatatgcacgttatagatgccaaaaccgagcttatcgcgcagtacgcgggccgcacaaatgttagcggcaatcatcgcttcttcgacgatacggttggcaatgcgacgaggctcggcgacgatatccagcacttcacctttttcaccgagaataaagcggtaatccgggcgatctttaaacaccagtgcgtggttatgacgccactcgccgcggcgttggcaaatttgcgctagcaaacggacttgttcggcaattgctccactttcaggctgccagtcaccggtattttccagccagtcagaaacctggtcatacaccgagctttgctttggattcgatggtggcggcaaagaattcgatatttgagtatagagtaaatttacgaggaaacgaagtttcggagataatctgctgcagatctttcgattcgatgtggcaacgaagataaagttcggcagcagtttgccgtcgttcgcatacaccgggaagtatttctggtcacctttcatggtgtaaaccagcgcttcagccggcaccgcgaggaatttctcttcgaattttgcggtcagaacgaccggccactccaccagcgaagccacttcttccagcaggctttcgcttaagtcagcgttaccgccaatcttacgcgctgcttcttcggcatcggctttaatgttcttcgtaatcggcgatgactttcccacgtcacgcagaatttccggatactgatcggcgttatcgatggtgaattccggctcgcccataaagcggtggccgcgaatcacgcgatcggactgaatgcccagaatggttgccggaatgactttgtcgcccagcagcagggtcacggtgtgcaccggacgcacgaagtgcacgtcgttgcgccccaacgcatcagtttcgggatcggcagtttcgccagagaagtcgcaaccatattcggcagcagtgcttcggtgtttcgccggtaataccgcaaccacgcgcccaaccttctgacgctttgctcggtttgccttcagcgtcgaacgcctgggcaatcgccgggccgcgtttttcgatttcacgatccggttgcgttccgccaggttagctactttcagcgccagacgcccattgcctgatactgacgggttcat

SEQ ID NO: 139364 - DNA, 339 bp, Homo sapiens
atgagtaagaagattgaatcagtaatcaaaaaactcccagaaaagaaatgtgtaggacctgatggcttcactgcccagaacgcctttcatttcgccttcagcagcagctttaacggcagctttgatctgctcggttcgtccacatttaacgatccgcaaacgggcgagcggtcaccggcgattgcacagaaatcccagcaacgcgcgctggcgcaggggctgctcttgctgacctgtggcgcatacggcaacgtgattcgcttcctgtatccgctgaccatccgggatgcgcaattcgatgcggcaatgaaaattttgcaggatgcgctgagcgattaa

SEQ ID NO: 139365 - DNA, 2337 bp, Homo sapiens
atggagctgaaaaacacagcacgagaacttcgtgaagcatacacaagtatcgatagccgaattgatcaagcagaagaaaaaatatcagagattgaagatcaacttaatgaaataaagcgtgaagagaagattagagaagaaagaatgaaaaggaatgaacaaagcctccaagaaatacgggactatgtgaaaagaccaaacctacatttgactggtgtacctgaaagtgactgggagaatggaaccaatttggaaaacacaattcaggatattatccaggagaacttccccaacatagcaagacaggccaacattcaaattcagaaaattcggagaacatcacaaagacacttcttgagaagagcaagacacataatcatcagattcaccaaggttgaaatgaaggaaaaaatgttaagggcagccagaaagaaagagcttcagggtgaagtccaggcggatggacacccatacgccatcgccgatccacgccagttgccgcacctggctctcccgccgcgggggttccgccgactcttcctcaaggacaacggcctcgtgggcattgaggagcagagcctgtgggggctggcggagctgctggagctcgacctgacctccaaccagctcacgcacctgccccaccgcctcttccagggcctgggcaagctggagtacctgctgctctcccgcaaccgcctggcagagctgccggcggacgccctgggccccctgcagcgggccttctggctggacgtctcgcacaaccgcctggaggcattgcccaacagcctcttggcaccactggggcggctgcgctacctcagcctcaggaacaactcactgcggaccttcacgccgcagcccccgggcctggagcgcctgtggctggagggtaacccctgggactgtggctgccctctcaaggcgctgcgggacttcgccctgcagaaccccagtgctgtgccccgcttcgtccaggccatctgtgagggggacgattgccagccgcccgcgtacacctacaacaacatcacctgtgccagcccgcccgagggcgtgccaatcatcgaaatcagccggacgagtcggacgacgcgccagtaccgcctggatggtgtcaacggtataaccttcgtcctgataccaggcgcggaagcgaccgagcataaagtcgataacatcatcaactacgttggcattagtcagcttatcgccatacagacgcaccgcttcttcggtcagcgtttgcagatcaaggttgaggttcttctcaacgataattcgcagcacgccaagcgcggcacgacgcagcgcaaacgggtctttgtcgcctttcggatgctgaccgataccgaagatacccgccagggtatccatcttgtcagcaatcgccagcgcacaagctactgggttggacggcaggtcatcaccagcaaaacgcggctgatactgctcattcagcgccaccgcgacatcttccgcttcgccatcgtgacgcgcatagtgcatccccataacgccctgggtgtcggtgaactcgaagaccatgttggtcatcaggtcgcacttagacagcagacccgcacgggtagcgtggttaacgtcagcgccaatcttgttcagcaatccagccagccagcgcctggatgcgataatctgctgcggatctttcgattcgatgttggcaacgaagataaagttcggcagcagtttgccgtcgttcgcatacaccgggaagtatttctggtcacctttcatggtgtaaaccagcgcttcagccggcaccgcgaggaatttctcttcgaattttgcgtcagcgttaccgccaatcttacgcgctgcttcttcggcatcggctttaatcttcgccttacgttcttcgtaatcggcgatgactttcccacgctcacgcagaatttccggatactgatcggcgttatcgatggtgaattccggctcgcccataaagcggtggccgcgaatcacgcgatcggactgaatgcccagaatggttgccggaatgactttgtcgcccagcagcagggtcacggtgtgcaccggacgcacgaagtgcacgtcgcttgcgccccaacgcatcagtttcgggatcggcagtttcgccagagaagtcgcaaccaggcgaccgtacagagatataaaagaagggttttcgcaaagagaggctgctctgctgccacagtcactgagggttccacagaccgggacctggagtgccgccggggcacaggcatgaccagcgactccctgctggacagacgcctgaaacggctccttgctgcagaggccaccgtggagcccagcacagccccctga

SEQ ID NO: 139366 - DNA, 735 bp, Homo sapiens
atgcactgccggaccatcgcacctgattggtcgcggcggtggagcagcaactgcaacagtttacccacaccgcgtacagatgtgccgtatgaaagctacgtcaccctggcggagaaaatcaacgccttgccccggaattttaccacggcaattttcaacaaaggactccctcgacgcatcgaacgcttgtttaaatcagacatcgaagcgaagcaggtggcggcgttattttcgaaccggtgcagggcgagggcggtttcaacgttgcgccaaagagctggttgccgctattcgccgcctgtgcgacgagcacggtattgtgagattgctgatgaagtgcaaagcggctttgcgcgtaccgccggatttaatgacgatggcgaaaagctcgcgggcgggatgccgctttcgggcgtggtcggtaacgcgaatattaggacgcacccgcgccgggcgggcttggcggcacctacgccggtaacccgtggcggtggctgccgcgcacgcggtgctcaacattatcgacaaagaatcctctgcgaacgcgcgaatcaactgggccagcgtctcaaaaacacgttgatgatgccaaagaaagcgttccggccattgctgcggtacgcggcctggggcgatgattgcggggctgctccgctgacctgtggcgcatacggcaacgtgattcgcttcctgtatccgctgccatcccggatgcgcaattcgatgcggcaatga

SEQ ID NO: 139367 - DNA, 2466 bp, Homo sapiens; identical to SEQ ID NO: 128997

SEQ ID NO: 139368 - DNA, 1972 bp, Homo sapiens
ctaaacaggctcgttatcaaccaaacgaacacgcatgccgccacggctgatatcgacaatttccgctgcgaaacgggtgtcggtcccggctttgtctttcaggaagcgtgcgtataaccagtcaccaacatcacgttctgccatccggttgagacggcgacgctcggccatttggacagtgatttcatcctgtgggcgcgtcgcagtttcgcctttgataaccgctttcagcagacggtggttgatcatgtcgccatatttacggatcggcgaagtccaggtggcgtatgcttccagaccgaggccaaagtgaggaccgggttcagtgctaatttcagcaaatgactggaagcgacgaatgcggctgtcgaggaaaccagttggttgcgcgtccagttcacgacgcagtttgcagaaaccgtccagcgtgagcacttcttcggcatcgacatgcagaccgtgcgttttcagcaacgctgccagcgcgtcggcattcgccggatcaaagcccatatgcacgttatagatgccaaaaccgagcttatcgcgcagtacgcgggccgcacaaatgttagcggcaatcatcgcttcttcgacgatacggttggcaatgcgacgaggctcggcgacgatatccagcacttcacctttttcaccgagaataaagcggtaatccgggcgatctttaaacaccagtgcgtggttatgacgccactcgccgcggcgttggcaaatttgcgctagcaaacggacttgttcggcaattgctccactttcaggctgccagtcaccggtattttccagccagtcagaaacctggtcatacaccgagctttgctttggattcgatggtggcggcaaagaattcgatatttgagtatagagtaaatttacgaggaaacgaagtttcggagataatctgctgcggatctttcgattcgatgttggcaacgaagataaagttcggcagcagtttgccgtcgttcgcatacaccgggaagtatttctggtcacctttcatggtgtaaaccagcgcttcagccggcaccgcgaggaatttctcttcgaattttgcggtcagaacgaccggccactccaccagcgaagccacttcttccagcaggctttcgcttaagtcagcgttaccgccaatcttacgcgctgcttcttcggcatcggctttaatcttcgccttacgttcttcgtaatcggcgatgactttcccacgctcacgcagaatttccggatactgatcggcgttatcgatggtgaattccggctcgcccataaagcggtggccgcgaatcacgcgatcggactgaatgcccagaatggttgccggaatgactttgtcgcccagcagcagggtcacggtgtgcaccggacgcacgaagtgcacgtcgcttgcgccccaacgcatcagtttcgggatcggcagtttcgccagagaagtcgcaaccatattcggcagcagtgcttcggtgctttcgcccttcacatgggcgcgatacagcagccattcgcctttatcggtagtcagacgctcagcctggtcaacggtaataccgcaaccacgcgcccaaccttctgccgctttgctcggtttgccttcagcgtcgaacgcctgggcaatcgccgggccgcgtttttcgatttcacgatccggttgcgcttccgccaggttagctactttcagcgccagacgacgcggagcaagcaaaccattgaacggttgcctgttgcgagccacgttatccagtcccgataaattccagcaaggatctaccggtggcatgctttggggcgtccttaggcattccccaaaattttcaattacggccgatggtcgcgaatttacgctacactggccgaatacgggtgcgatgaccggttgtgccacgcctggcgaatacgtctggtattcgactttcgacaacacccaacggaaatacccacacccttgggaattaat

SEQ ID NO: 139369 - DNA, 1524 bp, Homo sapiens
atggagacacagcaccggctcatgaggaccttccagcctaggcagcaggactggacatacgcactttggggtggagttaaacttcggtggttgtttttctttctgtggggattatttctgtttgctggggaagaagaactcggcatccgccagacgcggacgaacgactttctcgttaccggagataatctgctgcggatctttcgattcgatgttggcaacgaagataaagttcggcagcagtttgccgtcgttcgcatacaccgggaagtatttctggtcacctttcatggtgtaaaccagcgcttcagccggcaccgcgaggaatttctcttcgaattttgcgttacccccaaacttaatgaggggactacacaaagaacgaataacagaggcattgcggtgctgaataccggacatcgccaccctgatctggtcgcggcggtggagcagcaactgcaacagtttacccacaccgcgtatcagattgtgccgtatgaaagctacgtcaccctggcggagaaaatcaacgcccttgccccggtgagcgggcaggccaaaaccgcggttttttcaccccggttcggaaacggggggaaaacggggtgaaaatggttcgcgcccataccgggacgcccggggtggattgcgtttaggggcggcctttcacggtcgtacgtatatgaccatggcgctgaccggaaaagttgccccgtacaaaatcggcttcggcccgttcccctggttcggtgtatcacgtaccttatccgtcagatttacacggcatttcaacacaggactccctcgcacgccatcgaacgcttgtttaaatcagacatcgaagcgaagcaggtggcggcgattattttcgaaccggtgcagggcgagggcggtttcaacgttgcgccaaaagagctggttgccgctattcgccgcctgtgcgacgagcacggtattgtgatgattgctgatgaagtgcaaagcggctttgcgcgtaccggtaagctgtttgccatggatcattacgccgataagccggatttaatgacgatggcgaaaagcctcgcgggcgggatgccgctttcgggcgtggtcggtaacgcgaatattatggacgcacccgcgccgggcgggcttggcggcacctacgccggtaacccgctggcggtggctgccgcgcacgcggtgctcaacattatcgacaaagaatcactctgcgaacgcgcgaatcaactgggccagcgtctcaaaaacacgttgattgatgccaaagaaagcgttccggccattgctgcggtacgcggcctggggtcgatgattgcggtagagtttaacgatccgcaaacgggcgagccgtcagcggcgattgcacagaaaatccagcaacgcgcgctggcgcaggggctgctcctgctgacctgtggcgcatacggcaacgtgattcgcttcctgtatccgctgaccatcccggatgcgcaattcgatgcggcaatgaaaattttgcaggatgcgctgagcgattaa

SEQ ID NO: 139370 - DNA, 187 bp, Homo sapiens; identical to SEQ ID NO: 138461

SEQ ID NO: 139371 - DNA, 350 bp, Homo sapiens
acacttttagacacaaagttccccgcgaccattgcatgcagacacatatcttcgtaaatcccgcgcttcagtggcaaactccatttttatgcgttctgccctaatatttattcttcttatcacgttttaatcactggatatcgatggaaaagaaactgggactgagcgcactcaccgcgctggtattaagctcaatgctgggcgcgggtgttttcagtctgccgcaaaatatggcggcagttgccagcccggcagcactgctcatcggctggggtattactggcgctggcattttattgctggcctttgccatgctgatcctcacgcgcattcgtcccgaacttgacggg

SEQ ID NO: 139372 - DNA, 593 bp, Homo sapiens; identical to SEQ ID NO: 129993

SEQ ID NO: 139373 - DNA, 729 bp, Homo sapiens
atgggcgtacttaataactggttgagcgaagaagaaagtctatggatccagtcgcgcattcatctacgggctctacgttattatagtaactggcggcaatactttgccggttatacctttggtcggcaatattggcagtctcccgaagatgatcatctgcctttattacgcgaattcttagcgcgatatgagcgacctatgaaaaattgctggaagatcctcgatatagaggaaacgactgacgtcgatattatccgccgcgcttatctggcgctgttaccgtcctttcatccagaaaccgatccgcaggattttaaacaacttcgtcaggcgtatgaggaggcgctacggattgcgcagtcgcctgctaaatctgtttggcaaccagaagaatatgaggtagcagaacatgaaattctgctcgcctttcgtgcgttacttgcctctgatagtgaacgttttctgccctccgcctggcagcgattcattcagcaattaaattattgctcgatggaggagattgatgaattacgctggtcgctgtgcacaatcgccatgaacactgcccatttatccttcgagtgcgtggtgttattagcagaaagattgcggtggttacaggaggaaaataccggggaaatagacgaagaagaactgggatcctttttatatgccattgcgaaggggaatgtttttaacttccagaccattctgcatctgcccgttgcc

SEQ ID NO: 139374 - DNA, 1008 bp, Homo sapiens
atgcttgctatagcagattcaacagcagaaaatcagggtaaaattacactggattctatgtgggtagatgcaaatgacactaccgcaatgcgagatatagctagcaacagcgccattgacttcggtacagccacggagctttccgcgattcatggtcactcaacgtcgcaatatcgccttggagaattttatcttcatggtagcgacggtaaaccactggattatacacaggcgagatactggtatgagcaatcagcggaacaggaaaatccacgcgcgcaaagtaaactggggtggatctacctcaaaggtctgggggtcaaacccgacacccgtaaagcaattctctggtataaggaagcagctgaacaagggtatgctcatgctcaatatactttaggtttgatctacagaaatggctcaggtacatgcttttttgacctttcttcctcatggggaattgatgaccgtgatgacctgctgcgcacaattcaccgaatgatcgataacggtcatgccgctcggttggcagggttttatcaccgctggtttcgttattcgccatgtgaatggcgtgactatcttgctgaactaaatgagcaaggtcaggcttatgcgcaatttgaggatgccagggcgcaggatctttcaccggaagatttactcaacaaaaaagcttcttgtgtgccgccactgatttttgccgacgtgttcaaccttccggcacgacgtaacgccattaacggttgtgcaagcctgggggcagcgattaatacagcggtaggtctggggctatacccggattacgcaacggctgtcgataacatggttcgcgtgaaagatatctttataccgattgagagcaatgccaaacgctacgacgcgatgaataaaggcattttcaaagacctaaccaaacatactgatgtgatcctgaaaaaatcgtatgaagtgatgcatggggaattggggaatgtggattcgatccagagctggtcgaatgcgtaa

SEQ ID NO: 139375 - DNA, 1361 bp, Homo sapiens; identical to SEQ ID NO: 129995

SEQ ID NO: 139376 - DNA, 2793 bp, Homo sapiens; identical to SEQ ID NO: 138464

SEQ ID NO: 139377 - DNA, 853 bp, Homo sapiens
ttagtcaccggcccagatctcactgagctttatcaccaggccaatcacttatgtcgccctcggtgacgaaaacgcgcattagctgcgcttcattcagaccgctgacgacctggcgatgcagggcctcaatcgcgctcgatgcaccaattttatgtgcggaaggggcgattttttccagcaatcgcaaggtatcttccgttagcggtcgacgatctccagtgtgcggatcggtgatgacgccttcaagcccatagcgacaggcctggaaacggttgaatttatacagcaggtaatctttttcctgatgtttaaacgggcgttccgtcagtaaccagtgggcggtagcctgaattaatcccgccatatttactgcgtggctaagggttaacggggtatccatcacccgaacctccaccgtgccaaaatgaggactggggcgaatatcccagtgcagatctttaatgctgtcgatcatcgtggtgtaactcagacagcgaaacagggcttcaaattgttgccagttactttgaggatcgcaatggcgacagctgtagctctgcgccctgaagggacggcgggctgtgtacgcgccggcatcgagcatggtcttctgtacaatcaggaacagcgtctgtggtatatcgggccgatgttccgtcacgagcgtccgcagaaagggcgttatcgtcagttccatcagttgggctgcgaagttttcggtctgcaaggtccggatatcgacgctgaactgattatgctcactgcccgctgggtggcgcgcgctgggtatttccgagcacgtaactcttgagctgaactctatcggttcgatgatggccgtgctcgcgaccat

SEQ ID NO: 139378 - DNA, 1780 bp, Homo sapiens
tagccttgcatcgccttttcagcacgttgatatctctcttttgataaatatccagccacttggcgggaaatcattatcctttctctatggttccgataaaacacatataattttatgtggttcccatttgggagagccctttttttgcggagtatgtcggggccaaaaaatataaaaataccagcccccgcaatggcggaaaattctctttaaaggaatattaaaggataatttatatgcacatggagtcgcaaaaaatatggtttgccctttccactccgatggaaatacgcaatgaatgctgtttaccttcgcattcatcacccaaaatgtatttaggtgcctgcctttttgcccctttcttcctcatggggaattgatgaccgtgatgacctgctgcgcacaattcaccgaatgatcgataacggtcatgccgctcggttggcagggttttatcaccgctggtttcgttattcgccatgtgaatggcgtgactatcttgctgaactaaatgagcaaggtcaggcttatgcgcaatttgtcgccagcaccgccgaatgctgtggcgaagggggaatcaaagcctgggattatgtccggatgggttttttaagccgaatgggcgtacttaataactggttgagcgaagaagaaagtctatggatccagtcgcgcattcatctacgggctctacgttattatagtaactggcggcaatactttgccggttatacctttggtcggcaatattggcagtctcccgaagatgatcatctgcctttattacgcgaattcttagcgcaggaaacgactgacgtcgatattatccgccgcgcttatctggcgctgttaccgtcctttcatacagaaaccgatccgcagggttttaaacaacttcgtcatgcgtatgatgatgcgctaccgattgcgcagtcgcctgctaaatctgttttgcaaccagaagaatatgagtgggaagcgttgctggtggaaatgctcggcctgttgcatcgtattgcgatggtacaactttcgcctgctgcacttggcaacgacatggccgccatcgagctgcggatgcgtgaactggcgcgcaccataccgccgacggatattcagctttactatcagacgctgttgattggtcgcaaagaattaccgtatcgaacctgccaacttcatgcctgcacgtctgcagacacacctcttcgtaaaatcccgcgcttcagtggcaaactccatttttatgcgttttgccctaatatttattcttcttatcactctgccgcaaaatatggcggcagttgccagcccggcagcactgctcatcggctggggtattactggcgctggcattttattgctggcctttgccatgctgatcctcacgcgcattcgtcccgaacttgacggcggtatctttacctatgcccgcgaagggtttggcgagctaatcggcttttgttccgcattcagctcggaaaaagattacctgctgtataaattcaaccgtttccaggcctgtcgctatgggcttgaaggcgtcatcaccgatccgcacactggagatcgtcgaccgctaacggaagataccttgcgattgctggaaaaaatcgccccttccgcacataaaattggtgcatcgagcgcgattgaggccctgcatcgccaggtcgtcagcggtctgaatgaagcgcagctaatgcgcgatttcgtcgccgatggcggctcgctgattgggctggtgaaaaagcattgtgagatctgggccggtgactaa

SEQ ID NO: 139379 - DNA, 517 bp, Homo sapiens; identical to SEQ ID NO: 139332

SEQ ID NO: 139380 - DNA, 1463 bp, Homo sapiens; identical to SEQ ID NO: 139333

SEQ ID NO: 139381 - DNA, 1221 bp, Homo sapiens; identical to SEQ ID NO: 139335

SEQ ID NO: 139382 - DNA, 1624 bp, Homo sapiens; identical to SEQ ID NO: 139336

SEQ ID NO: 139383 - DNA, 894 bp, Homo sapiens; identical to SEQ ID NO: 139337

SEQ ID NO: 139384 - DNA, 2063 bp, Homo sapiens; identical to SEQ ID NO: 139338

SEQ ID NO: 139385 - DNA, 1958 bp, Homo sapiens
gttcttactgctcctgtgggaaatcagaaagagcagccagcagacaacaccaactgagatgaatgcagctgaaatggcacagctggttgcgggtgtggatgaagtcggacgcgggccgttagttggcgcggtcgtcaccgctgcggtgatccttgacccggcgcgcccgattgccgggctgaatgattccaaaaagctgagcgaaaaaccgccgtctggcgctctatgaagagatcaaagagaaagcgttgagctggagtctgggccgcgcggaaccccccgaaatcgacgagctgaacattcttcatgcgaccatgctggcgatgcagcgtgccgtcgttgggctgcatattgcgccggaatatgtgttgattgatggtaaccgctgcccgaaattaccgatgcctgcgatggctgtggtgaaaggcgatagccgcgtaccggaaatcagtgccgcgtctatcctggcgaaagtgacgcgtgacgccgaaatggcggcgctggatattgttttcccgcaatatggttttgcccaacacaaagggtacccaaccgcttttcatctggaaaaactggctgaacacggcgcgaccgaacaccatcggcgcagctttgggcctgtcaaacgcgcactgggacttgcgtcctgattcttgtgtcgagattaagtaaaccggaatctgaagatgtcttgtgacaggggtatatgctacatgtaacattattaaagtctgaacatctaagtttatgaactcctgttgaagctgctgcaaatttggtgaaccagtaacaattggaacgtgatttggagttgggtcgcagacagctggaggtggggatctttgttgccagaattgcaagggttgaaatggaataatccctttcctctctatcctaagggacacagccaacacccctgactcctgctgtgtatgggattcagctacacccaggggccagtcagcagcttccctagtcacctgtcccaggagggttttgttgttaatggccttttgaagaagcacttcatagcgaacatctttctctagcaccgtcataaatagatttctaacaagttctagaggacagattctagtaaggtcggggaattctctacagaggattactgggccgtggggccccctgtcccccaacttctgcatgtcactttttcctcctgggcttctgggcctgtgatggaagcggctgccatgagaaccactgacatgccctggtgacattttttcctttgtcttggtgataaacatccagctcctcattacacagatttttgcagccagcttgactttcttctcagaaaattggtttttcttttctatctcattgtcaggctgcaaattttctgaacttttatgctctgcttcccttataaaactgaatgcttttaacagcatccaggtcacctcttgaatgctctgctgcttagaaatttctttcactatattccctaaatcatctctcacaagttcaaagctccacaaatctctagggcagggacaaaatgccaccaatctctttgctaaaacataacaagagtcacctttgctccacttctcaacaagttcctcatctccatctgagactatctcagtctggattttattgtccatatcattatcagcattttggtcaaagccattcaacaagtctctaggaaattccgaactttcccatattttctgttttcttctgagccctccaaactgttccaacctctgcctgttacccagttccaaagttgcttccacattttcaggtaccttttcagcagtgtcccattcatcaaaggttggggctcctgtggttggcaagctagtcacaaagtaaattgattgatgttggatggcccattcagtctcagggggagtatccttgtggtgaggtgtactgtgagagcacagcacagcccatccctgtggtctttccattttggacat

SEQ ID NO: 139386 - DNA, 392 bp, Homo sapiens
atcgcggcgaagatccagccgaagacgcacgatacgctcacaccaatcaaccccggcagaataaagctgtggttgatgacgaagcgaccgatgtgggtggtgccggaacggtcaaactgaatcgctgccagatcgctcggataagtcggcaggatgtaataaccgtagcaagccggtgcgaacatggtttctgccatccatgcgataccgtacaccgccacgatggcgatcataccggaacggaagacttcgttttttgagatagacgcgggattggttttggtcaggataataatcagcgccccggtcagcagcataaacatctgaataaccagtaccatcgacagcggtttgccgccgaaggatgacgcagtttcctcaatggggcacat

SEQ ID NO: 139387 - DNA, 679 bp, Homo sapiens
actcggtgcgcgcaaaatgatacagcgaatttccggccggttgagatcgcttaacgcctgcataagatcatcaataaagactttacttaaggcattaagttttcggccatagttaaactcaatgaccgccactttgttgatagtgacaacgttaacatactgataagacataaaaattcctttaatcaaaatattgcgtctggataaattcactgagctgccgcaggccggtgcgcggtgagagcgtattgtttttgaccgctaaaagcgtctggcggtaatagcgatcgaaatcttcattcgcgaacaggtgattcagtacttcttcttcggtctgcttacgcagccattccaccgattgttgttgccgcacttgttgtaaacgaccactggcagttagcgcggttttgaagtcgatgatggcgtgccagatctcatcgattccacgtttttccagtgcgctacaagtcagaacccgtggctgccattcgtcgtatttacgtcgcagaatatgcagggcactctcgtacatatgccgggcaatggcgacattggtatggttatcgccatcgtctttgttgataacgatcagatcagccacttccatcagcccttttttaatgccctgcagatcatcgccgccaccggcaatttgcaacgagataaaacagtccaccat

SEQ ID NO: 139388 - DNA, 706 bp, Homo sapiens; identical to SEQ ID NO: 135758

SEQ ID NO: 139389 - DNA, 2186 bp, Homo sapiens; identical to SEQ ID NO: 127320

SEQ ID NO: 139390 - DNA, 4376 bp, Homo sapiens
  misc_feature (1)...(4376): n = a,t,c or g
atgaacgaacaatattccgcattgcgtagtaatgtcagtatgctcggcaaagtgctgggagaaaccatcaaggatgcgttgggagaacacattcttgaacgcgtagaaactatccgtaagttgtcgaaatcttcacgcgctggcaatgatgctaaccgccaggagttgctcaccaccttacaaaatttgtcgaacgacgagctgctgcccgttgcgcgtgcgtttagtcagttcctgaacctggccaacaccgccgagcaataccacagcatttcgccgaaaggcgaagctgccagcaacccggaagtgatcgcccgcaccctgcgtaaactgaaaaaccagccggaactgagcgaagacaccatcaaaaaagcagtggaatcgctgtcgctggaactggtcctcacggctcacccaaccgaaattacccgtcgtacactgatccacaaaatggtggaagtgaacgcctgtttaaaacagctcgataacaaagatatcgctgactacgaacacaaccagctgatgcgtcgcctgcgccagttgatcgcccagtcatggcataccgatgaaatccgtaagctgcgtccaagcccggtagatgaagccaaatgggggctttgccgtaatgggaaaacagcctgtggcaaggcgtaccaaattacctgggccgaactgaacaaacaactggaagagaaacctcggctacaaacttgcccgtcgaaatttggttccggtccgttttacttctagtgggcgaatctggctgcggtaaatcgaccctcggtcggttgctgacgatgattgaaatgcccaccggtggcgagctgtattaccaggggcaggatctgcttaagcacgatccgcaggcgcagaagctgcgtcggcagaaaatccagatcgtcttccagaacccttacggttcgctgaatccgcgtaaaaaagtcgggcaaattcttgaagagccgctgctgatcaacaccagcttaagcaaagaacagcgtcgggaaaaagccctgtcgatgatggcgaaagtcggcctgaaaaccgagcactatgaccgctatccgcatatgttctccggcggtcagcgtcacgtnatcgccatcgcccgtggtctgatgctcgacccggatgtggtgattgccgatgaaccggtttccgcgctggatgtttcagtgcgcgcgcaggtgctgaatctgatgatggatttgcagcaggagttggggctgtcttatgtctttatctcccacgacctgtcggtggtggagcacattgctgatgaagtgatggacgatatctcggactatgtggcctctaacgttaaagatacgcttagccgtctgaatggcgtcggtgacgtacagcttttcggcgcacagtatgcgatgcgtatctggctggatgccgatctgctaaacaaatataaactgacaccggttgatgtgattaaccagttgaaggtacagaacgatcagatcgctgccggacagttgggcggaacgccagcgttaccagggcaacaattgaacgcctcgattattgctcagacgcggtttaaaaatccggaagaattcggcaaagtgaccctgcgcgtaaacagtgacggctcggtggtacgcctgaaagatgtcgcacgggttgaacttggcggtgaaaactataacgttatcgctcgtatcaacggaaaaccggcggcgggcctggggattaagctggcaaccggcgcgaatgctctcgataccgcgaaagccattaaggcaaaactggcggaattacagccattcttcccgcagggaatgaaggttctctacccttatgacaccacgccattcgtccagctttctattcacgaagtggtaaaaacgctgttcgaagccattatgctggtgttcctggtgatgtatctgttcttgcagaatatgcgagcaacgctgatccccaccattgcggtacccgtggtgttgttagggacgtttgccatcctcgccgcttttggttactccatcaacacactaacgatgttcgggatggtgcttgccatcgggctgctcgtcgatgatgcgatagtggtggtggagaacgtcgagcgcgtgatgatggaggataagctcccgccaaaagaagcgacggaaaaatcgatgtcgcaaattcagggcgcactggtgggtatcgcgatggtgctgtcagcggtatttattccgatggcattcttcggcggttctactggggcaatttatcgccagttctctatcaccatcgtttcggcaatggcgctttctgttctggtggcattgattcttacccctgcgttatgtgaacgctgcttaaacccgtctctgctgagcatcacgaaaataagggcggtttcttcggacactaacagcatcctgtttattgatgagatccacaccattatcggtgcgggtgcagcgtctggtggtcaggtcgatgcggctaacctaatcaaaccgttgctctccagcggtaaaattcgtgtaattggttcgacaacctatcaggagttcagcaacattttcgagaaagaccgtgctctggcgcgtcgcttccagaaaattgatattactgaaccgtcgatcgaagaaactgttcaaatcatcaatggcctgaaaccgaagtatgaagcgcaccacgacgtgcgttataccgcaaaagcggtgcgtgcggcggtagagctggcggtgaaatacattaacgatcgtcatctgccggataaagccattgatgttatcgacgaagcgggcgctcgcgcacgcctgatgccggtaagcaaacgcaagaaaaccgttaatgtggcggatattgagtccgtggtggcccgtattgcacgcattccagagaagagtgtttctcagagtgatcgtgataccctgaaaaacctcggcgatcgcttgaaaatgctggtcttcggtcaggataaagccattgaggcgctgactgaagccattaagatggcgcgtgcaggtttaggtcacgaacataaaccggttggttcgttcctgtttgccggccctaccggggtcgggaaaacagaggtgacggtacagctttcgaaagctttgggcattgagcttctgcgctttgatatgtccgagtatatggaacgccataccgtcagccgtcttattgctgctactcttttggagccactgagaatagatttaggttccaatgccaacctgtttttgaactccccacacctgtctttgatatgcccactggtgaaaagctctcggatccagtctacacaacttgacggcgatatcacccgctaccgttatgataatcacacagttgacttaccctgcgcacgggaagatgccaccggcagccggaaaaccatgacgtggagccgttacggtcagttgctgagcttaacagactgttccggttatgtaacccgttatgaccatgaccgcttcgggcagatgacggcggtgcaccgcgaggaagggctgagtcagtaccgcgcatacgacagccctggacagttaattgccgtgaaagacacgcagggccatgaaacgcggtatgaatacaacatcgccggtgacctgaccgccgtcattgccccggacggcagcagaaacgggacacagtacgatgcgtggggaaaggccgtccgtaccacgcagggcgggctgacgcgcagtatggaatacgatgctgccggacgggtcatccgcctgaccagtgaaaacggcagccacaccaccttccgttacgatgtacttgaccggctgatacaggaaaccggctttgacggccgcacacagcgttatcaccacgacctgaccggcaaacttatccgcagcgaggatgagggtctggtcacccactggcactatgacgaagcagaccgcctcacgcaccgcaccgtgaagggtgaaaccgcagagcggtggcagtatgacgaacgtggctggctgacagacatcagccatatcagcgaagggcaccgggtggcggtgcattacaggtatgatgagaaaggccggctgaccggtgagcgtcagacggtgcatcacccgcagacggaagcactgctctggcagcatgagaccagacatgcgtacaacgcgcaggggctggcgaaccgctgtataccggacagcctgcccgccgtggaatggctgacctacggcagcggttacctggcaggcatgaaactcggcgacacaccgctggtggagtacacccgcgaccgcctgcaccgggaaacgctgcgcagcttcggccgttatgaacttaccaccgcttatacccctggcgggcagttacagagccagcacctgaacaggctgctgtctggacgcgattacacctggaacgacaacggcgaaactcaatcgcattaa

SEQ ID NO: 139391 - DNA, 1640 bp, Homo sapiens
ctaagaaccctctggctgccctaaaaagttaaaagaaagggactgtgcaccaatgtgtttaaaactgaccagaattctcaagactgctggtaagactttgtacttcttccttccatatgcaggatgtaacattcggcgggcaaatttaaccagtggctttagcccggactgggcaaactcaatgaccttgatcccttcggcatcaaaatgatgtccgcactgacgcgccagttcattgataacccaggtttccgtttccccttccaccagcaaccagcagcgtgcaaacagcgatgacggacggttaaaacgaatgtgaaaggatatgcgtcggctatcttcggtactcaagccactcggccccagacgccaggcggcaacgcgcgaggactcacgtaccagtcggcaaacatgctctaccggcgttaacgaaagcaactcacccgagttggtggtggcaatgcgctgcaatggcagaagattcaacagatgccaggcaactgaaagcataatggggtgtaaacgggtttctggatcttcgatcagcaacaatggacgggcgtctttatccagtcgcaatgtgccttttgcctgcaacaaagtagcaaataggccgagcaaaataacccgatacgagcgcccaccaggtcggtcaatcatccggttgatgatatccagatagcgccagcttcgttgctcattgctggctcgccgccgcattaaacgatatcgcgcctgtccggccccctgctcagagaaataatgctcaagcagctgtaccattgcggaaagtccctgacgaatctgcccatcagagagattttgcggatgtgaggataactcacgggcgaggaaatcgagctggcgcgcggtgacttccacattagggactgcgtctatccactgcgccaggttttctggcgtcacgccgccaacggcaaagactgcgatgtccgatggcaataccgcttttaacgctttgatgtattgcggaccaaaagccgatgacggaaatattttcagcgcctgcgcgcccgcttcgagcgcggtaaaggcttcggtcgccgtcgcgcagccggggcagacggtcatgccgtagcccaccgcacggcggatcacttcactatggatattgggcgtaacgatgagctgacagcccatcctggcgagcgcatcgacctgttcaggtttcagtaccgtacctgcgccaatcaacgccttgtcgccgtacgcatcaacgatggcgggaatgctttgctcccattgtggggaattcagcgggatttcaaccgcgtcgaacccggcgtcaatcaccgcgccaacatgcgccagcgcctcgtcggagaagtaataccgcgcaaaatggcgatcagcgggagtttagtttgccactgcatgagcgatgctccagcctgaaatgccgtgtcgcccggcaacggcgtcacgtcgcaacccatcgcctgaaaggcttgctggtagcgcgcggtcagcgatgttccggcgcacacggtgatggcgtgttcgtttccgtgaaagtgccggacccgaaattctcctcccagaccaaagacaaactggtttcttctgaggtgaaatcggcggttgaacagcagatgaacgaactgctggcagacatacct

SEQ ID NO: 139392 - DNA, 3289 bp, Homo sapiens
atgccgatcacattacggcggtcagtggaaaaagagcagctgattgaaatagccaatacgataatgccgtttggcaaatacaaagggcgtcgcttaatcgacctgccggaggagtatctgctgtggtttgcccgcaaagatgagttcccggcagaagctcgctacacccacatcgacttgcacgtaccagccccacttctcgtcatgttcacgctagacacgcgccagagcgcctgtgaccggaacccgcatttgcccatacacgtctgcagtagctggacatcgccgaaatgcgcccctcgattgtggacacgcgctctacttccacgcacacggacgccgccatacgccacgggcacgaccatcgggtcaagagcatcctggtttgtaacgtttcctgatgcgtcgttttaccgccggaaagcgccccgccaagaatttcacacatcgctgcaagggcgtagcctttatgttcggcaaaggtcaacagcgaacccaaccgaaattacccgtcgtacactgatccacaaaatggtggaagtgaacgcctgtttaaaacagctcgataacaaagatatcgctgactacgaacacaaccagctgatgcgtcgcctgcgccagttgatcgcccagtcatggcataccgatgaaatccgtaagctgcgtccaagcccggaagccataatgacggaacaagaaaaaacctccgccgtggttgaagagaccagggaggccgtggacaccacgtcacaacctgtcgcaacagaaaaaaagagtaagaacaataccgcattgattctcagcgcggtggctatcgctattgctctggcggcgggcatcggtttgtatggctgggacagaaatatattgaaaacgagggtgtggcaaactaaactcccgctgatcgccattttgcgcggtattacgcccgacgaggcgctggcgcatgttggcgcggtgattgacgccgggttcgacgcggttgaaatcccgctgaattccccacaatgggagcaaagcattcccgccatcgttgatgcgtacggcgacaaggcgttgattggcgcagttgggcgggcagcgagagttgcgagaggaatgctttactgtaatgcggcagcgaattatcgtagttacgtgatcgacacaatgcaccagctgagtcctggttattcagatgtttatgctgctgaccggggcgctgattattatcctgaccaaaaccaatcccgcgtctatctcaaaaaacgaagtcttccgttccggtatgatcgccatcgtggcggtgtacggtatcgcatggatggcagaaaccatgttcgcgaagcgattcgcgtggtgctggcgattatcgcctttgcctccatcatcttcggtaacctgatggcgctgagccagaccaatatcaaacgtctgctcggttactcatctatctctcacctcggctatctgctggtagcgctgattcgctgcaaaccggcgagatgtcgatggaagcgcagcctcggcgcgttcggcgtggtcagcctgatgtccagcccgtatcgtggcccggatgctgattccctgttctcttaccgcgtgatgacggtgatgatgctgtctctggccggtaacccgatgaagcttatttatcgaacagttatacgtgctagcggtcgatgtctagacacacttgtagacgcacagactttcgcggctaatgcagcaaactatgatacctggacttatatcgataatcccgttacagcacttgattgggatcatatggataaggcaggcactgtagatggcaactatgtaaactatagtggttttgtctattacaacaacaccaatggtgattccgatcagtcctttagcggcgacaaggacatgatttttgccatcctgaagcagcacgcaaagagtggcgaagatatctttggtgatggcgtacttgatgtaatgcaggatggctttggtttcctccgctccgcagacagctcctacctcgccggtcctgagggattaaaggtcgcggttattgcggtcgatcccagcagcccggtcactggcggtagcattctcggggataaaacccgcatgaatgacctggcgcgtgccgaagcggcgtttattcgcccggtaccatcctccggtcatatgggcggtgccagtcagcgagcgcgggaattaatgctgttatgcgaagcagcgggttatgacgtagtgattgtcgaaacggttggcgtcgggcaagtcggaaacagaagtcgcccgcatggtggactgttttatctcgttgcaaattgccgggggggcggatgatctgcagggcattaaaaaagggctgatggaagtggctgatctgatcgttatcaacaaagacgatggcgataaccataccaatgtcgccattgcccggcatatgtacgagagtgccctgcatattctgcgacgtaaatacgacgaatggcagccacgggttctgacttgtagcgcactggaaaaacgtggaatcgatgagatctgggacctgcaggcatgcaagaacaaactgaaaaacccgccacaaagcctgaaagaactggttgagagcgatcaaaactggcgggtgatttatcaggatccgcgcaccagtacaccggggctgggtctgttgctatggatgcaaaaagtctatggcgatgacgccccacaagcctggcagaaactggcgaagaaaacggtcacggtcaccaaaggctggagcgaagcctacggcctgtttttaaaaggtgaaagcgatctggtactgagttacaccacctctccggcttatcacattctcgaagagaagaaagataactacgccgccgcgaacttcagcgaaggtcactatctgcaagtggaagtcgccgcccgcaccgctgccagcaagcagccggagctggcgcaaaaattcctccagtttatggttctccggtttccagaatgcgactgccagccatcgtggcgactcgataaaacaaaatccatcgcgttctggattgacctgcagagcaagagcatcatgctggaactactttttgtgattggcttttttgtcatgctgatggtcaccggcgtttcgttgctgggcattatcgccgcgctggttgtggcgacggccattatgttcctcggcggtatgctggcattgatgataaagttgctgccgtggcaactactggcgattgcggtggtaaggtcccgggtccggaggggaaacttacccccccgggtcgaagaaccccaaggaaagtatttcgggttacggcaaccgtaa

SEQ ID NO: 139393 - DNA, 1428 bp, Homo sapiens; identical to SEQ ID NO: 139352

SEQ ID NO: 139394 - DNA, 1836 bp, Homo sapiens
ttaatgttcgagatacaaaaaatgctgcttattaaatgctgttacatccctgtatagatgtggtattatatatacgggtgctgtcacctgttgcgtctgctcctgaatgacaggctttatgtcatcaggaacaaccggcgcgacgttgcctttatgctggcatggcagtaacaagccgttaaacagatcggcaggcagcgggtccggcaggttgatatcgcagtgcgcaacacaaatccagaacacattcatatgttcgacaggtttcaccccagccagatagacactaccgtcatcatcgacaaggcccactgtctgctcgttatcattttttacttctgcgccaaacggtggatggctgccatcttgtaaacgcagcaccgccatcgctttttgaccactgatgacggcaaatttgcggtagccaatggctccttcagttagcgtggcttgcaccaccgactgggttgcttcggcgttttccggcaatttgttgaggtcgatatacgcctgattgcgataataattgttaacgtcagaaacgacggctttaccaaacatattggtataaacagcagccccgttaccttccaccggaacatcggcaacgccatcggcatcaatcagcaggcgtgtcccgcccatattctgggtacggtgaagtgcgccccctttcacaataccaacccgaatggcagtgctgggaacctgatgtcgaatgggtacgtcaacctccccaagatgcgataaccgaccctgactttttctgcttttaccagccaggcatgaccttcgaacaatttgtacgtgagtttgccgaatggttttcacaaaaacgtccggcggcgatgatgatcggcatccgtgcggatgagtcctacaaccgttttgtcgccatcgccagtttaaataaacaacgttttgccgacgataaaccctggacaggcggtcatagctggtacatttaccccatttacgactggaaagtggctgatatctggacctggtatgcaaatcatcaaagtctctgcaacccactgtataacctaatgtatcaggcaggcgttcctctgcgtcatatgcgaatttgcgaaccttttggcccggagcaacgacaaggattatgcgctctatcacgttatcgaaccggatcgctgggctgctatgtgcgcacgagctcagcgcgctacacaactggcggcctttaccccggacaagcacggggggcggcggtttaaacggaggctctgaaaccttcggggctccctcaggtttgcgctctgaatcagtgtctgctctctgtgcatcgatatgctggccatgtccgccaagaaagatgcgatggtgccgatgggcggcctgctgtgcatgaaagacgacagcttctttgatgtgtacaccgagtgcagaaccctttgcgtggtgcaggaaggcttcccgacatatggcggcctggaaggaagcgcgatggattttctggcggtaggtctgtatgacggcatgaatctcgactggctggcttatctctacgcgcaggtacagtatctggtcgatggtctggaagagattggcgttgtctgccagcaggcgggcggtcacgccgcattcgttgatgccggtaaactgttgccgcatatcccggcagaccagttcccggcacaggcgctggcctgcgagctgtataaagtcgccggtatccgtgcggtagaaattggctctttcctgctggggaatggcaaatatcacagcgactggatctctaacgccaacaaagtccgggtgatttactggcaaatgaccggcgataaagccgccgctgccaactggttgcgtcat

SEQ ID NO: 139395 - DNA, 1557 bp, Homo sapiens
tcagaccaggtaggagctttcctgtttcatatgtttcagggttgcacagttggtctctttaatgtcggtgtggagatccaaagtgggttgtggaaagagcgtccataggagaagtgagaatactttcacatggataatggttccattgctcttctcattgtctaggtaagtaggaggatacataacttcaattttgcagaagtaaatatccctgtcctgctgatacagcgccagcaaatcgctatattggctaacggtagttaacgttgttgcgacctgcgcacgaacacccggatcttcaatgcgtatttgccgacgttgcagaattttcaccgcattattgagctgcttttccagcgttggtgcatttttctggatctgctccagccccagattcatcaccatttgctgcacccgcagagcgctaaggcgcagttcattcatctggttaacatactcaagatcgatatcaatcagccgatcgagtgcactttcagcagcctgacgctgatcttgttcgatcaaatcgtaaatcccggcctgggtcgctccagcggaagttgtcgcattattcgcctgaccttgcgccaggcgtgcgatctcatcggcgggggatcctcctttaagatcaacgttcttgagcagatcacgaagcatatcgaaaaactgcagtgcggaggtgtagtcaaacaactcagcaggcgtgggaacaatcagcacatcagcagcacatacgacattaatcgtgccgatacccaggttaggcgcgctgtcaataactatgacatcatagtcatgagcaacagtttcaatggccagtcggagcatcaggtgtggatcggtgggcagtttaccttcatcaaatttgcccattaactcagtttcaatacggtgcagagccagacaggaaggaataatgtcaagccccggccagcaagtgggctttattgcataagtgacatcgtccttttccccaagatagaaaggcaggagagtgtcttctgcatgaatatgaagatctggtacccatccgtgatacattgaggctgttccctgggggtcgttaccttccacgagcaaaacacgtagccccttcagagccagatcccctactgggggttttttttgattaataagggatttgccgatttcggaaccacccccaaacaggatttcgccttccacgagcaaaacacgtagccccttcagagccagatcctgagcaagatgaacagaaactgaggttttgtaaacgccacctttatgggcagcaaccccgatcaccggtggaaatacgtcttcagcacgtcgcaatcgcgtaccaaacacatcacgcatatgattaatttgttcaattgtataaccaacacgttgctcaacccgtcctcgaatttccatatccgggtgcggtagtcgccctgctttctcggcatctctgatagcctgagaagaaaccccaactaaatccgctgcttcacctattctccagcgccgggttattttcctcgcttccgggctgtcatcattaaactgtgcaatggcgatagccttcgtcat

SEQ ID NO: 139396 - DNA, 3024 bp, Homo sapiens
ttaatcctctcgggcaaaaagtgcctctataaagtcgtccgccttaaacggacgcaaatcctcaatacgttcgccgacaccaatgtagcggatagggataccaaactggtcagccaccgagaaaattaccccgcctttcgccgtgccgtccagtttcgttagcgtgatgccggttaagccaacggcttcatggaacagtttggcctggcttaccgcgttctgcccggtgctggcatcaatagtcagcataacttcatgcggcgcttcaacgtcgagtttcttcatcacgcggacgattttcttcaactcttccatcaggtgcgatttgttctgcaggcgtccggctgtatcggcaatcaggacgtcgatattacgcgctttagctgcctgaatggcgtcgaagataacagaggcggaatccgccccggtatgctgggcaatcaccggaatattgttgcgctgaccccagacctgaagctgttcaaccgcagctgcacggaaagtatcacccgccgccagcatcaccgatttaccctgctgctcaaactgacgcgccagcttaccaatcgtcgtggttttacccacaccgttgacgcccaccatcaggatcacaaacggcgctttgccttcaacattcagcggctcatcgactttcgccagaatctcgcccatctcttctttcagcaggccatagagcgcctcggcgtcacgaagctgcttgcgggatgcgccttccgtcagattggtgataattttacgtgtggtttccacacccacatcggcgatcaaaagctgctcttccagctcctcaaacagatcatcgtcgatttttttaccgcggaacaggctgataaatccggaaccgagattttctttggtttttaacaggctgcgtttcaggcgcgcgaaaaaaccttctttggtcggtttttcctgctcctgagcgatttcttccaccggctgctcttcttctgccggaggaaccaccatcaccgcctcttctgccgcttcggcagccagcgccgtttccagctcttcgtcggtaatttcttctttagccgcttcttcttccgccgcttcgacatcttggagttgtggtccgcgtttttctacgtcttttcccactccgttccctgcgaaccacatccgcaagctccttcctcgagcagtttgggctccttgatagcgttgagtggaggccctgccgcgacttggcagtagcttattttgttcactcctctctggccagacagctccgactgtattctcgtgctgctccagccagctggccatttcactgttggcgcgacggttagagagcacccatacggaagcgccagtcgcactgcggttcggtgcggcatcagcgtgaatcgacacgaggaaattggcgttttgcttacgtgccacatcactgcgccccatcaccgagataaagtaatccccgtcacgggttaaaacgcctttaaacatcggatcgtcattgagcaaagtacgcaatttacgcgcgatggcgatggtgacatttttctcccgcgtaccaccggggccgatagcgccagggtcctgaccgacgtgtccggcatcaatagcgatgataattttatcgccagtgttagccgtcgcgcgcgctgccggacgcgttaccgtattactgctgataacacccgtagtgcggttactttccgtattaaacggattgcgcgccggttcgctgacgcgcggtgcgacaaccgcaggcgtttcaacgcgtttcgcaaccacgggcggcggaggaggcggtggcggcacatcggcgttaatcgtaaagacgacagtgtaattgctgccattctgccgcttcaccgcttcggttttaccgttttcggtaagatcgaccaccagccgtagcgtttgtgcatctttaggcgttccagagcgaatcgccttcaccagattattgccgctgaacaacaacggcagttcctgaatcacgcccgtttgtttgatatcgagcgccacggtgcgtttgctttgatggctaaacgcataatcaggatcgccaataaaactcaacgttatccgcgcctgttgattaccgttagaaacctgaatatcagagagcgtcgcggcacccaccggcgtgcacagcagcagcagcgtcgctaccaaccaatttctgatgcgatacatcatcccgccacggccttgtgcctgataatcaatgtgtatttcgacatccgggtcaggaagaacacctgtaccttgttgtggccactccaccaggcagatggcatcgttggcaaaataatcgcggatccccataaactccagctcctcgggatcggcaaggcggtacaaatcaaagtgatagaccattaagttgtcgagcgtatagggttcgaccagcgtataagtggggcttttgacattacactgatgacccagagcccgtccgctcattaattgcagggtactttccagcagcgggcgcggttcaaagggctcatcgctgaccgaaacattcttgccacctgcttcgatagcggaataatcgagaatatcgttgaggatggtcagcaacgattcaccagagtcagtaattgcccgcaaatcatcacgctgggcgttaagtgcggggttatctgccagcagttgagcagtgccgagaataccgtacagcggtgtgcggatctcatggctcatcgccgccagaaacgccgattttgcctggctggctttttctgcttccgcccgtgcctgtcggtgttctatcaccagttcctgcaattcagctgtacgcgctttgacctgcgccgccagctgttcgcggtggcgattcagtgcatgaacattgctgcgaaacgcatccatcagccgcccgatggtatccagctcccgtacgccagcggtttccgggaaaggggagtcaatatcaccgtccagcagccgttgcagcgcctgcgtttgttcggcaagtggacgcgtgactgagcgataaaccacgcgccagaggatcagaatcagtgcgcaaagtgaaaccat

SEQ ID NO: 139397 - DNA, 2415 bp, Homo sapiens; identical to SEQ ID NO: 129108
  misc_feature (1)...(2415): n = a,t,c or g

SEQ ID NO: 139398 - DNA, 2913 bp, Homo sapiens
ttagtacaggaacatatttcggtcagtttgcatcagccggaagaggtgcaaaagctggtcgagcgtagccatgcggaagaagttatccgctggaatgcgcaaaccgtcgccgctcgcctgcgcgtgctggctgatgacattctttaccatcgcctgccaacgcgttttacgatggaaaagcaaattggcgcactggaaaaaatcgcccgccagcatccggataatccggttgggcaattctgctactggcatttcagccgcatcgcccgcgtgtggccgataaacagcggcgaatgccattacttccggcgctgaaaagttatctgtcactaaagtctccggcgctgccgcgccttcgtgcggctgcatctccggcgcatccatgatattggcatcgccagaactacccggttcgtcatactccagtcgctgctgacaacgctgaatggcgatttcacaagactgtaaatactcttgtgccagttcaggtggcaatgcccggtgttcccgcgccagcgtggtcatggcattaatatgctcaacaataaactggctgtgcgttacccacagtttcatatctgccagataatggctgttaaacgccggttcctgcatcgccacccgcgaaatcgacatactccttgccttgctgatcccagattcggctgccctgaccagcaatttacgtttttcttccggcagtaaattcaccgcctgctgataagacgcatccaccagataatagatttgcgaatctggcagcgaaccgtcgagatacacggtgctccagtgcgctttattcagatggcggcttggacgcacatcgctgtgctgctgacgtagcagctccgccagctccgggctggttttcagcgaaacagctgggcgattttctacttctttcaccatcgcaaacagtacatcttccactttgatctgcgtcgctttccagtcattatgcacgctctgttctgcgccgtacagcggtgtgcggatctcatggctcatcgccgccagaaacgccgattttgcctggctggctttttctgcttccgcccgtgcctgtcggtgttctatcaccagttcctgcaattcagctgtacgcgctttgacctgcgccgccagctgttcgcggtggcgattcagtgcatgaacattgcgtttgctgccgcactggtggattttgatctgccggatatcgacggcattacgcttgcccgacaactggcacagcaatatccgtcgctggttttgattggctttagcgcccatgtcattgacgaaacgctgcagtaggatctgagacttgtgtttctttttcccaggcacatcctcgaccttggcaaaataaacctcctgctctacttcttcgctatctacccgatcctgctggtttatagcgtggcaatcaccattaccggaattgccagccagagggtcatccacagaccgtttccggttgcagatgcagtgtccagagacagcgtttccagtgcagcgccgttccacaacatcacgggtatcgtcttcttcgagatacatcaacacatcgcagacgttgttaatcccgcgtccatcaatcatccactcatcgcgatctttgagggtgttaatggtgctacccaccaccatcgccactttacgggtgtggcaggcatcgacaaaagagagaatcgtctgctctatttccgctacatccccggcagaaaattgcagcgccctgatttcatcttcggttattgccgggtcccggctggtgtcatccataacatttcctgtctttacgccttcgcgagtgagatcattattaaacagacagtaatacggcgactcgcggtccgcgtcgttgcttaaatatgcctcttcgtacatctgcaaatcctgttgcgttaagccatcccagacaccgcccaacagacgacgagtcacggaatcccgtaatccgtaaagcccataccacagcaaaacgcccgcaactttaccgcaatcgatctgtttatcacgcaaccacaacgcactggcgagcgccagcatggcacctgcggaatcaccggcaaagccaatgcgggacatattgatttgataatcctccgcctgctggtggaaataacaacaagcagccacaatttcctctatcgcttgcggaaaacgcgcttcaggtgaaagggtgtaatcaataccaatcaccgtacattggctgtagcttgccagcaggcgcatgatgcgatcgtgggtatcgagattgccgagaataaaaccgcctccatgcaaataaaatagcgtcgctgggctatctggctgcggacaaaagagacgtgtttccacctgcccatattttgttggaaccatgtaagctctggttgccatttctggagcgcccgcattccagaatcggcgctcaagcgtgtaatactgtcgttgctcagcaatcgttcccgttgcgggccagggcggtaaatccggctgaagagtattcacaacggtcttcatttcagcagaaataaggtccagaacaggtagtttgttttccggcggaatcggcgtcgcatcgccatccaacaattcaaggcgcggcgcggcatcaaaatggttagcttcccgctcattctccaggcgaggcaggcgaaaattgacctggttgatgagctgggtattaaaactgaccaccagcggtggggagatatacagccgttcttcactattggaaagatgaatcgtcttctcaacgcgaaacactaactgatgcggtccattatccagttcaatgctgtccgcaccgcgcagcagagagctggaaaccttcttgccgtcgagtaccagaagatcgacatcggttgaaagccgcagcgtggtggcaaaaacggataccggcaaacataatgcaatcaaggtggtcacgatgccggttttcat

SEQ ID NO: 139399 - DNA, 3294 bp, Homo sapiens; identical to SEQ ID NO: 123299

SEQ ID NO: 139400 - DNA, 1134 bp, Homo sapiens
tcaacgaagcgcagcaagacttgcagagtaactgatcgtatgacacgtcttgtattcgaggaagaaatccagcagttcggcaacaatggttgaaacagggttaccaatcgcgcggaaacgctcggtgtcttcaacgtggatttgtgctttatgagtaacatccagaccggccatcaccaccgggatccctgactggaagacaatttctgccgcttccgggtcaacgtaaatattaaattcagccgcaggcgtccagttacccagccccatagcgccacccataatcacgatacgggcaattttgctatgcagttccggatggctattgagcagcaaggcaacgttagtttgcggtccggtagacacaatggtgacaggttccgcactttcacgcagcgttttcgccatcagctctaccgccgtacagttttgcggtgcgaatgtcggttccggtaatgccgggccgtcgagaccgctttcgccgtgcacattgtccgcgataatcaactcacgcattaacggttttaccgcgccgcctgctaccggaatatcggtgcgattaagcaaggtcagcatacgcagaacattgcgtaaggtccggaagcgttgttgaaactttgtgagcagcagggatttttgcgcttcattcagcttcgtgatgccgtcatccagtaccttaatgagaatgtctttctgggcggatgctttcttctcattgtactcatcaaatagcaaaatatacgctgcgagcaattgcgtcgcaacaccacaccattcatacactgtttgggttgcttcaaaatacttatcctggctatccataagtaaggttttaatatcgccgactaaaacggaggctgcctgtgaatactcctgtttaaagcgacttaactcttttatggtttcatcaaaggtcgtactggcgttcaatttgttgggcgatggtttacgcgatgcgctggatccgaaaattaaaggatctagctggacccagcggtagaggtagaagcctgttctaagggacccttgggtcctttgttccatggcctgtggtatgatatcatcaatgctctgagacccacacagcttggcagaggacacatcagtagtccaagaaggtgtcactgtgctcat

SEQ ID NO: 139401 - DNA, 2268 bp, Homo sapiens
atgacagtgataggttatgccttttactcgacttttgcactgactgaaaaggacaaattaatgttaaaaaagatacttttactggctctgcttcctgcaatcgccttcgcagaggaacttcctgctccagtaaaagcgattgaaaaacagggcattacaatcatcaaaacattcgatgcccccggaggaatgaaaggttatctcggaaagtatcaggatatgggcgtcaccatctacctgactccagatggtaagcacgctatctctggttacatgtacaacgagaaaggtgaaaacctgagtaacacacttatcgaaaaagaaatttacgcaccagccggacgcgaaatgtggcaacggatggaacaatcccactggctcctcgacggtaaaaaagatgcgccggtcattgtctacgtcttcgccgatccgttctgcccatattgtaaacagttctggcagcaggcgcgcccgtgggtagattctggcaaagtgcaattaagaacattgttggttggggttatcaagccagaaagcccggcgacagcagcggcaattcttgcctccaaagatcccgcaaaaacctggcaacaatatgaagcctctggtggcaagcttaagctaaacgtgcctgcaaacgtaagtacagagcaaatgaaagtgttaagtgacaatgagaaactgatggacgatctgggggcaaatgtcacgccggctatctattacatgagaaaaggtatcgcgccgacgacaacagggttaaatctgcatcaccatcttgagaaaaatctcagaggccttgaacaaacaattaatatagtcaataagtccgaactaaagaaaaactttattatctacggccctcagctcatttcttgctctaataatagtatgctgatccgctgcctacggcaagattcctctgtcgagattgagtgccatgatatcctcatgtcagcagagaatgctgaagaactgttggttcaccgcaaagccgatctgacttatctcactgatcaccctgtaacgttcagagagcgtcttcagatgtctatttataaaattcctcttccgctcaatattctggaagctgcacgagagcgtattacctggacactcaacaccctaccccgcgtttgtgtctcattttctggcggcaaagactctggtttaatgctgcatctgacagccgaacttgcccgacaaatgggcaaaaaaatctgcgttttgtttatcgactgggaggcgcaattctcttgcaccattaactatgttcagtccctgcgcgagttgtacaccgatgtcatcgaagagttttactgggttgcgctcccgcttacgacgcaaaattccctttcacaataccaacccgaatggcagtgctgggaacctgatgtcgaatgggtacgtcaacctccccaagatgcgataaccgaccctgactttttctgcttttaccagccaggcatgaccttcgaacaatttgtacgtgagtttgccgaatggttttcacaaaaacgtccggcggcgatgatgatcggcatccgtgcggatgagtcctacaaccgttttgtcgccatcgccagtttaaataaacaacgttttgccgacgataaaccctggactacggccgcaccaggcggtcatagctggtacatttaccccatttacgattggaaagtggctgatatctggacctggtatgcaaatcatcaaagtctctgcaacccactgtataacctaatgtatcaggcaggcgttcctctgcgtcatatgcgaatttgcgaaccttttggcccggagcaacgacaaggattatggctctatcacgttatcgaaccggatcgctgggctgctatgtgcgcacgagtcagcggggtaaaaagtggcggcatttacgccggacatgacaatcatttctatgggcatcggaaaatcctcaagccagaacatttagactggcaagaatatgcattattgctgctcaatagcatgccggaaaaaacagctgagcattaccgcaataaaatcgccatttatttgcactggtatcagaaaaaaggcatcgaggttccacaaacccagcaaggggacattggcgcgaaagatatcccctcctggcggcggatatgcaaagttttactcaataacgattactggtgtcgggcattatcatttagccccacaaaatcgaagaactatcagcgttataacgaacggataaaaggaaaacgtcaggaatgggggatactatgcaacaacgattaa

SEQ ID NO: 139402 - DNA, 798 bp, Homo sapiens
atggctatattcaatcaggcagacagcgatacctgcggcttccgcgctcatttccgcaccattgccattcatgccgttgagcaaatgccatttatcgtcaccgtcagcatcaggagccataaacgctccgccattgctgagcgtgtaaaaggaccagatacccccgcagtactcatcacagaagcggtccatccaggcgaaaatgcgcggttccagcgttatccactgcgggatggtgccaaagtgctgcggccagaagcggatatgctgttcatcggattaatgcgttgctgcaagcgttacgggaacaagggttttgataccaccgctattgaacaacaggagcaggagatctcccgttcgttacgtcagcaaggggaactggtggggcagcgtttgcaactgcgccagcaacaacagcaactcagtcagcagatagtcgctgccgccgatgagatcgcacgcctggcgcaaggtcaggcgaataatgcgacaacttccgctggagcgacccaggccgggatttacgatttgatcgaacaagatcagcgtcaggctgctgaaagtgcactcgatcggctgattgatatcgatcttgagtatgttaaccagatgaatgaactgcgccttagcgctctgcgggtgcagcaaatggtgatgaatctggggctggagcagatccagaaaaatgcaccaacgctggaaaagcagctcaataatgcggtgaaaattctgcaacgtcggcaaatacgcattgaagatccgggtgttcgtcgcaacaacgttaactaccgttag

SEQ ID NO: 139403 - DNA, 723 bp, Homo sapiens; identical to SEQ ID NO: 129120

SEQ ID NO: 139404 - DNA, 3111 bp, Homo sapiens
atggatagccaggataagtattttgaagcaacccaaacagtgtatgaatggtgtggtgttgcgacgcaattgctcgcagcgtatattttgctatttgatgagtacaatgagaagaaagcatccgcccagaaagacattctcattaaggtactggatgacggcatcacgaagctgaatgaagcgcaaaaatccctgctggtaagctcacaaagtttcaacaacgcttccgggaaactgctggcgttagatagccagttaaccaatgatttttcagaaaaaagcagctatttccagtcacaggtagataaaatcaggaaggaagcatatgccggtgccgcagccggtgtcgtcgccggtccatttggattaatcatttcctattctattgctgcgggcgtagttgaaggaaaactgattccagaattgaagaacaagttaaaatctgtgcagaatttctttaccaccctgtctaacacggttaaacaagcgaataaagatatcgatgccgccaaattgaaattaaccaccgaaatagccgccatcggtgagataaaaacggaaactgaaacaaccagattctacgttgattatgatgatttaatgctttctttgctaaaagaagcggccaaaaaaatgattaacacctgtaatgagtatcagaaaagacacggtaaaaagacactctttgagacttatctcactgatcaccctgtaacgttcagagagcgtcttcagatgtctatttataaaattcctcttccgctcaatattctggaagctgcacgagagcgtattacctggacactcaacaccctaccccgcgtttgtgtctcattttctggcggcaaagactctggtttaatgctgcatctgacagccgaacttgcccgacaaatgggcaaaaaaatctgcgttttgtttatcgactgggaggcgcaattctcttgcaccattaactatgttcagtccctgcgcgagttgtacaccgatgtcatcgaagagttttactgggttgcgctcccgcttacgacgcaaaattccctttcacaataccaacccgaatggcagtgctgggaacctgatgtcgaatgggtacgtcaacctccccaagatgcgataaccgaccctgactttttctgcttttaccagccaggcatgaccttcggaacaaatttgtacgtgagttttgcccgaatgggttttcacaaaaaacggtccggcggcgaatgatgatcggcatccgtgcggatgaagtcctacaaccggttttgtcgccatcgccagtttaaataaacaaacggttttgccgacgataaaccctggactacggccgcaccaggcggtcatagctggtacatttaccccatttacgactggaaagtggctgatatctggacctggtatgcaaatcatcaaagtctctgcaacccactgtataacctaatgtatcaggcaggcgttcctctgcgtcatatgcgaatttgcgaaccttttggcccggagcaacgacaaggattatggctctatcacgttatcgaaccggatcgctgggctgctatgtgcgcacgagtcagcggggtaaaaagtggcggcatttacgccggacatgacaatcatttctatgggcatcggaaaatcctcaagccagaacatttagactggcaagaatatgcattattgctgctcaatagcatgccggaaaaaacagctgagcattaccgcaataaaatcgccatttatttgcactggtatcagaaaaaaggcatcgaggttccacaaacccagcaaggggacattggcgcgaaagatatcccctcctggcggcggatatgcaaagttttactcaataacgattactggaatgtaccaatcgacatggtgatgccgctgaccaccccgagaatgaacatcgccgccgagaacagcgccaggctgtggctgaacatcaaaccggcaaccgccagcaccatcaggagaaagccaaaacgtaactgcgttttcaacgggacgatttccatcagccaggcgttgaggaagatagagattaaaatgccggcgttgaggaaggtgaagcaatggcagcgaagggggactgcacgtattgttgacaactcagctgcgctctgcagggtgcagcaaatggtgatgaatctggggctggagcagatccagaaaaatgcaccaacgctggaaaagcagctcaataatgcggtgaaaattctgcaacgtcggcaaatacgcattgaagatccgggtgttcgtgcgcaggtcgcaacaacgttaactaccgttagccaatatagcgatttgctggcgctgtatcagcaggacagtgaaatcagcaatcacctacaaactctcgcacaaaataacatcgcccagttcgcgcagtttagtagcgaagtcagtcagctggtcgacaccattgagctgcgtaatcagcacggactggcgcatctggaaaaagcgagtgcacgcgggcaatacagcctgttattgctggggatggtttcactttgcgcactgattctgatcctctggcgcgtggtttatcgctcagtcacgcgtccacttgccgaacaaacgcaggcgctgcaacggctgctggacggtgatattgactcccctttcccggaaaccgctggcctggcggcgcaggtcaaagcgcgtacagctgaattgcaggaactggtgatagaacaccgacaggcacgggcggaagcagaaaaagccagccaggcaaaatcggcgtttctggcggcgatgagccatgagatccgcacaccgctgtacggtattctcggcactgctcaactgctggcagataaccccgcacttaacgcccagcgtgatgatttgcgggcaattactgactctggtgaatcgttgctgaccatcctcaacgatattctcgattattccgctatcgaagcaggtggcaagaatgtttcggtcagcgatgagccctttgaaccgcgcccgctgctggaaagtaccctgcaattaatgagcggacgggtgaaaggtcgcccgattcgcctggcaacggcaattgccgatgatatgccgtgcgcgttaatgggcgatcacgacgtattcgtcaggttataa

SEQ ID NO: 139405 - DNA, 491 bp, Homo sapiens
cgtcatctgcatgagaagggccacctgctggcgctcggagagggggtagccggctcggattccagacagccccatgccaaacagcagcccggccttccgggtgacaggctccttcttaatcctcttccgctcagggccctgcttctctgtgtccgagtccttctgctccccattggcgcccgcggtgaagggcagcttccgcttgctggctcgctccctcacctcccttcccgccatcgccacgctccagttttggggtcttggttagagaaactttatctttatccgattccatagctgaaagtcagtgctgacgaggactgtcttttaaatccaatggaggtgtgtcccagagcagggctgtatatattatgtctgcatcagctctgcgttgttcaccgacaaatcccgtgtctggaagagtcctggcaggctgcacgggcgtgctccgagggctgcgcggctccgcgacggctcagcggcggggcgcg

SEQ ID NO: 139406 - DNA, 274 bp, Homo sapiens
ctgtcggtgatacgttggcactaccgcgcgctggggcatttttgcgctgatcattgtcgaaacgctggcgtggtttaccgtcgttgccagcctgtttgcccagcataaacaacgagccgaaaatcttattcagcgccttcatctgctttggtcctttaatccatagagcaatccgttgagcaagggtggcgtaaccgatcatcacaataatatcgaccacaatagtggtgacgccgagcacgatatactgcatcagttgcggctgttgcggcat

SEQ ID NO: 139407 - DNA, 990 bp, Homo sapiens
atggtgcacattgtggcgcttatgagccccggtcccgatttcttttttgtctctcagaccgctgtcagtcgttcccgtaaagaagcgatgatgggcgtgctgggcattacctgcggcgtaatggtttgggctgggattgcgctgcttggcctgcatttgattatcgaaaaaatggcctggctgcatacgctgattatggtgggcggtggcctgtatctctgctggatgggttaccagatgctacgtggtgcactgaaaaaagaggcggtttctgcacctgcgccacaggtcgagctggcgaaaagtgggcgcagtttcctgaaaggtttactgaccaatctcgctaatccgaaagcgattatctactttggctcggtgttctcattgtttgtcggtgataacgttggcactaccgcgcgctggggcatttttgcgctgatcattgtcgaaacgctggcgtggtttaccgtcgttgccagcctgtttgcctgccgcaaatgcgccgtggtatcaacgtctggcgaagtgattgatgtttgccgggcgtattgcccgtgtgacacacacactgtcctacgttgtagtccacataaagaccttgttctcatccctaaccgtggacacacgcactgccgtaacttgatggtccacctactcggctctgatctcatcccattacgggcctcggtttcatcccccgtcaagccgggcacccagcccacggcagacaagttgacgcgcccaactacggcccgacgggtttctctaccccatacgggtgacaacacccacagtgcagcgaacttggaggacaccaatataggccgttgtgacttctaccccgtcccgggtgcacaacccacaggcagtatattcttggcttcacacttagagcccgtgggttttaccccggtactggtgcacaaccgcccggccctaccttttcgacgccactttcagcgcctggtgttcctctcctatcagcggtaa

SEQ ID NO: 139408 - DNA, 1884 bp, Homo sapiens
atgaataatccgggcatcatttcaacgtcgagtgcgcgaaaggctgttttgacgcggacgtttgggctatgctatgcggatctgaaaaaccacctcaacgctacatttgtagccgtattgaaaacaggaccactggctgccatgcaagagcaataccgcccggaagagatagaatccaaagtacagcttcattgggatgagaagcgcacatttgaagtaaccgaagacgagagcaaagagaagtattactgcctgtctatgcttccctatccttctggtcgactacacatgggccacgtacgtaactacaccatcggtgacgtgatcgcccgctaccagcgtatgctgggcaaaaacgtcctgcagccgatcggctgggacgcgtttggtctgcctgcggaaggcgcggcggtgaaaaacaacaccgctccggcaccgtggacgtacgacaacatcgcaaattttaacacgcaaaaaggtccgacgccagatcagcgcgttcgtctggcattaagtatgacgatagatcgccgcctgatgaccgaaaaagtattagggacgggcgaaaagccagcgtggcattttacaccagatgttaccgcgggatttacgccggaaccttcgccgtttgaacaaatgagtcaggaagaactgaatgcgcaggcaaaaactttgttgagcgcagctggttatggtccgcaaaaaccgctgaagctgacgcttttgtataacacttcagaaaaccatcaaaaaattgcgattgctgtagcatcgatgtggaaaaagaaccttggcgtagatgttaaattgcaaaatcaggaatggaaaacctatatcgatagccgtaacaccggcaattttgatgttatccgcgcctcgtgggtgggggattataatgaaccctccactttcctgacattattaacgtcaacgcattcaggaaatatttcacgctttaacaatccggcatatgacaaagttctggcccaggcatcgacggaaaataccgttaaagcgcgtaatgccgattacaacgcggcagaaaaaatcctcatggagcaagcaccgattgcaccaatttatcaatataccaatggacgattaatcaagccgtggctgaaaggttatcccattaataatcctgaagatgtggcgtacagtcggactatgtatattcgcgcagtttttgtgaatctcaccaatcccaaaagtattgtgtttctggcggcgctatttccgcaattcatcatgccgcaacagccgcaactgatgcagtatatcgtgctcggcgtcaccactattgtggtcgatattattgtgatgatcggttacgccacccttgctcaacggattgctctatggattaaaggaccaaagcagatgaaggcgctgaataagattttcggctcgttgtttatgctgcataacgcctttgcgtggttctatcttggcgcgtttctgttgacagtgattgcatggttcttgctgggaaatgcgcagaaaatgccgcaaaccacgctgcaatggggcattctggtgtttcttggcgtggtggcttccgggattggctactttatgtggaactacggcgcgacgcaggtggacgccggaacgctgggcattatgaataatatgcacgtttcggcagggctgctggtaaacctggctatctggcaccaacagccgcactggccaacgtttattacaggcgcgctggtgatcctggcctcactgtgggtgcatccgaataaacgcttccgtaactggctgacgctgctcgccatcgcgcacggcggcgtacagtcggctccacaagccttcgcccagggttttggtcaccaccagaccctggcgctcaaaactctctactacccgatgcggtag

SEQ ID NO: 139409 - DNA, 3726 bp, Homo sapiens
atggaagctgcgccgtttgatacgccggacgtcgaagagctactgcgggagtggctggatgacgatcagcgcggcacatattgctggagaatgctcgaacagcttggcgcaccaacggtattgccggaattactcaagagcgagaatggcctgattctggtgacgggggcgacggggagtggcaaatctaccacgctggcggcgatggttggctatctcaatcaacatgccgatgcgcatattctgacgctggaagatcctgttgaatatctctatgccagccagcgatgtttgatccagcagcgggaaattggtttgcactgtatgacgttcgcatcgggattgcgggccgcattgcgggaagatcctgatgtgattttgctcggagagctgcgtgacagcgagacaatccgtctggcactgacggcggcagaaaccgggcatttggtgctggcaacattacatacgcgtggtgccgcgcaggcagttgagcgactggtggattcatttccggcgcaggaaaaagaccccgtgcgtaatcaactggcaggtagtttacgggcagtgctgtcacaaaagctggaagtggataaacaggaaggacgcgtggcgctatttgaattgctgattaacacacccgcggtggggaatttgattcgcgaagggaaaaccgaccagttaccgcatgttattcaaaccgggcagcaggattgcgatttacctaaggcaataactgggaatgcagggtttgtgaaggttgccacacgctgtggacctttaagagttagggattcgttggccattaccggaccaacggagttttccatgccacgtcgtcgcgtcattggtcagcgtaaaattctgccggatccgaagttcggatcagaactgctggctaaatttgtaaatatcctgatggtagatggtaaaaaatctactgctgaatctatcgtatacagcgcgctggagaccctggctcagcgctctggtaaatctgaactggaagcattcgaagtagctctcgaaaacgtgcgcccgactgtagaagttaagtctcgccgcgttggtggttctacttatcaggtaccagttgaagtccgtccggttcgtcgtaatgctctggcaatgcgttggatcgttgaagctgctcgtaaacgcggtgataaatccatggctctgcgcctggcgaacgaactttctgatgctgcagaaaacaaaggtactgcagttaagaaacgtgaagacgttcaccgtatggccgaagccaacaaggcgttcgcacactaccgttgtgcgcacatcgacgccggtaaaaccactactaccgaacgtattctgttctacaccggtgtaaaccataaaatcggtgaagttcatgacggcgctgcaaccatggactggatggagcaggagcaggaacggtggtattaccatcacttccgttgcgactactgcattcgggtctggtatggcttgattaataacgccatgagcggactgaacgcggcccaggcggcgttaaatacggcaagtaataatatctccagctataacgttgccggatatacccgccaaaccactattatggcgcaggccaatagcacgttgggcgctggcggctgggttggcaatggtgtctacgtttctggtgtgcagcgtgagtatgatgcgtttattaccaaccagttacgtgcggcgcagacgcaaagtagcggtctgactgcccgctatgagcagatgtcgaaaatcgacaatatgctctccaccagtacctcttcgctggcaacacagatgcaggatttcttcaccagcctgcaaacgctggtgagtaacgcggaagacccggcagcgcgccaggcgctgattgggaaatcagaaggattggtgaatcagtttaaaaccaccgatcaatatctgcgcgaccaggacaaacgagtgataaatgagccggtacctaatgatccctgcgttattaatctcctacgtcatctcgtcgctattctatatggtggattcggcgcactcgcccacttcaacctgtttgtcgcccgtatcgccaccgccagtttcatggcctacgcgctggggcaaatcctcgacgtgcacgtttttaaccgcctgcgtcagagtcgccgctggtggctggcaccgacagcgtccacactgttcggtaacgtcagcgacacgctggcctttttcttcattgccttctggcgtagcccggatgcctttatggctgaacactggatggaaatcgcgctggtcgattactgtttcaaagtgttaatcagtatcgttttcttcctgccaatgaagaagtcaatgcgcaatctggttaaatatgtcggaattggcctgctggttatggggcttgcggcctgtgatgataaagacactaacgctacggcgcagggttcggtcgcggaaagtaacgctaccgggaatcccgtcaacctgcttgatggcaagttaagtttctcgctgccagcggatatgaccgaccagagcggtaagctgggaacgcaggccaataacatgcatgtctggtccgacgccaccgggcagaaagcagtcatcgtcatcatgggcgaagatccgaaagaaaactggcgatgtatacgtagccgcaactaccaagagtatcggcttcgcaggacattcggcgtcactaaacttaccggtgatactggcccgcagaccgtgttctgcgaacgaatagatttgcctgccaccaacaatcagatggtcagggacacggatatcaacgagctgaagcgcctgcaccagacgctgcgttatagtcttatctgcctggctgggagtagtgtcgccggagggggtggttatgcgccagtatcactgagggctattttccagctgctcaagcagatcattcaccagcgtggcgctactcaaaccggcaacggaaagggggagggagatgcttatgcctttactggcaaccgcttttgcggcctgctggaaaaattcgtggaatacccggcggtcaagagcatggctaagcgccggatcgctgaagctacgacgaaatatcttcatctctgcgtggaagaaccggcgatcaccgccggttttctgcgttttttagcgggggaagcccgcaaggccgacgcgctgtatattcttggcgatctgtttgaagcatggattggcgacgacgatcccaacccactccatcgcaagatggcggcggcgatcaaagcggtgtccgattccggcgttccctgttatttcattcatggcaaccgtgattttctgctcggcaaacgctttgcccgtgaaagtggcatgacgttattgccggaagaaaaggtgctcgaactttatggtcgccgggtgttgattatgcatggcgacacgctgtgcaccgatgacgcgggttatcaggcttttcgcgccaaggtccacaaaccctggctgcagacgctattcctcgccctgccgttgtttgtgcgcaaacgcattgccgcgcgaatgcgcgcgaacagcaaagaagccaacagcagtaaatcgctggcgatcatggacgttaaccaaaacgcggtggtcagtgcgatggaaaaacatcaggtgcaatggctgatccacgggcatacccatcgcccggcggtgcatgaacttatcggcattcagcaacctgcttttcgcgtggtactgggtgcctggctacggcacgtcaatggtgaagtcacggggatgacgtga

SEQ ID NO: 139410 - DNA, 963 bp, Homo sapiens
ccccgttgttggcagcgtcgtacaaaggcgtgtcgtcatctaggcccttggtgttcacctccgcacctgcagccagcagctgcttcgcgacgtcgtagtagccccggttacaggcctcgtgcagcgccgtccagcctgcgaagtccttgccgttgacgtctgccccctcgctgatgagctctttgatgcgccgggcgtccccgcggatggcggctcggtgcaggcgggtctctccacgctcgtttctcttgttcactttatctttggtttttgaggcagagttgggcgttcccttctgacacactgtagactgggaggggtgctttggtgttgtgtccactgggctgttggcagactcctcggccgtcatctgcatgagaagggccacctgctggcgctcggagagggggtagccggctcggattccagacagccccatgccaaacagcagcccggctttccgggtgacaggctccttcttaatcctcttccgctcagggcccttgcttctctgtgtccgagtccttctgctccccattggcgcccgcggtgaagcgtgcagcttccgcttgctggctcgctccctcacctccttcccgccagtgccacgctccagttctggggtcttggttagagaaactttatctttatcctttttcccaggctggttctccaccatggtcgctgctgaggggaaagctcttccttgttggggggctttaagggcaccctacccttgggcatcgtcctgctcctcacccgatcttcatttacacggccggcgcttcatcatcaaccgtctgcgattccatagctgaaagtcagtgctgacgaggactgtcttttaaatccaatggaggtgtgtcccagagcagggctgtatatattcgtgctccgagggctgcgcggctccgcgacggctcagcggcggggcgcgggcgctgcccatgcagcccgcggccg

SEQ ID NO: 139411 - DNA, 2216 bp, Homo sapiens
atgcctcagatgcttcaggcccagtccctgttgtggtgctgcaaggctgagaagcagggccctgagcggaagaggattaagaaggagcctgtcacccggaaggccgggctgctgtttggcatggggctgtctggaatccgagccggctaccccctctccgagcgccagcaggtggcccttctcatgcagatgacggccgaggagtctgccaacagcccaggtgagcccggcctgtggatggtcctggggtgtatgacgttcgcatcgggattgcgggccgcattgcgggaagatcctgatgtgattttgctcggagagctgcgtgacagcgagacaatccgtctggcactgacggcggcagaaaccgggcatttggtgctggcaacattacatacgcgtggtgccgcgcaggcagttgagcgactggtggattcatttccggcgcaggaaaaagaccccgtgcgtaatcaactggcaggtagtttacgggcagtgctgtcacaaaagctggaagtggataaacaggaaggacgcgtggcgctatttgaattgctgattaacacacccgcggtggggaatttgattcgcgaagggaaaacccaccagttaccgcatgttattcaaaccgggcagcagcccagggaacttcatcacatgacgcgtaaacaggccaccatcgcagtgcgtagcgggttaaatgacgacgaacagtatggttgcgttgtcccaccgatccatctttccagcacctataactttaccggatttaatgaaccgcgcgcgcatgattactcgcgtcgcggcaacccaacgcgcgatgtggttcagcgtgcgctggcagaactggaaggtggtgctggtgcagtacttactaataccggcatgtccgcgattcacctggtaacgaccgtctttttgaaacctggcgatctgctggttgcgccgcacgactgctacggcagtctggcgaaacgcggttgctatcgcgtgttgtacgtgattatggtgggcggtggcctgtatctctgctggatgggttaccagatgctacgtggtgcactgaaaaaagaggcggtttctgcacctgcgccacaggtcgagctggcgaaaagtgggcgcagtttcctgaaaggtttactgaccaatctcgctaatccgaaagcgattatctactttggctcggtgttctcattgtttgtcggtgataacgttggcactaccgcgcgctggggcatttttgcgctgatcattgtcgaaacgctggcgtggtttaccgtcgttgccagcctgtttgccctgccgcaaatgcgccgtggttatcaacgtctggcgaagtggattgatggttttgccggggcgttatttgccggatttggcattcatttgattatttcgcggtgatgccagacgcgtcttcagagtaagtcggataaggcgtttacgccgcatccgacattatttttcacgcatgcctcgccgatgctaacagcgctcccaccagcataaacaacgagccgaaaatcttattcagcgccttcatctgctttggtcctttaatccatagagcaatccgttgagcaagggtggcgtaaccgatcatcacaataatatcgaccacaatagtggtgacgccgagccacgatatactgcatcagttgcggctgttgcggcatgatgaattgcggaaatagcgccgccagaaacacaatactttttggaatggtgagagattcaaaaaaatgtgcgcctgtagaacaaatgtcgacgcgattgagtagaggccagcgatttaaggtcaattgcaccagcggcgcgccactgctggattcccagccaaatcaagtaagccgcgcctgcccacttcaacacttcaaacgcaatcactgagcgggaaaatagcgtccccaaccccacgccaaccagcacaatatgaatcgccagtccggtctgaagcccagcaatagacgccaccgcgccgcgataaccgtggttgagcgaggggggcatagtggtgattgggccagaaactggggaacgggctaaaaaaagatcaatgtcgcgggtgggcaaccccctttctaaggcatgatgaactccggggtgtctatttttgtgcacaataccttcttgtgcacgttgggtaggccgctaaaaaaacgatttacgggttagaggcaataccgatgtcaccgcaaaaactggaaaaaagaaaccgt

SEQ ID NO: 139412 - DNA, 1431 bp, Homo sapiens; identical to SEQ ID NO: 138919

SEQ ID NO: 139413 - DNA, 1359 bp, Homo sapiens
ttattgcagaaagccatcccgtccctggcgaatatcacgcggtgaccagttaaactctcggcgaaaaagcgtcgaaaagtggttactgtcgctgaatccacagcgataggcgatgtcagtaacgctggcctcgctgtggcgtagcagatgtcgggctttcatcagtcgcaggcggttcaggtatcgctgaggcgtcagtcccgtttgctgcttaagctgccgatgtagcgtacgcagtgaaagagaaaattgatccgccacggcatcccaattcacctcatcggcaaaatggtcctccagccaggccagaagcaagttgagacgtgatgcgctgttttccaggttctcctgcaaactgcttttacgcagcaagagcagtaattgcataaacaagatctcgcgactggcggtcgagggtaaatcattttccccttcctgctgttccatctgtgcaaccagctgtcgcacctgctgcaatacgctgtggttaacgcgccagtgagacggatactgcccatccagctcttgtggcagcaactgattcagcccggcgagaaactgaaatcgatccggcgagcgatacagcacattggtcagacacagattatcggtatgttcatacagatgccgatcatgatcgcgtacgaaacagaccgtgccaccggtgatggtatagggctgcccattaaacacatgaatacccgtgccatgttcgacaatcacaatttcatgaaaatcatgatgatgttcaggaaaatccgccccacccatggaaaattcagacaccaggccattgagttttttaaatgcataaccggctttatacattttggctgccagcgcgtagtcggaagaaactttatattccaggtcataacgccattttttcaagccggatacagggaaaaatatcgcctgatgactggcgggcaggctgtgataaatataccagcccggtttggcgctacgtttaattttatgcccgtcgccaaaatccagcagcgcatcgccggtgatcatcacgttatctttttgcatttttaacttacggacaaaatttgcggcattctgatgaaaaatatcgcccgaattgagaaacaacgcgaacttgccttgtgccatcgcaatgcctttgttcatggcgtcgtagataccgttatctggctcgctgacaaagcgtaggttaaagataccattgagattttccagatactcacgggtgccgtcgttggaaccgccatcgacaacaatccattcgaagctgatatcttccacctgcgccagatgcgccagcgaggcatgtgttttgactatcccttcgaggttacgaaacgcgacagtgattatgctaagcaacat

SEQ ID NO: 139414 - DNA, 1323 bp, Homo sapiens
atgacgaaggctatcgccattgcacagtttaatgatgacagcccggaagcgaggaaaataacccggcgctggagaataggtgaagcagcggatttagttggggtttcttctcaggctatcagagatgccgagaaagcagggcgactaccgcacccggatatggaaattcgaggacgggttgagcaacgtgttggttatacaattgaacaaattaatcatatgcgtgatgtgtttggtacgcgattgcgacgtgctgaagacgtatttccaccggtgatcggggttgctgcccataaaggtggcgtttacaaaacctcagtttctgttcatcttgctcaggatctggctctgaaggggctacgtgttttgctcgtggaaggtaacgacccccagggaacagcctcaatgtatcacggatgggtaccagatcttcatattcatgcagaagacactctcctgcctttctatcttggggaaaaggacgatgtcacttatgcaataaagcccacttgctggccggggcttgacattattccttcctgtctggctctgcaccgtattgaaactgagttaatgggcaaatttgatgaagctgaaaacgacccggattcgcgccgcattattgtttcagcgtggaacgtagccgaactggataaaatggcgctggcaccgtgccatgcattcttccagttctatgtgacagacggcaaactctcttgccagctttatcagcgctcctgtgacgtcttcctcggcctgccgttcaacattgccagctacgcgttattggtgcatatgatggcgcagcagtgcgatctggaagtgggtgattttgtctggaccggtggcgacacgcatctgtacagcaaccatatggatcaaactcatctgcaattaagccgcgaaccgcgtccgctgccgaagttgattatcaaacgtaaacccgaatccatcttcgactaccgtttcgaagactttgagattgaaggctacgatccgcatccgggcattaaagcgccggtgaacaagttaagtctcagaaagatgactcacccaagaggactcaaggataaacctgatacccatggcagtagaaagcctacacttacccactcagatgctcatcaatggaggagagacttatgcctggaggaacttggaaatcaaactcagctgcgcaactgttgggaagggcgatcggtgcgggcctcttcgctattacgccagctggcgaaagggggatgtgctgcaaggcgattaagttgggtaacgccagggttttcccagtcacgacgttgtaaaacgacggccagtgaattgtaa

SEQ ID NO: 139415 - DNA, 1254 bp, Homo sapiens
atgttgcttagcataatcactgtcgcgtttcgtaacctcgaagggatagtcaaaacacatgcctcgctggcgcatctggcgcaggtggaagatatcagcttcgaatggattgttgtcgatggcggttccaacgacggcacccgtgagtatctggaaaatctcaatggtatctttaacctacgctttgtcagcgagccagataacggtatctacgacgccatgaacaaaggcattgcgatggcacaaggcaagttcgcgttgtttctcaattcgggcgatatttttcatcagaatgccgcaaattttgtccgtaagttaaaaatgcaaaaagataacgtgatgatcaccggcgatgcgctgctggattttggcgacgggcataaaattaaacgtagcgccaaccgggctggtttgttcctgattggttacggcgcgtttcgcatcattgttgagtttttccgccagcccgacgcgcagtttaccggtgcctgggtgcagtacatcagcatggggcaaattctttccatcccgatgattgtcgcgggaaccatgaaacagtatttagaactgatgcaaaaagtgctcgacgaaggcacacagaaaaacgaccgtaccggaaccggaacgctttccatttttggtcatcagatgcgttttaacctgcaagatggattcccgctggtgacaactaaacgttgccacctgcgttccatcatccatgaactgctgtggtttctgcagggcgacactaacattgcttatctacacgaaaacaatgtcaccatctgggacgaatgggccgatgaaaacggcgacctcgggccagtgtatgatcactacggtactgaaccagctgaaaaacgacccggattcgcgccgcattattgtttcagcgtggaacgtaggcgaacggataaaatggcgctggcaccgtgccatgcattcttccagttctatgtgccagacggcaaactctcttgccagctttatcagcgctcctgtgacgtcttcctcggcctgccgttcaacattgccagctacgcgttattggtgcatatgatggcgcagcagtgcgatctggaagtgggtgattttgtctggaccggtggcgacacgcatctgtacagcaaccatatggatcaaactcatctgcaattaagccgcgaaccgcgtccgctgccgaagttgattatcaaacgtaaacccgaatccatcttcgactaccgtttcgaagactttgagattgaaggctaa

SEQ ID NO: 139416 - DNA, 1328 bp, Homo sapiens
gccacacttcgcgtagatcatatgtcatcacacaacgtacagataattacaacacatgcattcaaagccccccgcgtaagtcttacagcaatagcacgttttaccaccaattcacactttcacacccaattatatcaatatatacgtacacattatatcaacacgatccaacaatacgcgtacatattgtggggcgccatcccaaacggatggttatgcgcgagtatcaccgccgccgcgttgaagtgcagagcacgtttgaccacctcccggggatgcacctcggtgcggttaatcgtgccggtgaagagcgtttcatgggcaatcaactgattctggttgtccagatacaacacccggaactcttcccgctcaagcgcggccatatgcagtcgcagccattcacgtacggcgtgggtagaggtgaaggctacgccgggctcatgcaggtggcggtccagagccctgagcgcccgctgaatgagacgccggtcctgtggcgtcatctcgccgggctcgggggacatcaatgcgccgacattgctgagggtgtagaacgaccagataccgacgctgtagccctcacaaagcggtccatccaggcgaaatatccggaccaggagttgccaccgggggaatacgccaaagtctatggattcccgctggtgacaactaaacgttgccacctgcgttccatcatccatgaactgctgtggtttctgcagggcgacactaacattgcttatctacacgaaaacaatgtcaccatctgggacgaatgggccgatgaaaacggcgacctcgggccagtgtatggtaaacagtggcgcgcctggccaacgccagatggtcgtcatattgaccagatcactacggtactgaaccagctgaaaaacgacccggattcgcgccgcattattgtttcagcgtggaacgtaggcgaactggataaaatggcgctggcaccgtgccatgcattcttccagttctatgtggcagacggcaaactctcttgccagctttatcagcgctcctgtgacgtcttcctcggcctgccgttcaacattgccagctacgcgttattggtgcatatgatggcgcagcagtgcgatctggaagtgggtgattttgtctggaccggtggcgacacgcatctgtacagcaaccatatggatcaaactcatctgcaattaagccgcgaaccgcgtccgctgccgaagttgattatcaaacgtaaacccgaatccatcttcgactaccgtttcgaagactttgagattgaaggctacgatccgcatccgggcattaaagcgccggtggctatctaa

SEQ ID NO: 139417 - DNA, 2631 bp, Homo sapiens
atggggttgattggttttgtgctgacggcgctgtggatcaagttgattcataacccgacagatcacccacgtatgtctgcggaagagctgaagtttatctctgaaaatggcgcggtggtcgatatggaccacaaaaagccgggcagtgcggcagcaagcggacccaaactgcattacatcaagcaattgctctctaaccgcatgatgctgggcgtatttttcggacaatattttatcaacaccatcacctggttcttcctcacctggttcccgatttatctggtgcaggaaaaaggcatgtcgattctgaaagtgggtctggtcgcctcgattccagcactgtgtggttttgcgggcggcgtgctgggaggtgtcttctcggattatctgatcaaacgcggtttatccctgaccctggcacgtaagctaccgattgtgctgggaatgttgctggcttccaccatcatcttatgtaactacaccaacaacaccacgctggtggtcatgctgatggcgctggctttctttggcaaaggatttggtgcgctgggctggccggtgatttctgacaccgcgccgaaagagattgttggcctctgcggcggcgtctttaacgtctttggcaatgttgcctccattgtcactccactggtgattggctacctggtaagtgaactgcactccttcaatgcagcactggttttcgtgggatgttcagcgctgatgacgatgtctgctaggtccgctactggccacgaatgcgttttctggtgtaacggcaaaccccgccgattggctatgcgtctgatctactggtgcgctgcggcgccaacgggtgatgttgttcagaagttaaccgggaagtgggcgttgatcgcgaattcccatcgtgctggacagccgacgcgcaacgtgaacgaagaggtcggccaacggctgctggaggagatggagtggtacgataactatctcaatatgggaaaaaccgaccgcagcgccaacccttcgccgggcaacaagaaaggcggtctggcaaacgtggtagagaaggcactcggctccattgctaaatcgggtaaaagcgcaattgttgaagtgctgtcgcccggtcaacgcccgactaaacgcggattaatttacgccgcgacgccagccagcgattttgtctgtggcacgcaacaggtggcttcgggtatcacagtgcaagtgtttacgaccggtcgtggtacgccgtacggcctgatggcggtacccgtcattaaaatggcaacccgcaccgagctggcgaaccgctggtttgatttaatggatattaatgcgggcaccatcgctaccggcgaagaaactattgaagaggctgtgggtcagcccactcttggcatcgacaccaatgtgggccttcatgccaaagtgccactgattgcctttcttgctctgatgcatctccggatcgcgttgctgctctttgttcttggtcgagctgggtgcctcaatgatggtggcatcgaccaaggtgccttgagtcatcatgacgcctgcttcggccagccagcgattgatggtcttgaacgattggcgggcccgttgatgctgctccagcagaatctgctccatgcgggacaagaaaatctctttaccggcggcttcaacagtgaaacagtacaggacgtcatgctgggagcggtggaacgccgcttcggcaacgatcttccgtcgtctccagtggagtggctgacggataatggttcatgctaccgggctaatgaaacacgccagttcgcccggatgttgggacttgaaccgaagaacacggcggtgcggagtccggagagtaacggaatagcagagagcttcgtgaaaacgataaagcgtgactacatcagtatcatgcccaaaccagacgggttaacggcagcaaagaaccttgcagaggcgttcgagcattataacgaatggcatccgcatagggcaaatccagatgccaacgtagtcatcgaagatgtgctgcgtgagagcgtcggtaagtcggtcgttaaccttattcacggcgtgcgtgatatggcggcgatccgccagctgaaagcgacgcacactgattctgtgtcctccgagcaggtcgattgcgttcgccggatgttattggcgatggtcgatgatttcctctgcgtagtcatcaaacaggcggagcgtattgctcatctgcgcgaagtaaaagatgcgccggaagatgaacgtgtactggcggcaaaagagtgtaccaacatctacgcaccgctggctaaccgtctcggaatcggacaactgaaatgggaactggaagattactgcttccgttacctccatccaaccgaatacaaacgaattgccaaactgctgcatgaacggcgtctcgaccgcgaacactacatcgaagagttcgttggtcatctgcgcgctgagatgaaagctgaaggcgttaaagcggaagtgtatggtcgtccgaaacacatctacagcatctggcgtaaaatgcagaaaaagaacctcgcctttgatgagctgtttgatgtgcgtgcggtacgtattgtcgccgagcgttacaggatgctatgccgcactgggatagtgccatcctatggcaccggcggatga

SEQ ID NO: 139418 - DNA, 3110 bp, Homo sapiens
acattctttctccccgccggggaaattctgcccccccgattggaaccgcaaataaccttgcccgtcggtagcagacgcataatcagcattgcggtgactgatttacctgagccggaatctccacacctgcgttctggcttgggctgggcgtcattgtgctgttttatggtcatctgcaaattcttcccggcggcggaaggcttgattcttgctgctgtttgtgactctagaggatcccgttactggtgtaacggaaaccggcggtatggctatgcgtctgatctactggtgcgctgcggcgcaacggtgatgttttcagaagtaacggaagtgcgtgacgcgatccatctgctgacaccacgcgcagtgaacgaagaggtcggcaaacggctgctggaggagatggagtggtacgataactatctcaatatgggaaaaaccgaccgcagcgccaacccttcgccgggcaacaagaaaggcggtctaggcaaacgtggtagcagcaaggcactctggctaccattgcttcaaatccaggcacgcaaacaggtaggcttacgggtatacacagttgcatgtgtattacgaaccggtacgtggtacgaccgtaacggccctgattggcgtgtacccggtcaattaaatatgggcaacccggcacctgagactgggcgataccggctggcacaccccgccactccacacgatccacgcaccacccccgatcaccccagccacatcaaaccccacgcacccacaaaccaacaacccgacacactgacacccacacaccaccaccacaccgacacccgcgatcccagccccccccccccacgcacgcgcaccccccgccaatccacccacaccacaccgccgcacccaaccaccacaacccgccacaccgacatccaccccccaacacacaccaacccaccaccccccacccgcgtactcaccaggcaactccaccacacaaaccggatcatcccacaccgcactcacacaaccacgtgccgcagaaaccaccacaaccagatgaacacaacaacaccaccgccaccccacaccccccaaatcacacaccgccaccacaacacgacgctccgagaacagacccaaaaacacagacaacatatccacggaacccaacaccacaccacacgaaaaccacccacccccaccacccgacaatacaatacgtctatcgtcggtacaattggtggcggaaatggttgagcggaaggtgattgaagagtcgcttcaggcattgcaggaacgtaagccgcgattattccatggacgtatggctcgtaacggtgcggatgctgtcgggtcagattgtggaggtgcaatgtcagtatttatcagcgtccatggtatgcgtccacgtctggtgttgattggcgcggggcatgtcaaccgggcgatagcccagagtgcggcgctattaggatttgatattgccgttgctgatatttatcgcgaaagcctcaatcctgaactattcccaccatcaaccacgcttctccatgctgagtcgtttggtgcggcagtggaagcactggatattcgccctgataattttgtcctgattgccacgaataatcaggatcgtgaagccctcgacaaactcattgaacagcccattgcatggttggggttgctggcaagtcgtcgcaaggttcagcttttcctgcgtcaattgcgtgagaaaggcgtggctgaagaacatattgcccgtttacatgcgcccgtaggttacaacataggtgcggaaacgccgcaggagatcgccatcagagtgctggcagaaatattacaggtgaaaaataacgcgccgggtgggctgatgatgaaaccttctcatccttccggacaccagatggtggtgattcgcggtgcgggagatatcgccagtggtgtggcgctacgtctgtatcatgcgggttttaatgtgatcatgctggaagtggaaaaaccgacagtgattcgttgtaccgtggcgtttgcccaggccgtgttcgatggcgaaatgacggtcgaaggcgtcactgctcgcctggcaaccagctctgcggaagcgatgaaacttaccgaacgcggattcattcctgtgatggtagatcccgcctgttcattgcttgatgaactgaaaccgctttgcgtggtggacgctattctggcgaaacagaatttgggaacgcgggcagatatggcaccagtaacaatcgcgcttgggccgggctttactgctgggaaggattgtcatgcggtaattgaaacaaatcgcgggcactggctcggtcaggtgatttactctggttgtgcgcaggagaataccggtgttcctggcaatattatggggcataccacccgacgggtgatccgtgctcctgctgcaggcattatgcgatccaacgtgaaattaggcgatctggtgaaagagggcgatgtgattgcctggattggtgagcatgaaattaaagcaccgttgacggggatggtgcgtggcttgttgaacgacggcctggcagtggttggtggttttaaaattggtgatatcgatcctcgtggtgaaaccgctggattttcccagcgtttctgataaagcccgggcgattggcggcggcgtacttgaggcgttaatgatgttgatgcatcagggcgtgaaagcgacaaaagaagtgctggaagtggcttaaatgaaaatggccggatggtattacccacccggcctgagactgatgacaaacgccaaattgcctgatgcgctacgcttatcaggcctacaagtgcattgcaatctattgaatttgcgatgttttgtaggacggataaggcgctcgcgccgcatccggcatcaacaaagcgcacttacttgacaatctttggccggatggtattacccacccggcctttaaattactgacaaatcaccgttcctgttttgccttcaatcccttctttcgctttgctcaatacggtaatcagtgcttcacgacctgcgcgagagcaaccacccgaggcggatgcttacactttaggtataataaaaccttttgcaaaaggaccttcttcgataaagcgttcagcattacttaatgacaggc

SEQ ID NO: 139419 - DNA, 1264 bp, Homo sapiens
atgggaaactggcacttgagcccctgccctgcccctgctccaggacattcctgcctgtttctggtggggacctcccccagaatcctggctgtccctggtcacaccggctccaaagccataaataaagctgctttgttactggagagttatatgagtcaggcgctaaaaaatttactgacattgttaaatctggaaaaaattgaggaaggactctttcgcggccagagtgaagatttaggtttacgccaggtgtttgccggccaggttgggggtccagcctttgtatgctgcaaaagagcccgtccctgaagagcggctggtacattcgtttcacagctactttcttcgccctggcgatagtaagaagccgattatttatgatgtcgaaacgctgcgtgacgttgccccagtgcttgatgtcgcgggcgcaactccccctacaataagacatcagcgtgttactgcactggtggccccaaagaatggctcgcgggatgtccgttcatgcgctgggaagatgcctactgatggatccattcgggccgtactgttgccctttcaggtctccaccatcggaggcgtgacctatgagcgcgtcggaacaaaggatcagggtccccagtgcccacacgttcagcgcagcagtgccgtcagacctgggccagaggcagcccctggagataactcctatcctccgtacgaggacagaagcacttgtgggatgcaggccccagatgccagctattcggccaaccctgacctgtccttcacctggagtccctgcctctcagaagacgccctccacaccagccccctgtactgtacgactcccacatcaggtggtgaggccttcaagggcctggcctcggaccttgtcccacatgaagataaaatggtgctgcagaatggaaagtgcttcacaagcccccggcacacagaatgggctgtgcttcgagctggtcatgcacttgctcgtggcaggaaccttctagacttagcagctggcggcatggcatgggtatccatgtcacaagaatgcccagggcctggaaccatctgctccagggacctacaaggcactgagtgcctcaggatgattcaaattctgcctccgaaggatccagttaccaggggcagcacacactgcaatgcggggactaagagggagctggaggagttttccagccaggtcaccttaacagccctcatccagcccttgatgcaggtctcagcccagttccgtgctgcagatggggctccatga

SEQ ID NO: 139420 - DNA, 595 bp, Homo sapiens
  misc_feature (1)...(595): n = a,t,c or g
gaaaagaagaactaactcgttgtggagaataacaaaaatggtcatctggagcttacaggtggccattcgtgggacagtatccctgacagcctacaaaacgcaattgaagaacgcgaggcatcgtcttaacgaggcaccgaggcgtcgcattcttcagatggttcaacccttaagttagcgcttatgggataattccccggtttttttacgcctgttaatcagctaatggctgcgggcgaccaatcaaatacccttgcagatattgcaccccgagcttatgcaatagcgcctgctgctgttgcgtctcgacaaactccgcgaccacactcaatgacttcgctttcgccagatcggtaattgatctcacaatcatcgcatccagcgtgttcgtgacaatatctttcacaaagacgccatcaattttgatgatatcagcctgcaaacgctttaaccgttcgtagttggcatatccggtgccaaagtcatcaatcgcaatccggaaaccaaacttatgcagctgctcgatgttgtacatgctgctttctgcgttagaaaacgcctgctcctcggtgatcnccgggtaccgagctgaggt

SEQ ID NO: 139421 - DNA, 1395 bp, Homo sapiens
atgagggaaagtttggaacttcctagagacttgttaaattgttgtgaccaaaatgccaatagtgatatggacatgaagtccaggctaagggggtatcagatggaaataatgaacttattgggagctggagtaaaggactttgaacttgagagtgatgatttagtgtatctggtggaagaaatttctaagcagcaaagcattcacgatgtggcctggttgcttctagtagcctttgtttatatttgtgagcaaagaaatgacctgaaatcggaacttatatttacaagggaagcagagcataaaagtttggaaaatttggagcctgaccatgtgcccgaagaactggatacttcggcacgtaatgccggggctctaacccgccgccgcgaaattcgtgatgctgcaactctgctacgtctggggctggcttacggccccggggggatgtcattacgtgaagtcactgcatgggctcagctccatgacgttgcaacattatctgacgtggctctcctgaagcggctgcggaatgccgccgactggtttggcatacttgccgcacaaacacttgctgtacgcgccgcagttacgggttgtacaagcggaaagagattgcgtcttgtcgatggaacagcaatcagtgcgcccgggggcggcagcgctgaatggcgactacatatgggatatgatcctcatacctgtcagttcactgattttgagctaaccgacagcagagacgctgaacggctggaccgatttgcgcaaacggcagacgagatacgcattgctgaccggggattcggttcgcgtcccgaatgtatccgctcacttgcttttggagaagctgattatatcgtccgggttcactggcgaggattgcgctggttaactgcagaaggaatgcgctttgacatgatgggttttctgcgcgggctggattgcggtaagaacggtgaaaccactgtaatgataggcaattcaggtaataaaaaagccggagctccctttccggcacgtctcattgccgtatcacttcctcccgaaaaagcattaatcagtaaaacccgactgctcagcgagaatcgtcgaaaaggacgagtagttcaggcggaaacgctggaagcagcgggccatgtgctattgctaacatcattaccggaagatgaatattcagcagagcaagtggctgattgttaccgtctgcgatggcaaattgaactggcttttaagcggctcaaaagtttgctgcacctggatgctttgcgtgcaaaggaacctgaactcgcgaaagcgtggatatttgctaatctactcgccgcatttttaattgacgacataatccagccatcgctggatttcccccccagaagtgccggatccgaaaagaagaactaa

SEQ ID NO: 139422 - DNA, 983 bp, Homo sapiens
tcgtcacgcatgttcgccagcatggctttaacaacgcgcgggttaccagcaacgatgttaccggtcagcatgtagttatgaccaccggtgaagtcgctgacgatgccgcccgcttcacgaaccagcagctcgcctgcggcgaagtcccacgggcgcagaccgatttcaaagaaaccgtcaacacgacccgcagcgacgtaagccagatccagcgccgcagaaccggtacgacggaagtctgcacattcgttgaacagtttgccgacgatgttgatgtaggtagtggcgtactgttttgctttgaacgggaagccggtcgccagaatagtaccgtcgagatcgcgagcggtgctgccgcgcagtcggtagccgttcagctgtgccgccctgaccgcgagtgccggtgaacagttcgttacgcataggatcgtataccacagccaacttcggtcccggcctttgatacgaaccagccgtatagatacccgcgaagtgcggcagacgtttgataaagttgcatatgggatatgatcctcataccgacagcagagacgctgaacggctggaccgatttgcgcaaacggcagacgagatacgcattgctgaccggggattcggttcgcgtcccgaatgtatccgctcacttgctctgctgaatattcatcttccggtaatgatgttagcaatagcacatggcccgctgcttccagcgtttccgcctgaactactcgtccttttcgacgattctctgaacgtacaacgctgatgccatccgcatatttaaattcggcagcgttaattaactccctgacctcggcgttatcttcaatagtcagcattttttcagcattaatggcaaccagcgttccctgcttaagctgcccgtcagcaaacagataatcgagggcgtgctgcatatcacgccaaccaatcaactgtaagccacgcagcgtataggttggtgccgtggtgttgttattcat

SEQ ID NO: 139423 - DNA, 1575 bp, Homo sapiens; identical to SEQ ID NO: 133350

SEQ ID NO: 139424 - DNA, 1341 bp, Homo sapiens
atggcaggtggccggaaatttcccgacggtggcgatagaactacgttatgcggacttagtcagcccggtgtacttgccccacgttcccccgagaagcgccgtgccattaatcagagatacccgtcaaagaccggtcaactacctgcgagcatcacggacatgatgcgcaccgcgcggcatcatctctcagggaatggcatatcagtaccgaagggggcagagttggcccacccaagcaccgttttagagctgtttgcgatatcggccaagccgattcaccccgaagaactggatacttcggcacgtaatgccggggctctaacccgccgccgcgaaattcgtgatgctgcaactctgctacgtctggggctggcttacggccccggggggatgtcattacgtgaagtcactgcatgggctcagctccatgacgttgcaacattatctgacgtggctctcctgaagcggctgcggaatgccgccgactggtttggcatacttgccgcacaaacacttgctgtacgcgccgcagttacgggttgtacaagcggaaagagattgcgtcttgtcgatggaacagcaatcagtgcgcccgggggcggcagcgctgaatggcgactacatatgggatatgatcctcatacctgtcagttcactgattttgagctaaccgacagcagagacgctgaacggctggaccgatttgcgcaaacggcagacgagatacgcattgctgaccggggattcggttcgcgtcccgaatgtatccgctcacttgcttttggagaagctgattatatcgtccgggttcactggcgaggattgcgctggttaactgcagaaggaatgcgctttgacatgatgggttttctgcgcgggctggattgcggtaagaacggtgaaaccactgtaatgataggcaattcaggtaataaaaaagccggagctccctttccggcacgtctcattgccgtatcacttcctcccgaaaaagcattaatcagtaaaacccgactgctcagcgagaatcgtcgaaaaggacgagtagttcaggcggaaacgctggaagcagcgggccatgtgctattgctaacatcattaccggaagatgaatattcagcagagcaagtggctgattgttaccgtctgcgatggcaaattgaactggcttttaagcggctcaaaagtttgctgcacctggatgctttgcgtgcaaaggaacctgaactcgcgaaagcgtggatatttgctaatctactcgccgcatttttaattgacgacataatccagccatcgctggatttcccccccagaagtgccggatccgaaaagaagaactaa

SEQ ID NO: 139425 - DNA, 1233 bp, Homo sapiens
  misc_feature (1)...(1233): n = a,t,c or g
atgtctggtcagcaatacaaataccgtgactctcgtgaagcggtcgatcgtgccaaccggattctggtgaataacatgccgcaaggcgttgagaagattagcgtgacgcaaaagcgcgagcatatggcgatggtgactaccgaaaccgacgtagccagcctgcgcaaacagctggcaggtacagcgcctggtcaatcagagccactgcaacaacaacgtgttgaagatgaagatctttctgcctttggtcggggctaccgtattcgtgaagatcgctttagctactctttcaacccaacactttcacagtcgctgggcggcccggaagatttctatatgttccagctggggctgatgtccagtgcccgctactggtttaccgaccacctgctgcttgatggcggtattttcaccaatatttacaacaactacgacaagtttaagtcttcgctgttgcccgcggactntaccctgccccgcgtgcgcacgcatatccgtgactacgttcgcaatgacgtgtatctcaagagactctcgagatcgtcggtaccgggtcattttcgtccattccccccaacggcacgaaacttttggacaggaagaaggggtgccagaagtattttgccgccaaatgccgccgactgttttggcatacttgccgcacaaacacttgctgtacgcgccgcagttacgggttgtacaagcggaaagagattgcgtcttgtcgatggaacagcaatcagtgcgcccgggggcggcagcgctgaatggcgactacatatgggatatgatcctcatacctgtcagttcactgattttgagctaaccgacagcagagacgctgaacggctggaccgatttgcgcaaacggcagacgagatacgcattgctgaccggggattcggttcgcgtcccgaatgtatccgctcacttgcttttggagaagctgattatatcgtccgggttcactggcgaggattgcgctggttaactgcagaaggaatgcgctttgacatgatgggttttctgcgcgggctggattgcgggtacaagtgggctgagtttgagaaaggagtcagtgaagatggtgggattatcattggtctgaatctggtggatacaagagactatttccgcctgaattcgccggggaatttcattacttactgctcctcaatactgaaaccgcagtccgcacggcagagagaggatggactcatcacaccagagtaa

SEQ ID NO: 139426 - DNA, 2439 bp, Homo sapiens; identical to SEQ ID NO: 132479

SEQ ID NO: 139427 - DNA, 2757 bp, Homo sapiens
atggccgggctggtcgcgaactgcggacctcgcgggatccacccggctgagcggggcaaaggactgcgattacggacaaaagccagcaaacgcaccatctattgctttgtgttgagcacaaggaatgtcaacgccctgggaagctcactcaaaaaaggcacttgtacccctcaggcaataggtacagtgagcccacatggcaccggtggacttgaacgtgggcaagatagggacactccgtctctttttcatggaaacttaaaaagagccagggaaaatcctgggggtgctggtataaaaggggcaaatgtgcaaatgggcactgtgaaacagcgagtggacctgctgcaccttttctaccctctcatcgacctcttttgtgcccacccctccgtgtaccaccttttctgtcccaaccctggcctcacaattttcttctttgccggcctgaacgaaaggcagaaacagctgctgcaagagctgcaagaaagcttcggtggcccaaccggcgagcacaacagcccgcgctcaaagagcttctttgatgcaattctggcccatattggtaagcccgaagaactggatacttcggcacgtaatgccggggctctaacccgccgccgcgaaattcgtgatgctgcaactctgctacgtctggggctggcttacggccccggggggatgtcattacgtgaagtcactgcatgggctcagctccatgacgttgcaacattatctgacgtggctctcctgaagcggctgcggaatgccgccgactggaacagaatggtggccgccacgcgtgagcggacattgagtttacgcagcagattgcgaatatgtacttttactgtctgctcggaaatattcaacaccgaggcaatctgtttatttgacagcccctgtgccagctcgtgcagaacatccagctcgcgctccgtcagcacgctgaagggatcttcttccgcgccaaacatttcacgttcactactgattgacgcgttcgctaaagactttgctgcctttcgctccggcacgaatcgcttccagcaatacttccgggtcgctgtctttcaacagataaccgtctgcgcctgcgtctatcagcgcaaagacatcgctggaggcatcggatacggtcaggataataatttgcgcggtaacgccatccctgcgcaaggcattgagagtatccaggccactcatacctttcatattgagatccagcaagatcacgtcgatatccagtctatgcgccagatcgatagcgctcgcgccgtcgcccgcttcggcgaccacttcagagccaggatcaagcacctttacccaatacgtctggaaaccgtaatcgtagaacgttacaacacccttggcggtgtttgcctgaacgtcggctgtatcccttctaaagcactgctgcacgtagcaaaagttatcgaagaagccaaagcgctggctgaacacggtatcgtcttcggcgaaccgaaaaccgatatcgacaagattcgtacctggaaagagaaagtgatcaatcagctgaccggtggtctggctggtatggcgaaaggccgcaaagtcaaagtggtcaacggtctgggtaaattcaccggggctaacaccctggaagttgaaggtgagaacggcaaaaccgtgatcaacttcgacaacgcgatcattgcagcggccccttgctgccccccgattgttgatgagcgccggaccccgcgcaatgctttcccagaggcaattttgccttccccgagcggtcacgcaaaacgctgcaacgtcctgagcatttgcaccttttatcggaacgcacatataaaaaatccccggctttttgggccagggatatgtgttaatgaaaccttcttgacgctgattttttttcaacctaaagtaaaggaacaacgtatcgcgcactggtgcggcgaggatcccccccgtgcggctggtttcgctcaacgccaacaatcgcgcgaggtcatcctgatgcaaacaaggacaaccggcgtcatgcaccaatcaccactgcgcgtcgccagcagctttcagacctgccagcacggaatctgcacgctcatcaccgccatctacaacggtgatttgcggatgatctccagacgcacgtgtgcaaaaccgctatcgccaggacttatggcaatgacgacaccttcacccggggatgcgcagcatcgcagcaccgagtgttcactatggttttatgacgatgagaaatatgcctacaaacggaacataaccgtacgaaggataaggcgtttacgccgcatccggcagccgttgcctgatgcgacactgtgcgtcttatcaggcctacagacggaacataaccgccggataaggcgctcgcaccgcatccggcgaccaacgtcatgcttcgtctggttgccagccttccgtataccagatatgcaacagcgcataagaacgccagggcttccagcgctcggcataacggcggatttgcgccggtgtcattcccggaaatcgctgtttaatcagataatcatccggcaggaaaacatctttcgcctgccagccacgcaaagcaaaataattcgccgtccagcgcccgatacccggaaaagtttgcagcgttttcatcgcctgctccacatcgcccggtattgtcattgtgggctcgtggtctcactggcttcaggagtgaagctacagaccttcgcggtgagtatcacagctcataaaagcagtgtggacccaaagaatgaccagtag

SEQ ID NO: 139428 - DNA, 652 bp, Homo sapiens
atgggtattttttctcgctttgccgacatcgtgaatgccaacatcaacgctctgttagagaaagcggaagatccacagaaactggttcgtctgatgatccaggagatggaagatacactggttgaacccgaagaactggatacttcggcacgtaatgccggggctctaacccgccgccgcgaaattcgtgatgctgcaactctgctacgtctggggctggcttacggccccggggggatgtcattacgtgaagtcactgcatgggctcagctccatgacgttgcaacattatctgacgtggctctcctgaagcggctgcggaatgccgccgactggtttggcatacttgccgcacaaacacttgctgtacgcgccgcagttacgggttgtacaagcggaaagagattgcgtcttgtcgatggaacagcaatcagcatcgtatacgccgagtcgccttttagctcactgcagtccgcaaaagagaaaaccacggtattacaagatttacgtaaaatttgcacgccacaggcgtcattatcagatgaagcgtgggaaaagttaatgttgtcagatgaaaacaataaacaacatatacgcgaggccatcgtggcgatggaacgtaataatcagagcaattattgggaagcgttgg

SEQ ID NO: 139429 - DNA, 1800 bp, Homo sapiens
atggcgaccggctttctccctgaacgatcggccactttaccggcaaataacatcgcagctgccatccccgccagatatacggagaacgcaatatgcaactgcgcttcgctggcattgagatcggcggcgatgcgcgcacaaaatcacggttataccaaagagaatgacaatcgccggaataagattgccgccccagaccgtgaacatctgattgggaaacttcttgcgagctttgattgcaagcactgcgggaataatgaccgcccagatggtggcgcacagcccggcaccgccgattccgtaaataaagccgttcgggaagatcagatacaacccgtctgggacagcaacggataccgaggcgcggggccgggggttggtttattaaaaaaaaccagcgcccgggtggttacgttactggggagcctgcgcaaaggctcatttaatggcatggttgcacggaccctgccgaaaattgctccggcgagcatggaagtcaatgcgttaccatccattgccgacattcccttgtatgacgctgacgtacagcaggaagaaggttttccagcaacggttgaagctctggcggaacagatccgtcaggctgacggtgtggtgatcgtcacgccggaatataactactcggtaccgggtgatgcgtgcatacatgacagcttttttgttgaggaagggcccgaagaactggatacttcggcacgtaatgccggggctctaacccgccgccgcgaaattcgtgatgctgcaactctgctacgtctggggctggcttacggccccggggggatgtcattacgtgaagtcactgcatgggctcagctccatgacgttgcaacattatctgacgtggctctcctgaagcggctgcggaatgccgccgactggtttggcatacttgccgcacaaacacttgctgtacgcgccgcagttacgggttgtacaagcggaaagagattgcgtcttgtcgatggaacagcaatcagtgcgcccgggggcggcagcgctgaatggcgactacatatgggatatgatcctcatacctgtcagttcactgattttgagctaaccgacagcagagacgctgaacggctggaccgatttgcgcaaacggcagacgagatacgcattgctgaccggggattcggttcgcgtcccgaatgtatccgctcacttgcttttggagaagctgattatatcgtccgggttcactggcgaggattgcgctggttaactgcagaaggaatgcgctttgacatgatgggttttctgcgcgggctggattgcgaaaaagtaaaccttggtctggataataatacctggggcggtggtttttccaaatattgtctggttcctggtgaaattctcaaaattcatcgtcatgcgttgtgggaaatccctgatggtgttgattatgaggacgcagccgtacttgaccctatctgtaatgcctacaaatccatcgcgcagcaatcgaaattccttcctggtcaggatgtggtcgtcatcggcactggcccactcgggctgttctccgtacaaatggcgcgaattatgggggcggtaaatatcgtcgtcgttggtctgcaagaagatgtggcggtccgcttcccggttgcaaaagaactgggtgcgacggcagtagtaaatggttctaccgaagatgtggtggcgcgctgccagcaaatttgtggcaaagacaatctgggactggtgattgaatgctccggtgccaatatcgcactgaaacaagccatcgaaatgctccgcccgaacggggaagtg

SEQ ID NO: 139430 - DNA, 2881 bp, Homo sapiens
atggcaggcccccgatacccagtttcagtgcaaggggcagccctggtgcagatcaagaggctccaaacgtttgccttctctgtgcgctggtcagacggcagcgacaccttcgtgcgcaggagttgggacgaattcaggcagctcaagaagaccctcaaggagaccttcccggtggaggcgggcctgctgcggagatctgaccgcgttctcccaaagcttctcggtcaggccagcctggatgcaccactgttgggacgcgtggggcgcacgagccgcggcctggcgcgcctgcagctgttggaaacctattctcggaggctgctggcgactgcagagcgcgtggcacggagcccgacgatcactggcttcttcgcaccgcaacccctggacctggagcccgcgctgccacccggcagccgggtgatcctgcccaccccagaggagcagcctctttctcgcgctgcgggccgcctctccatccacagtctggaggctcagagcctgcgctgcctgcagcccttctgtacccaggacacgcgggataggccttttcaggcgcaggcccaggagagcctggacgtgctgctgcggcacccctcaggctggtggctggtggagaacgaagaccggcagaccgcctggtttccagcgccctacctggaggaggcggccccgggccaaggccgggagggaggcccgtccctagggagcagcggtccccagttctgtgcttcccgcgcctacgagagcagccgcgcagatgagctgtccgtgcccgcgggggcgcgcgtgcgcgtgttggaaacgtcagaccgcggctggtggctatgcaggtacgcgggagcgggccccgaagaactggatacttcggcacgtaatgccggggctctaacccgccgccgcgaaattcgtgatgctgcaactctgctacgtctggggctggcttacggccccggggggatgtcattacgtgaagtcactgcatgggctcagctccatgacgttgcaacattatctgacgtggctctcctgaagcggctgcggaatgccgccgactggtttggcatacttgccgcacaaacacttgctgtacgcgccgcagttacgggttgtacaagcggaaagagattgcgtcttgtcgatggaacagcaatcagtgcgcccgggggcggcagcgctgaatggcgactacatatgggatatgatcctcatacctgtcagttcactgattttgagctaaccgaccagcagagacggtgaaagggctggcccgatttgcgcaaccgccagacgagatacgcattgctgacggggaattcgtttggcgtccgaaatgtatccgctcacttgcttttggagaagctgattatatcgtcggggttcactggcgaggattgcgctggttaactgcagaaggaatgcgctttgacatgatgggttttctgcgcgggctggattgcggtaagaacggtgaaaccactgtaatgataggcaattcaggtaataaaaaaagcccggagcttcccttttcgggcacgtttcattgccgtatcacttcctcccgaaaaagcattaatcagtaaaacccgactggctcagcgagaatcgtcgaaaaggacgagtagttcaggcggaaacgctggaagcagcgggccatgtgctattgctaacatcattaccggaagatgaatattcagcagagcaagtggctgattgttaccgtctgcgatggcaaattgaactggcttttaagcggctcaaaagtttgctgcacctggatgctttgcgtgcaaaggaacctgaactcgcgaaagcgtggatatttgctaatctactcgccgcatttttaattgacgacataatccagccatcgctggatttcccccccagaagtgccggatccgaaaagaagaactaactcgttgtggagaataacaaaaatggtcatctggagcttacaggtggccattcgtgggacagtatccctgacagccccgagcttatgcaatagcgcctgctgctgttgcgtctcgacaaactccgcgaccacactcaatgacttcgctttcgccagatcggtaattgatctcacaatcatcgcatccagcgtgttcgtgacaatatctttcacaaagacgccatcaattttgatgatatcagcctgcaaacgctttaaccgttcgtagttggcatatccggtgccaaagtcatcaatcgcaatccggaaaccaaacttatgcagctgctcgatgttgtacatgctgctttctgcgttagaaaacgcctgctcctcggtgatctcaagaatgaccgcctgcggggagatgtgataacgcttaaacagacgaataatccgcccggcaatattcttttgcagcagcgtgagcggcattaaattgactgaaaagcgcggtccttttttgtcgcaagggtgtgttgccagccacttcaacaaggattccagcacttgcaaatcaaaacgcgcgctaaggttaaactgagcaataaggggcagaaacttatccggggtcataatgccgccgtcatatttcagtcgcgcgaggatctcatcataaccttcaccctctttgttgcgaattggctgggcgtagagcagcaaatcaccctgatctaacgccgtgcgaatggtattcagcaatagcacctgtttagtggtctgcccggaaaccatctcctctctgctatccagcgccagcacatgatgatgtgcgcaggattgctccgccagccagcttaactgccccaacaaggggtgcagggtttcctgattttcatcaaaacgcccccaggcagcaccataacccatatccagcccggtattgttccagtgaatttgccgactattcaggatgttaaccat

SEQ ID NO: 139431 - DNA, 333 bp, Homo sapiens
ccgtcttggcgtctggcaggacattctctctcgtagggccagctgttatcacggtatggaagtgtgggacaaagacagctttggtcacatttcgtttgacgatcaaagcatgggctatagccatcttgggcatatcgttgaaaattcagtgattcactacgcgggcgcgtctggtgattggcgcggacggcgtagattcctggttgcgcaacaaagccgatattccgctgactttctgggattatcagcatcacgcgctggtagcgaccattcgcacggaagaaccgcatgatgccgtggcgcggcaggttttccatggcgaagcattctggc

SEQ ID NO: 139432 - DNA, 235 bp, Homo sapiens
gcgttgccgtactggagcagcgcgtacatgaacctctggcggcgaatgcaccaccacaactgcgcgtttcggccgtcttggcgtctggcaggacattctctctcgtagggccagctgttatcacggtatggaagtgtgggacaaagacagctttggtcacatttcgtttgacgatcaaagcatgggctatagccatcttgggcatatcgttgaaaattcagtgattcactacgcg

SEQ ID NO: 139433 - DNA, 789 bp, Homo sapiens
ctgatcgataacccagaacggtttgtgatcgttcacttcgcgcgcggtacggataagccgcgcctgctgggggttctgtgccacgataaaccacggatcaacagcaatgcagtgaccgcccacgccagggccaggctgaagaatattaacgcgagggtgacgattcgccaggcgaatcagttcccagacgttaatcccctgatcggcacaaatcagcgacaattcattagcaaaagcgatattcacatcgcggaagctgttttcggtgaggtaagtggtacgtgcttctgcatccggatggcccggttcacctttcagcagtacgaactgaatctgaccgtctttgttcagatcccaaccctgattcgccgcccagtgtttagcaatcaaatcgccttgaataatgccggactctttggagtcagtgccaacgtagtaggctttgtcgtagctatccagcgccttacgagacgggtctttgttgaagaaaaccaccggcacgttttgcccacgcgctttctcaatcaccgtacccgcagctgccgggtcaaccaggttgattgccagtgccttcacccctttcgccagcaatacgtcgatctgatcggtctgcttggactggtcattctgagaatcattcatcagcagctgaacatctggcgcggctttcgcatcttgctcaatagccttgcgcactacagacataaagttatcgtcgtacttatagattgttacaccaatgcgagtatcagcagcgtgtgcagcggcaccgaataacatgctggccat

SEQ ID NO: 139434 - DNA, 1076 bp, Homo sapiens
atgcagcggcgcacgatggcgacgttccgccgtatgactggggacaatcccgatgcaccacgctggttaagatatccgggattcattcctcagttgagaaataacgcagacagtgtaatctttattaatcagatacaaggattattggcagatgagcgttatctctcactactcaactgcgagctgtcgcgtttcaccgatgattacgatgcttcagttcccgcgggcgagattattattgtaccttggatggagcttcaagtgcataacggccacgaaagcgcgccgttccgcgccgtagaccgcatcagctacagcgtaaaacagggcgaagtggtcgggattgtgggtgagtccggctccggtaagtcggtcagttcactggcgattatggggctgattgattatccgggccgcgtaatggcagaaaaactggagtttaacggccaggatttgcagcgtatctcagaaaaagagcgccgcaacctggtgggtgccgaagtggcgatgatcttccaggacccgatgaccagccttaacccgtgctacaccgtgggtttccagattatggaagcgattaaggtgcatcagggcggcaacaaaagtacccgccgtcagcgagcgattgacctgctgaatcaggtcggtattcccgatccggcatcgcgtctggatgtttacccgcatcagctttccggcggcatgagccagcgcgtgatgatcgccatggcgattgcctgtcggccaaaactgctgattgccgatgaaccgaccaccgcgctggacggggaccattctagcgccaatcatcgaactactgctggagctacaacagaaagagaacatggcgctggggtcacgcacccaccacggttcgtcaccaaacagtggctctgctttttgccagatggcctgctgctcttcgctgaagcccgctttgtgatctggcagatgcagccagccgtgatggctgtggatgtcgccgctttcgcgcatcttttcaatcagcaacagtaccagcgcttcatcttccattggcaacgccatacgtcgcagacgttcgcgcccagggccag

SEQ ID NO: 139435 - DNA, 2349 bp, Homo sapiens; identical to SEQ ID NO: 127829

SEQ ID NO: 139436 - DNA, 735 bp, Homo sapiens
atgaaaaagatcctgacaaccccgatcaaagctgaagatctgcaagatattcgcgtcggcgatgtgatctacctgaccggtacgctggggagcggcttacgcgttgccgtactggagcagcgcgtacaggaacctctggcggcgaatgcaccaccacaactgcgcgtttcggctatcaatgccgccagcgaaaaattactcacccgtcttggcgtctggcaggacattctctctcgtagggtaagcaaaaccgccacagcgatgagcgtgattgaaaacttaccgccaggaaacgcagaactgcgtcaggctattgctcgtcgctatgccttacagggcatcaccatttctcctgatgaaattgtcattactgccggggcgttagaggcattaaacctcagtttgcaagcggtaactgaaccgggcgattgggtgatagtagagaatccttgtttctacggtgcgttgcaggcgctggagcggctacggctgaaggcgttatcggtggcgacggatgttaaagaagggatagatcttcaggcgctggaactggcgttgcaggagtatccggtgaaagcgtgctggctgatgactaatagccagaatccactcggatttaccttaacgccgcaaaaaaaagcacaactggtggcgttgctcaatcagtacaacgtaacgctgattgaagatgacgtttacagcgaactttattttggacgggaggggatcctctag

SEQ ID NO: 139437 - DNA, 1941 bp, Homo sapiens
atgaaactgacaacacatcatctacggacaggggccgcattattgctggccggaattctgctggcaggttgcgaccagagtagcagcgatgcaaaacacattaaagttggcgttataaatggcgcagaacaagatgtcgcggaagtcgctaaaaaggtggcaaaagagaaatatggcctcgatgttgaactggtaggatttagcggttcgttgctaccgaacgatgcgacaaatcatggcgaacttgatgcgaatgttttccagcatcgaacctttcttgaacaagataatcaggcgcatggttataaactggtagcggtggggaatacgtttgtcttccctatggcggattatggaactcgagggggcgcagtcccgcgcgtactggatgatcccaaagttgatgtagcgattatcagcaccacttacattcagcagaccgggctttctccggtgcacgacagcgtatttattgaagataagaattcgccgtatgtgaatattttggtggcacgggaagataataagaatgcagaaaacgtacagactaaatgtcagggacgtaccaatgaccaccaaataaaaaaacgccagaatcaaactgccgttaacgacaaagtttgttccttgtctggcataaaaaggcaacagaatcagaccgccaatcagcatactccagccgacgactggacctgcaggcacattaagtgcctgcaggtcatcattatgcgcgtggtcgatatcatgctggcgctgcaagtctgctgctggcgctggtgctggtggcaattttcggcccgtcgattgataaattatcggtgcatttcggcgacgaaagcgcgccgtttccgcgtcgtagaccgcatcagctacagcgtaaaacagggcgaagtggtcgggattgtgggtgagtccggctccgtcaaccaaacgtcgtcgccagcattcccgccagcgcccgcgagacgccgagggactcatcctgaaacgcggcgtaaccgccagtgcgtgcccgaacttagcagcaacaagcccaccgtttctacaagcagagagacaatcgccactttcacgccgccaaaacggtccggcatccagccaaacatgacgcgcatcacgacaaatgcgccgccaaacgcgataagcccgacaacgctccacagcgatggacgttctcccgccaggccggttactttgcgcactgtgccgttacaggcccacgccagtacgggtaataccattgtggtgatcgccagtcacgtacagaatgatcgaggatcgccagtttcatacatcgcttggatgcctgcaggtccgctggttattttgctgttcttcaccatttattgcgcttcgggcattgtggcaggcgcgcgtctgtttgaaagtacctttggcatgagctacgaaacggctctgtgggcgggcgctgcggcgacgatcctttacacctttattggcggtttcctcgcggtgagctggactgacactgtacaggccagcctgatgatttttgccctgatcctgacgccggttatcgtcattatcagtgtcggtggctttggtgactcgctggaagtgatcaaacaaaagagcatcgaaaacgttgatatgctcaaaggtctgaactttgttgccattatctcactgatgggttgggggctgggttacttcgggcagccgcacattctggcgcgttttatggcggcggattctcaccacagcattgtccatgcgcgtcgtattagtatgacctggatgatcctctgcctggcaggggcggtggctgtcggcttctttgggattgcttactttaacgatcatccggcgttggctggtgcggtaaatcagaacgccgagcgtgtgtttatcgaactggcgcaaattctgtttaacccgtggattgccgggattctgctgtcgcaattctggcggcggtaa

SEQ ID NO: 139438 - DNA, 2977 bp, Homo sapiens
ctagagccctgttgcctcattaatccgttgtgccaccagctcacgggctgcaactgggaagagacgagacctgtttatccatcgccgacactgggatacgcagcaatcgtgggcttggggcagtagtggccataaggagagactcccctgcttgtggaaagaggagagaatagtatgaaggactttgtcttgtggtttgggtgccagctcaggcacagtagagtagagcaccaggtagattcctaagatttctgacttgaggccctggctcctggatggcatctctggactcacacaggaccagcggaaactcactgcctttaaacaggcaatcgccatggcgatcatcacgcgctggctcatgccgccggaaagctgatgcgggtaaacatccagacgcgatgccggatcgggaattccgacctgattcagcaggtcatccgctcgctgacggcgggtatttttgttccgcccttgatgcaccttaatcgctcccataatctgaaaaccccgggtgtagcacgggttaaggctggtcatcgggtcctggaagatcatcgccacttcggcacccaccaggttgcggcgctctttttctgagatacgctgcaaatcctggccgttaaactccagtttttctgccattacgcggcccggataatcaatcagccccataatcgccagtgaactgaccgacttaccggagccggactcacccacaatcccgaccacttcgccctgttttacgctgtagctgatgcggtctacggcgcggaacggcgcgctttcgtcgccgaaatgcaccgataatttatctacatttaataacgccatctcgaacctcttactgcttcagtttgggatcgagcgcgtcacgcagaccgtcacccatcaggttaaatgccagcaccgtcagcaggatcgccagacccgggaaggtcacgacccaccaggcgctttgcgcgaactgcaacacgtcggagagcatggtgccccactcaggcgttggcggctgtgcccccatgccgaggaaaccaagagcagccatatcgagaatggcgttagagaaaccgagcgacgcctgaacaatcagcggcgcaaggcagttcagcacggcggcgcgggttaagcgcacatagtgcggcaagccagcgaaggtcagtgccagcgcggcgttaccaatcgacgggccgaaaattgccaccagcaccagcgccagcagcagacttggcagcgccagcatgatatcgaccacgcgcataatgatgttatcgaccaggccgccaaagtaaccggcgatcaggccgagaataacgcccataatcagcgataacacaactaccagacagccaaccagcagcgacaggcgcgcaccgtacatcaggcgcgacagcacatcacggcctacgtcatcggtgcccagcaagtgcgccatgctgccgccttcctgccaggcagccagcatcaacgccgcactgtgcttgcggctacgctcatagcgacgcagataaatgtactgcccgatgtctttcccctgacgatgcaaccgtttcagttcggcaatcagctctgcagcatccataaagccgagatttaccccctgccccgccagcgggtgaatggtatgtgcggcgtcgcccaccagcgccagacggtgcgaggcaaactggcgcgcataacgccccgtcagtgggaacacctgacgcgcgctctcaaccttgcataagcccaggcgattatcaaaagcgatatttaacgcgcgattaaattcgtcttcacttgcctgctgcatccgctgcgcttcctctggcgacagtgaccagacaatcgagcaaagatgcggatcgctaagcggtaaaaaggccagaatgccttcgccatggaaaacctgccgcgccaccgcatcatgcggttcttccgtgcgaatggtcgctaccagcgcgtgatgctgataatcccagaaagtcagcggaatatcggctttgttgcgcaaccaggaattagcgccgtccgcgccaatcaccagacgcgccgttaacatgctgccatctttcagcgtcaggaaggtttcattttctccccaggcgacctgctgtaattctgcgggggctaacagagtgatatctgacgactgatgcgctttgttccacagcgcgtagtgaatcactgaattttcaacgatatgcccaagatggctatagcccatgctttgatcgtcaaacgaaatgtgaccaaagctgtctttgtcccacacttccataccgtgataacagctggccctacgagagagaatgtcctgccagacgccaagacgggtgagtaatttttcgctggcggcattgatagccgaaacgcgcagttgtggtggtgcattcgccgccagaggttcctgtacgcgctgctccagtacggcaacgcgtaagccgctccccagcagccacagcctgattcgcgcctttgccgccaaatgcaaccggtacgccgctgctggtgcagatcttcctgatttattacgggccgggccagtttccgactttgcaggagtatccggcactgtggcatttgttgtcagaaccgtggttatgtgcgctgattgcgttgtcgctgaatagtgcggcgtataccacgcagctgttttacggtgcaattcgtgcgatcccggaaggtcagtggcagtcctgtagcgccccgcagctgccgggtcaaccaggttgattgccagtgccttcacccctttcgccagcaatacgtcgatctgatcgttctgcttggactggtcattctgagaatcattcatcagcagctgaacatctggcgcggctttcgcatcttgctcaatagccttgcgcactacagacataaagttatcgtcgtacttatagattgttacaccaatgcgagtatcagcagcgtgtgcagcggcaccgaataacatgctggccatcacagcagacagggttaacaccttcttattcat

SEQ ID NO: 139439 - DNA, 1230 bp, Homo sapiens
atgactggtttacaccccggcaatcatctccagttgaaggtgccacggctgcccaacgtatatgagaatgccgcccgattcgatggcattggcaagacctgcgaacgatcccccatcccgcatcgttggcaatactggtcaatactcggtactgcactgatcatcttcgtcacctggtttttggtggaagtcggggtcgccgtcaacgcctggtatgcgccgttctatgatctgattcaaaccgcgctaagttcgccgcataaagtcaccatcgaacaattttaccgcgaagtgggcgtctttctggggattgcgctgatcgctgtggtgatcagtgtgctgaacaacttctttgtcagtcactacgtgttccgctggcgtacagcgatgaacgaatattacatggcgaactggcaacaactgcgtcatatcgaaggggccgcacagcgtgtgcaggaagacaccatgcgttttgcttcaacgctggagaatatgggcgtcagttttatcaacgccatcatgacgttgatcgccttcctgccggtgctggtaacgctctccgcgcatgtgccggagctgccgattatcgggcacattccgtatggtctggtgattgccgcaatcgtctggtcgctgatggggaccggattgctggcagtggtagggatcaaactgccggggctggagtttaaaaaccagcgtgtagaggctgcctaccgtaaagagctggtttatggtgaagacgatgccacgcgcgcgacgccgcctacggtacgcgagctgtttagcgccgtacggaaaaactatttccgcctctattttcactatatgtatttcaacatcgcccgcattctctatttgcaggtcgataacgttttcggtttgttcttgctgtctccgtcaattgttgccggttcgattaagaaccaaagaatccgtatccgcctgaaagcgtttgatcatcgtctgatcgatcaagcaaccgcggaaatcgtcgagactgccaagcgcactggtgcgcaggtccgtggtccgatcccgctgccgacacgcaaagagcgcttcactgttctgatctccccgcacgtcaacaaagacgcgcgcgatcagtacgaaatccgtactcacttgcgtctggttgacatcgttgagccaaccgagaaaaccgttgatgctctgatgcgtctggatctggctgccggtgtagacgtgcagatcagcctgggttaa

SEQ ID NO: 139440 - DNA, 1536 bp, Homo sapiens
tcaacctggcactgcaaagtgcgaaagcacttgcgctgaacctgccaaacactgcgacctgccaggagttatttaatacctgtgcggcaaacggtggcagccagttggatcactctgcgttagtgcaggcgctggaattaatggctaaccataaactggcctgatacccgcaataaaaatggccgatatcagaaaatgaatcggccagcaatattaaaaaagaaagcagccaaagatgttgcttcagtattaaaaataatatttttattttatttgttcctcatagctagattaaaacaacgttattcgatacgtgaaattaagagggatttatggaacatcagagaaaactattccagcaacgcggctatagcgaagatctattgccgaaaacgcaaagccagcggacctggaaaacatttaactattttaccttatggatgggttcggttcataacgttcccaattatgtgatggtcggcggcttttttattctcggcttgtctacctttagtattatgctggcaattatcctcagcgcctttttcattgccgcggtaatggtattaaacggtgctgcgggcagtaaatacggtgtgccttttgccatgatcctgcgtgcttcttacggtgtacgtggtgcactggttcccggattattaaggggcggaattgccgccctcatgtggtttggtttgcaaagaggatccccgttctatgatctgattcaaaccgcgctaagttcgccgcataaagtcaccatcgaacaattttaccgcgaagtgggcgtctttctggggattgcgctgatcgctgtggtgatcagtgtgctgaacaacttctttgtcagtcactacgtgttccgctggcgtacagcgatgaacgaatattacatggcgaactggcaacaactgcgtcatatcaagggccgcacagcttttatcaacgccatcatgacgttgatcgccttcctgccggtgctggtaacgctctccgcgcatgtgccggagctgccgattatcgggcacattccgtatggtctggtgattgccgcaatcgtctggtcgctgatggggaccggattgctggcagtggtagggatcaaactgccggggctggagtttaaaaaccagcgtgtagaggctgcctaccgtaaagagctggtttatggtgaagacgatgccacgcgcgcgacgccgcctacggtacgcgagctgtttagcgccgtacggaaaaactatttccgcctctattttcactatatgtatttcaacatcgcccgcattctctatttgcaggtcgataacgttttcggtttgttcttgctgtttccgtcaattgttgccggtacgattacgctcggcctgatgacgcagattaccaacgtttttggtcaggttcgcggtgctttccagtacctgattaactcatggaccacactggttgagttggatgtctatctacaaacgtctgcgcagctttgaacatgagctggatggtgacaaaattcaggaagtaacccataccttgagctaa

SEQ ID NO: 139441 - DNA, 2918 bp, Homo sapiens
tttttccggaccaaaaaacctttgccgatgccgtgccgaacagcgatccgctgatgatccttgctgattatcggatgcagcaaaaccagagcggatttgatctgcgccatttcgttaacgtcaatttcacccagcaccgatacacgaaacgaaacccaaatcgtcaacgtaatgacgataaaagcgcagatcgccagagtcagcacgcgtgagttaattttcttggtatcaataattcggcttaacagattgagaataatgcctttaatggcctcgtggaaaccgagataaatgccaaagaatgcggtcagtacggcaaagatattaagcaccgtagaggtgatatgaatgatatgcccagggatcacctgcgcggccagcgccagtgctgagatattttgttcaaaggcagaaacggcttcttcgtggctaattgagaaggtaaacgaaaaggcaaaaaacaggatcaccgcgatgagcgtgatataactaattcggtgggtacgcagcgcgagccgggttgccagtactttatccgcttcccgtttacgataggcaatattcattgggttaagtacctgaataaatactgcagaaaagaagcaaaatggaatggtaagcaagacatcgcggaaaaagacggaggcttgcgggaaggcggttatatcgatgaaattcgagtgcgggatcatcgcaaaaccgaacacgacaataagccgctgcgcttgctcttccgctgcaaggcgttcagcctcttgcggatcgcgtttcacaaaggtgcgtttcttgcggacttcgatttgtaccgatttgctttttccaccggtaccaggaatgttaagggtgctgcgtgttttacgttgcagcgtcaatttgtccgggcctgaatttttctgattcaggtggtcaatcaaagtctgtttctcttgtgcagacacagagtcgtcagcagacttccggatacctgcatcagcaaattgctgtaccaggcgttccacggaggtctgtcgctgcttcgtcaccgaaccagcaaaaatcgatgccggaccataagcctcacgaatgcgtttatgttgttggtgaataagatccagcgcctcatcccaactcacgcgaacaaattcatcctgcccacgaatgccttgcggggttttccgggtgacgcaagaaagcttttcgcaccacttggaaatcgtaccggcgtattgctgtgaacaaatttccgagtattcccaggaataatcttcatgttcacgcggcataatctcaccgacggaacccgtggcaaagaataaaaagggattgaagccttgtcgtgggggattccttgtatcagtgccgattgtgtctccgggcctgctgacattattcaacctgatgtcaatggccatctgtatcaaccgggagatattgctggttttgtaactcttcacaatcaccgcgccacaggaagccgccgtcgtcacgaccgcaaacaggctactgaccagcacgccgaaacggctctctttaccttccatattgatgctgctgtccgtgcccagtgccagcagatgaggattaccctgaacttctgcccacatcaccacgccaaaggcaaagcacagcgccgttgggatcaagaagatcgccagcatctgcacgaagttggtcccggcgaagccatggacaaaaacctgtatgacctgccgccagaagaagcgaaagagatcccacaggttgcaggctctctggaagaagcactgaacgaactggatctggaccgcgagttcctgaaagccggtggcgtgttcactgacgaagcaattgatgcgtacatcgctcacatccgggctgtactctgttgtcctgcctgcggatgccgtctgtgccctgagcctgcccacggcgtcaaactgactctgcgtgacgctgccgtccgcgtgttcctttttcaccacccgcttcagcccggcttcgccgttgacgtgagcggaaaagatttggccgtccagttttacggtgtcgataccgacatgaatcaggatctccacaccatcatctgactcaatgccaatggcgtgtaatgtggcgaacaacgaagcaattcgacccgcaaccggagaacgcacttcaccaaccgagggcagaatggcaatacctttacccaaccaggccacgctcatgaagtcacggggctgattcgtgaaggcgcgacggtgtgcggtgttcgtgtacgtaaccatctcaccggcgaaactcaggcccttcatgcacctgtcgtggttaatgccgctgggatctgggggaatgtcagtggtctgccctccgatcgcacctctatgatccaccggaaaaatttgcagggcgatgatggccggttttgccgccagcactttacgcatttcagcaatcgagttcacccgatcgcggttgacgccaatgatcacatcgtctttttgcaagccagcctgagcagctgggcttcctttgacaacttcatcgattttaatacctttgccgccatcttttagctgaccatcgctcaacgttgcaccttccagcgctggcgtgatcatttcagcgctggccgacgaagaggtgctggtatcgagcgtcacttctacttccagtggtttgccgttacgcagcaggccaagcttcactttcgtgcccggctcggtggtcgcgatacgagagcgcaactcagcaaagctattcagcggtttgccgttgaggctggtaataatatcgcccgctttgacgcccgcttttgccgagccagaacctggcaacacttcgctgacaaacgcgccacgctgcacgtcaaggttgaaggctttggcgatatcggcactcatctcggtgcctttgatgcctaacaaaccgcgtttgatttcaccaaagtcgataagctcgtgcgccagtgttcgcgccat

SEQ ID NO: 139442 - DNA, 3192 bp, Homo sapiens; identical to SEQ ID NO: 130157

SEQ ID NO: 139443 - DNA, 1815 bp, Homo sapiens
atgattggtcaacggctggatgatctcaaattacgtgagcgttatggcgctaacgtcatcggtgttgaacgctggcggcgttttcgtcgcgttatcgtgaacgttaatggggtttctgaatttcgcgcgcgtgacgttttgcttattgatatgtctgcggctgatgtcgatctccggcaattttgtagtgagcaattgctggagccgatggtattgcgcggcgagtatttttctgaccaggcccttgatgtgggcatggcagagatttcattaattcctgagtcagaactgattggtaaatcggtgcgcgaaattggttttcgtacccgctacggactgaatgtggtggggctaaagcgcaatggcgtggcgctggaaggttcgctggcggatgagcctctgctgctgggcgatatcatcctggttgtgggtaactggaaactgatcggtatgctggccaaacagggccgcgacttcgtagcgctgaacttaccggaagagtatgcgctggcacgtaccgaacggaaatccggttccggttacaccggttttacttgctatgccgcaccggatgtcacgctggaagatgatcttaagcgtcgcgatctgaccattaatgcgctggcccaggacgataacggcgagattatcgacccgtacaacggtctgggcgatctgcaaaatcgtctgttgcgccatgtttcccccgcttttggcgaagatccgttacgcgtattgcgcgtggcgcgttttgctgcgcgttatgcccacctcggttttcgtattgccgatgaaactctggcgttgatgcgcgagatgacccatgcgggtgaactggaacacctgacgcctgaacgggtatggaaagagacggaaagcgccctcaccacccgcaatccacaggtgttcttccaggtactgcgcgattgcggcgcactgcgcgttttattcccggaaattgacgcactgtttggcgttccggcccctgccaagtggcatccggaaatcgatacgggtattcataccttaatgacgctctcaatggcggcgatgctgagtccgcaggtcgatgtccgtttcgcaactttatgccacgatctcgtcgtcgtaaatcgcaaagccacgccgctgccgtatcaaagccagccggatgactcatgcgactggtatcgcctgcgtcatgaagaagcgatgacgccggatgcggtggtgcgcctggcggaagcggcatatgaaaaatatggcttcaacgatttcaaactgaagggcggtgtactggccggggaagaagaggccgagtctattgtggcactggcgcaacgcttcccgcaggcgcgtattacgctcgatcctaacggtgcctggtcgctgaacgaagcgattaaaatcggtaaatacctgaaaggttcgctggcttatgcagaagatccgtgtggtgcggagcaaggtttctccgggcgtgaagtgatggcagagttccgtcgcgcgacaggtctaccgactgcaaccaatatgatcgccaccgactggcggcaaatgggccatacgctctccctgcaatccgttgatatcccgctggcggatccgcatttctggacaatgcaaggttcggtacgtgtggcgcaaatgtgccatgaatttggcctgacctggggttcacactctaacaaccacttcgatatttccctggcgatgtttacccatgttgccgccgctgcaccgggtaaaattactgctattgatacgcacggcatttggcaggaaggaccagcaggcatgaggaggattgcccaaaatccgccgttgtattactga

SEQ ID NO: 139444 - DNA, 1725 bp, Homo sapiens
ttagctgctccagagccctcctgtgccttgagctccagtcccacagtgacttgcaggaatgcaatgcacttcaaacgcgatatcccgatgtttgccgttgggtttatcaccgcctttgtggtggcgctgatagcgattaaaaccttccgccgcaatccgccgtcgggtcagctcctcgcgaatctccacacctttaaatcccgcttcaacgacggcttttgtcggcactgactgcgccacttcccaggcttcgcgcaaccagcggccttgcgggtagtccgctgattcaaaaccggttctgccgcgcacgtcagcctcgctggtcagcgccagttgctcgacacgctgcggtttacgccaggcatcgatggaatcaaataatttgacgatggtttttgggttcagcattgggaaggtgtggatgagatcgtgaaactcagccaccagtctggctaaatcgcgaatttcatttggcacgcgcagacgctggcatagttgttccactaacttaacacccgccgggccatgaccaatagatgacgcggcccagagttctggcggcgtcacccctttaccgagatcgtggcataaagttgcgaaacggacatcgacctgcggactcagcatcgccgccattgagagcgtcattaaggtatgaatacccgtatcgatttccggatgccacttggcaggggccggaacgccaaacagtgcgtcaatttccgggaataaaacgcgcagtgcgccgcaatcgcgcagtacctggaagaacacctgtggattgcgggtggtgagggcgctttccgtctctttccatacccgttcaggcgtcaggtgttccagttcacccgcatgggtcatctcgcgcatcaacgccagagtataatcggcaatttttaaaccgcgctccgcataacgcgcagcaaaacgcgccacgcgcaatacgcgtaacggatcttcgccaaaagcgggggaaacatggcgcaacagacgattttgcagatcgcccagaccgttgtacgggtcgataatctcgccgttatcgtcctgggtatggttaacaacttggaacccacgtccgtaaaagacaatgagccttacgaaagagcccaggttgcggaatccataccttgggcggaatatttgaccagacgacagccagtggggcactattttgaagacctttaaatattgtgtggtaaaacccgaagccgggtgcgcaatccaattcaaagcgttaaccccccggaaataacccggaaccgttaagtccgtgaagaaacttaaaccgaaattgttgtgaccggactgtaacgttcggtttgaatctgagtgtccgagaagatctcgcgtcgtttcctcaacgattccgcagacttcaacgaagcctttaccccgtgcctgtttcaaatgacgcacagggatgatgggcccgaaatctcggtacatcggaccgaaatgcccgaaagaagatctgatgtggcaagatccgtgccgcagccgatcttccgtggtggcgacaaacggcggtggtgcccaacggtgcgcgtctggcattaatgccgcagcgccgactgggatgtgaacgccgcagccgttcgtgctctgcctgttctggagaaaatccagaaagagtctggtaaagcctcgctggcggatatcatagtgctggctggtgtggttggtgttgagaaagccgcaagcgccgcaggtttgagcattcat

SEQ ID NO: 139445 - DNA, 2600 bp, Homo sapiens
ttagcacatgatccaatcgtatcggtaccggtgtacgacgcgattgtttttgtggcgaagccgtaattcactattgctggcaaattgcgctttgttcatgcctggatgcggcgtgaacgccttatccggcctacaaagtaatgcacatattgcaaggaaatgtaggcctgataagcgtagcgcatcaggcaattttgcttttatcatcactgcgtgctgactctggcgatctgcgcttttatcgtcattacgttgacgatttgggtttcgtttcgtgtatcggtgctggtgttcgctatggctgacgatattaaagtcgccgttgtcggcgcgatgtccggcccgattgcccagtggggcgatatggaatttaacggcgcgcgtcaggcaattaaagacattaatgccaaagggggaattaagggcgataaactggttggcgtggaatatgacgacgcatgcgacccgaaacaagccgttgcggtcgccaacaaaatcgttaatgacggcattaaatacgttattggtcatctgtgttcttcttctacccagcctgcgtcagatatctatgaagacgaaggtattctgatgatctcgccgggagcgaccaacccggagctgacccaacgcggttatcaacacattatgcgtactgccgggctggactcttcccaggggccaacggcggcaaaatacattcttgagacggtgaagccccagcgcatcgccatcattcacgacaaacaacagtatggcgaagggctggcgcgttcggtgcaggacgggctgaaagcggctaacgccaacggcgtcttcttcgacggtattaccgccggggagaaagatttctccgcgctgatcgcccgcctgaaaaaagaaaacatcgacttgcgtttactacggcggttactacccggaaatggggcagatgctgcgccaggcccgttccgttggcctgaaaacccagtttatggggccggaaggtgtgggtaatgcgtcgttgtcgaacattgccggtgatgccgcgcgaaggcatgttggcccccgtcctgataacggttgatcagcccttcgttcaggcgggattccagcccctgcggcgtttgttgccagcgcacgaaacgggccggagaacacgcgcctatggtgttgggcgactcacccgtcagatacgacgacagatagcaacgaccttccgacataatgcacaggctgccgaaagcaaagacttccagtggtacaggtgtgacccgtgccagttgtttcacctgatgaatcgacaacacgcgcggcagcaccacgcgagcaacgtcaaaatggcgatgataaaagttaatcgcctcttcattggtcgccgaagcctgcaccgatacgtggcgctcaatatgcggataacgctcggcggcgtactccatcatggcgaggtcggcgaggatcagcgcgtcggcacccagctgcgccgccatatccacggcgcgctgccaacgggcgtaaccgtccggatgcgcaaaagtgttaatcgcgatgtgaagtttgcggcgatgttgatggacaaaactcaccgcttcctgcaattttttctcggtaaagttaaggccggcgaagtgacgggcattggtatcatcttttagcccgatataaacagcatctgcgccgttttcgatggccgccttaagcgccgggagatttccggcagggcagagcagctccataatttttcctgaaggttgcgcggtaaaactgacgccatttgcgctaaaacgccaggttcttgagcaggtcttaagctgcaaacatgtgtgacagtagcgataaggtgttaccgcatcggtcattgccaatattatcaggctttcgccacgtgtccttcccagctgaccgcgcatccgctgtcggtcagtcttcgcgatctcacactgtacaatccgcttcaacgacgcttttgtcgcactgatgcgccacttcccagggtcgcgcaaccagcggccttgcgggtagtccgctgattcaaaaccggttctgccgcgcacgtcagcctcgctggtcagcgccagttgctcgacacgctgcggtttacgccaggcatcgatggaatcaaataatttgacgatggtttttgggttcagcattgggaaggtgtggatgagatcgtgaaactcagccaccagtctggctaaatcgcgaatttcatttggcacgcgcagacgctggcatagttgttccactaacttaacacccgccgggccatgaccatgatgacgcggccagagttctggcggcgtcagccctttaccgagatcgtggcataaagttgcgaaacggacatcgactgcggactcagcatcgccgccattgagagcgtcattaaggtatgaatacccgtatcgatttccggatgccacgttgtacgggtcgataatctcgccgttatcgtcctgggccagcgcattaatggtcagaacgcgacgcttaagatcatcttccagcgtgacatccggtgcggcatagcaagtaaaaccggtgtaaccggaaccggatttccgttcggtacgtgccagcgcatactcttcatgcgtttgcggatgcagaaacacaggaaa

SEQ ID NO: 139446 - DNA, 505 bp, Homo sapiens
taaaggctatgtgctgaccaacaaccatgtgattaatcaggcacagaaaatcagtattcagctcaatgatgggcgcgagtttgatgcaaaactgattggtagcgatgaccagagcgatatcgccctgttacaaattcaaaacccgagcaaattaacgcaaatcgctattgccgactccgataaattgcgcgtcggtgattttgccgtagcggtcggtaacccatttggccttgggcaaaccgccacctctggcattgtttccgcattaggccgcagcgggttgaatcttgaaggtctggaaaactttatccagacagatgcttccattaaccgcggtaactccggcggtgcactattaaaccttaacggcctgaccgagcaggctctcttctttcaagaattttatgggcaaggggaggagggccccactggtggtgccacatggcaaggaacaggccaaagcggtggcaatgaccagggcagcgaccactgtgtgtaccctgca

SEQ ID NO: 139447 - DNA, 2038 bp, Homo sapiens
atgcgcatcatggacattatgctgtcgattccttcgttggtactgacaatggcactggctgccgctctcgggccgagtttgtttaacgccatgctggctattgctattgtgcgaattcccttttatgtgcgcctggcgcgggggcaagcattagttgtacgccagtatacctatgttcaggcggcgaaaacctttggcgcgtctcgttggcatctgatcaactggcatattttacgtaactccctaccgccgctgatcgtgcaggcatcgctggatatcggtagcgcgattttaatggccgccacgttgggatttattggcctgggtgctcaacaaccgagtgctgaatggggcgcgatggtagcaaatggtcgcaactatgtactcgatcagtggtgcgagggcacaggcatgaaatttgataaacccgcaggggaaaacccgatcgatcagctgaaggttgtcggtcgtccccatgaccgcatcgacggaccgctgaaaactaccggcacggcacgctacgcctacgaatggcatgaagaagcccccaacgccgcctatggctatatcgtcggttccgccattgccaaaggacgcctcaccgcccttgatacggacgccgcgcaaaaagcgccgggcgtactggctgtcattaccgccagtaacgccggggcactcggcaaaggcgacaaaaacaccgccaggctgttaggcggccccactattgagcactatcatcaggccattgcgctggtagtggccgagtccttcgaacaggcgccagcggcggcctcgctgttgcaggcacactatcgccgtaataaaggagcttactccctggcggacgaaaaacaggccgtcaatcagccgccggaagacacgcccgacaaaaacgtcggtgactttgacggggctttcacctccgctgcggtgaagattgatgctacctacacgaccccggaccagagccatatggcgatggagccgcatgcctcgatggccgtctgggatggaaataagcttaccctctggacctcaaatcagatgattgactggtgccgcaccgatctggcaaaaacgctgaaagttcccgtggagaatgtgcgtattatctccccgtatatcggcggagggtttggcggcaagctgttcctgagaagcgatgcgctgctggcggccctcgccgcccgagcggtgaaacgtccggttaaagtgatgctcccccgcccctctattcccaataacaccacgcaccgccccgccacccttcagcacttgcgtatcggtgccgaccagagcgggaaaatcaccgctatctcacatgaaagctggtctgtaaacctgcccgggggcacgccggaaacggcgctacagcaaaggacgctacgtcctgcaggcagtatagctagcgagccaaaccttaatggcccccgtgtggagctgtctgcggtatctcgcatccgcgagcaggtaggcgacgataaagtcatcctcggcctctctggtggtgtggattcctccgtaaccgcaatgctgctgcaccgcgctatcggtaaaaacctgacttgcgtattcgtcgacaacggcctgctgcgcctcaacgaagcagagcaggttctggatatgtttggcgatcactttggtcttaacattgttcacgtaccggcagaagatcgcttcctgtcagcgctggctggcgaaaacgatccggaagcaaaacgtaaaatcatcggtcgcgttttcgttgaagtattcgatgaagaagcgctgaaactggaagacgtgaagtggctggcgcagggcaccatctaccctgacgttatcgaatctgcggcgtctgcaaccggtaaagcacacgtcatcaaatctcaccacaacgtgggcggcctgccgaaagagatgaagatgggcctggttgaaccgctgaaagagctgttcaaagacgaagtgcgtaagattggtctggagctgggcctgccgtacgacatgctgtaccgtcacccgttcccgggaccaggccttggcgttcgtgttctgg

SEQ ID NO: 139448 - DNA, 1772 bp, Homo sapiens
atggagaagccgactctagaggatcccccgaaaaaacaaaacaaaacaaaaaatcagccagtgatccctgaaaagttccagcgtattttgagagtattcaaaaccaacattgatgagtggtgtaaaataacctttgccatcactgccattaagggtgtgggtcaaagatatgctcatgtggtgttgaggaaagcagacatcgacctcaccagcagggtgggagaactcactgaggatgagatacacccatgtcattctcactcattgcgacaggattactgggtgtttatttgacgacaatgccggggtattggggcatcctctttgtctgggcgctatttggcgttacttgcgacatgatgaactggccggtcttgctcaagtcggtaagtcgattgggcaatagcgaacaacaaggtcggttgtttggcttcttcgaaacagggcgtggcattgtcgataccgtggtggcattttctgcgttggcagtatttacctggtttggcagtggcttattaggttttaaagcaggcatctggttctattcccttattgtgattgccgtaggcattattattttctttgtcctgaatgacaaagaagaggcaccgtccgttgaggtgaaaaaagaagacggagcatcgaaaaacaccagtatgacctcggtgctgaaagacaaaactatctggcttatcgcttttaacgtcttcttcgtttacgcggtttactgtggcctgacattcttcattccattcctgaaaaacatctatctattgcccgttgcgctggtgggggcttacggcatcattaaccaatactgtctgaaaatgattggtggaccgattgtgctggaaaaagtgcttccgccagtggtgagcgtccgggtgaaaggaacggccagtcagggccagaaaatcccggaagaattcaaacagttttttggtgatgatttaccggatcaacctgcacaacccttcgaaggtttaggctccggtgtcatcatcaacgccagtaaaggctatgtgctgaccaacaaccatgtgattaatcaggcacagaaaatcagtattcagctcaatgatgggcgcgagtttgatgcaaaactgattggtagcgatgaccagagcgatatcgccctgttacaaattcaaaacccgagcaaattaacgcaaatcgctattgccgactccgataaattgcgcgtcggccgcagcgggttgaatcttgaaggtctggaaaactttatccagacagatgcttccattaaccgcggtaactccggcggtgcactattaaaccttaacggggaaaacccgatcgatcagctgaaggttgtcggtcgtccccatgaccgcatcgacggaccgctgaaaactaccggcacggcacgctacgcctacgaatggcatgaagaagcccccaacgccgcctatggctatatcgtcggttccgccattgccaaaggacgcctcaccgcccttgatacggacgccgcgcaaaaagcgccgggcgtactggctgtcattaccgccagtaacgccggggcactagacaaaggcgacaaaaacaccgccaggctgttaggcggccccactattgagcactatcatcaggccattgcgctggtagtggccgagaccttcgaacaggcgcgagcggcggcctcgctggtgcaggcacactatcgccgtaataaaggagcttactccctggcggacgaaaaacagaccgtcaatcagccgccggaagacacgcccgacatgatgaactag

SEQ ID NO: 139449 - DNA, 852 bp, Homo sapiens
atggtgaatattatgatgcctctctctgcagatgaggaccttgaggctcagagagactcgggaacggccacactcgtcacctcgcccccggcccggctcctggacccccctggacctctctgccagctctcctctctcctggaaatgcgcctgcaggactcggaacgtgcagagcctcagtttcctcctttgcaaaatggtggtaatgccaggaatacccacttcacaggcagcgaggagagagagcagacatggacagaaatggtgcctctgaagccaaagctcaagttaaacctgcatgagagtgaaaaactgagaacagaaactcagagcaggtatctgaacctggccatgaggcagtgcctgcagagtgagagaaattccacgaccagcctctcagatgccaccactctcccggcaggctccagaccacctgggtcggaggctgagccgggaccggaagccgcaccgccccccgcgcgccgggaagctcaccagatcccacggccccggagggggcacctgcccagctcgccgggcccccgcacgcatgtagccgcccacaacatccgcgtagtcacagaagcacacgcagatagtcatgcgttgctctctgatctgggggctgctcctttcgtggttatgtctcggattttaagagttgatggtgatgaagatccccctcatgtggacgagtccattcagcccaccaccgagaacgctgtggtgtttcggcccgtacaactcacttccgccatagagactggagggaaggaggagccctacgggctctcggccgcctccctaggccgagcggagtcatcggcggcgagcctggccgggagacgctga

SEQ ID NO: 139450 - DNA, 435 bp, Homo sapiens
  misc_feature (1)...(435): n = a,t,c or g
gcaggaattcggcacgaggnnnnnnnnnnnnnnnnnnnnnnnnnnnnnnnnnnnnnnnnnnnnnnnnnnnnnnnnnnnnnnnnnnnnnnnnnnnnnnnnnnnnnnnnnnnnnnnnnnnnnnnnnnnnnnnnnnnnnnnnnnnnnnnnnnnnntttggtgccgagactcaaattgggggacctcccttcggagatcaatcccctgtcctcctgctctttggtccgtgagaaagatccacctacgacctcatgtactcataccgaccaacccaagaaacatctcaccaatttcaaatccagactccactggaaatcggactgttcaactcacctggtagccactcccagagcccctggaactctggcccaaggctctctgactgactacttcttggcttagcggctgaggactgatgctgcctgatcgcctcggaag

SEQ ID NO: 139451 - DNA, 5130 bp, Homo sapiens; identical to SEQ ID NO: 116418

SEQ ID NO: 139452 - DNA, 756 bp, Homo sapiens; identical to SEQ ID NO: 117156

SEQ ID NO: 139453 - DNA, 2241 bp, Homo sapiens; identical to SEQ ID NO: 117145

SEQ ID NO: 139454 - DNA, 270 bp, Homo sapiens
atgagaaagatccacttacaacctcaggtcctcagaccaaccagcccaagaaacatctcaccaatttcaaatctgcgtctcttcgctttcacttggactgaccctgacacccatcaggctcagcaaattacctgggctgtactgccgcaaggcttcacagacagcccccgttacttcagtcaagcccaaatttcttccttatctgttacctatctcagcataattctcataaaaacacacgtgctctccctgccgatcatgtccgactaa

SEQ ID NO: 139455 - DNA, 408 bp, Homo sapiens; identical to SEQ ID NO: 114500
  misc_feature (1)...(408): n = a,t,c or g

SEQ ID NO: 139456 - DNA, 441 bp, Homo sapiens; identical to SEQ ID NO: 133951
  misc_feature (1)...(441): n = a,t,c or g

SEQ ID NO: 139457 - DNA, 419 bp, Homo sapiens; identical to SEQ ID NO: 132733
  misc_feature (1)...(419): n = a,t,c or g

SEQ ID NO: 139458 - DNA, 1059 bp, Homo sapiens; identical to SEQ ID NO: 114869

SEQ ID NO: 139459 - DNA, 1185 bp, Homo sapiens; identical to SEQ ID NO: 138168

SEQ ID NO: 139460 - DNA, 618 bp, Homo sapiens
atggaggacacttcaggcctttcagagaacttagcatcccagagggtctgtcctccatatcagaatgaaaatgtaggcagagtaagggatacagaaataaaggaacactgttatgaggagagcagctacagagccgccacccaaattcaggtgagaaaggttggaatcatcacagagccctatcctttcatggcttccctcaggactcactgcataatctgtgagacctgctatgaaatgaaaataagcttttctaagtctctcaatcctcttgaaaaaaataagaaatcacaaccagcaaactgtgcagtaaaagaagttagtgaacagctgagaagaaggcaggccttcagtgtggcagcaggactcaagggcaaagggagcccagctcaaagcatcaggaaaaacctccagaagccatatcaacacttccaaacgctgcagcaactgctgccgctgcagtgggctccctgctatggtccctctaacttcgcaacacatggaactcaccaaggcttatggcttgtgctctccacagtggcagcccaagctgtacctggggcccttatagctgaagctacagcactgctagcgtggatccagggagcagtgtcctga

SEQ ID NO: 139461 - DNA, 996 bp, Homo sapiens; identical to SEQ ID NO: 130948

SEQ ID NO: 139462 - DNA, 2171 bp, Homo sapiens; identical to SEQ ID NO: 114408

SEQ ID NO: 139463 - DNA, 1332 bp, Homo sapiens; identical to SEQ ID NO: 135604

SEQ ID NO: 139464 - DNA, 1235 bp, Homo sapiens
atgcccctccagccactagcgactccgtttacttcccctggaagcccatcagttgctcaagtgacaaccaacaccggagagccagggttcgcccaacaggagtacgcggagacaccccagacgacagcgcgtcccccccacccccaccccgccctccgggcgctccaggccagcgtccaccagaccccacgcctgggggactgcttgggctctagcgagagtgccacggctctgcacggcagcggggagccgaacaagttagccccgccggggcgccctacggaacgcggtgggcttttcaagtgctcagtccctctgcggacagtgcgaggctgccgggccgggctccgggggaccgagactgtaccttccagccttcagcgccagcccgcgggagacgtaggatggatcaacaacaaaagcaccacagccctagacagaacgccgactgacacccagcggaccaggcgaccccggccgccaaaacagaaacaaagaggcagagcgctcaaggagcggcccagagactccgacagcgcgcgcgaaggcccactgaaggcggtcgcgggcctgtttggtggtctcttcacacggacgtgcatgaaatttggtgccgtgactcggatcgggggacctcccttgggagatcaatcccctgtcctcctgttctttgctccacgagaaagatccacctacgacctcaggtcctcagactgatcagcccaagaaacatctcaccaatctcaaatccgcatgctttgaaaggattaaagcctgttatcactcgcctgctacagcatggccttttaaagcctataaactctccttacaattcccccattttacctgtcctaaaaccagacaagccttacaagttagttcaggatctatgccttatcaaccaaattgttttgcctatccaccctatgatgccaaacccatatactctcctatcctcaatacctccctccacaatccattattctgttctggatctcaaacgtgctttctttactactcctttgtacctgtcatcccagcctctcttcgctttcacttggactgaccctgacactcatcaggttcagcaaattacctgggctgtactgccgcaaggcttcacagacagcccccattacttcagtcaagcccaaatttcatcctcatctgttacctatctcggcataattctcgtaaaaacacacgagctctccctgctgatcgtgtctgattaa

SEQ ID NO: 139465 - DNA, 1142 bp, Homo sapiens
atggagctagaagccacgaatatagttgttagggctgttctcctgtttccaaggaccacaggccagccccttagcacaaggaggagagctcctatagaaggcattcttccaagctcatctgttctccttcagttggataaggatgtaggcagagggttggacccagctgggccatttttccacaacactccaaaggaagtcaggctagacccctcggatgccaactttgttgacgttattcatacaaatgcagctcgcatcctctttgagcttggtgttggaaccattgatgcttgtggtcatcttgacttttacccaaatggagggaagcacatgccaggatgtgaagacttaattacacctttactgaaatttaacttcaatgcttacaaaaaagaccacagctcttgggctgtcccagccccactgcagcttcctgatgcgtggggtgggatggctacagtgtttcagcagctcctttggcacctgctgtttggtgggtctcaggttcttgtcccacgtccaggaagaaagaggttacacagacaactgaagagtgagcatggtggagaagagttttatcgagtgaccaaacagctcttggatgagaggggaacccaaaaaagatccacctacgacctcaggtcctcagacccaccagcccaagaaacatctcaccaatttcaaatccgagacaaaggagacacgttttatctgtggacccaaaactccggcgccgctcatggactgggaaggcagccttcccttgatgtttaatcattgcagggacacctctctgattattcacccatgtttccaaggtgtcagaccatgcagggacgcctgccttagtccttcacccttagcggcaagtcccgcttttctggggaaggggcaagtacccctcaaccccttcttcacccttagtggcaagtcccgcttttctgggggaggagcaagtaccccaaccccttctttccatgtctctacgccttctctgcttttctggggaaggggcaagtacccctcaaccccttcttcacccttagtggcaagtcccgcttttctggggaaggggcaagtacccctcaaccccttcttcacccttagtggcaagtcccgcttttctggggaaggggcaa

SEQ ID NO: 139466 - DNA, 810 bp, Homo sapiens
atgggcctcgtgcatctgcagagacagtcatattggacagtgcagaggagctccataaatcacttcctaggctgcaacccacatactgggaaagataaaacgctttacatgagatggacaaaaagctttaggaaagtagaagatccacctacgacctcaggtcctcagaccgaccagcccaagaaacatctcaccaagtttaaatccgagacaaaggagacacgttttatccatggacccaaaactccggcgccggtcatggactgggaaggcagccttcccttggtgtttaatcattgcagggacgcctctctgattatacactcacatttcaagggtgtcagaccacgcagggatgcctgccttggtccttcacccttagcggcaagtcccgcttttctggggaaggggcaagtaccccaaccccttatatctctgtgccccgatcccttatttccgcaccccaacctcatatctctgcgccccaatcccttatgtccgcaccccgacctcgtatctctgtgccctgacccctttcccgcttttctggaggcacataagaacttccaaacgcctgaaccgcagcagcccggcattccaccagaacctcctcccccaggagcttgctacaagtgccagaaatctgaccaccaggccaaggaatgcctgcagcccaggattcctcctaagccatgtcccatctgtgcgggaccccactggaaatcagactgttcaactcacctggcagccactcccagagcccctggaactctggccgaaggctctctgactgactccttctcggcttag

SEQ ID NO: 139467 - DNA, 759 bp, Homo sapiens; identical to SEQ ID NO: 133959

SEQ ID NO: 139468 - DNA, 2013 bp, Homo sapiens
cagaaggtgccaggagaagagctcctttgcaatgcacctgggcacatgcaatcagacatccacaaagagtgcgatgtctatgcagaatgcaccaattccaacttccaggtccctggagatgcttcggacatgggaagggaagtgattggatctctgtctcccataccctgttggtgggtatacagtgtgcctatatttaattcagcacctactatgccctggcgctgtggcattcataggcaaggaggactggacctggaaggggcctttgggtctcagaggacaggatgtggaccgggcctctactattccaagcgacaaggccacccggatttcattcttcctgggagacgggagcgctcatttctgctcctggtggtcactcacctccacgtgacctttggcatccaggctttctgggtctctggctccttgatgatgccatgcagaggtcctgaggttgagatgtccctgcttgtggctgtggctcctgggcacacgtatggcatatttcagatagaaaaacttatgaatatggaagggacatggatggtgctggaaggcgttatcctcagcagactaacgcaggaacagaaaacccaaacatcgcctgttgtcactgataagtgggagctgaacgacgagaacacgtggacacatgatgggaaacaacacacaccgcggcctgtttcaggagtatggtttttcaaggtgtccagtgcgcacacagaaagcccagctgcggaggccggccgccagaccccaaagggacgaaccgtcatgggacgccggttctcttccaaagcttcgctgcgggaagccagccttctcgctggggccctcgaggctgacagattcctctccaagcctcactcaggccctcgagggaaggagcgcctgtctctgtgcacgctgttggtgctgagtgatgctcgggtcctgcaggagaggagcctctggacatcgcttagtgccagaagaggcttcgtggttcctgctggtctagaggaaaggtttaggaataaagacacaggctcggacagccctggacaccccagggttaggagccttaaggaaaaatgggaggagaaatggcttttcaaaatggaaagtgttatgcagacagagctggacacagagctgctatttgctaagatccggggtttggaggccgccattcagcaattaaacgccctagcccattcttcactggctcatccttcattggctgaattagtcagaaaatatgcatctcagggggctctgatacgcatcactgctcacgcatgtgtacacgagcacacctggccacgagtccacgccaaacacacgcttgccagggatgctggcagggttctgtggggacagccccaggaggcgatggaccagtggacagccaaggccagcaccaacatcccccagttaccaaagcctggaatcaatgtgcctgactgtgccttgccccagggctggtggatcatcaggtcccagccacagctgtccctgaacatctctcggccactgactgaagggagctgggactcagcccacctgctcccaggtgaaataaacagctttattgctcacacaaagcctgtttggtggtctcttcacacggacgcgcatgaaatttggtgccgtgactcggatcgggggacctcccttgggagatcaatccctcgtcctcctgctctttgctccgtgagaaagatccacctacgacatcgggtcctcagaccgaccagcccaagaaacatctcaccaatttcaaatccgcacacaagaacttccaaacgcctgaaccgcagcggccaggcgttcctccagaacctccttccccaggagcttgctacaagtgccagaaatctgaccaccaggccaaggaatgcctgcagcccaggattcctcctaagccgtgtcccatctgtgcgggaccccactggaaattggactgttcagctcacctggcagccactctcagagcccctggaactctggcccaaggctctctga

SEQ ID NO: 139469 - DNA, 1171 bp, Homo sapiens
atgggcaaagaatacagcttagatgtgaaaaagagtataaaggtattcaaggacaataggagtcaagggaacaggctacaaaagcttggattggaggacacagacagggaagatgcaatgggctttggttcccatagggccaaactgacagtagttgctgccctgggagcttgccattgtcctgagaatgagggtcagacagttcttccatcttccacaagtggcagaagtgataagagggagagagtgtctgctggctacaccccacctttttttgttaaagaaggagtgcccagccctctttttaaactgcatgtggttagatgctgcagtattcagtcacatcactcaagacgatcccagaactgtgccgaagatgtgatacgcaaaacgaagacagatcaggcagtgtcttctatgtcatcagctcctgtaactgttcagcagctgaacatcattccagctttgctagtggccctaacttgtgggtgggcattttgcttaatggtttcccaagaacagtatgatgaggcttcaaagcaagcggcaagttttagcaacaatgctgttattccagtttatatgagtcacatgtccaaaaccttgtataaatctgaagtttttcccataaacacttatgcccagaaaatatgctttattgctcacacaaagcctgtttggtggtctcttcacatggacgcgcatgaaatttggtgccggggacgtcgatcgacggacctcccttgggagaatcaatcccctgtcctcctgctctttgctccgtgagaaagatccacctatgacctcaggtcctcagaccgaccagcccaaggaacatctcaccaattttaaatcaggagcttgctacacgtgccggaaatctggccactaggccaaggaatgcctgcagcctgggattcctattaagccgcatctcatctgtgtgggaccccacttgaaaattcggacttgttcaactcaccttgggcaagccactcccagagcccctggaactctggcccaaggctctctgactgactccttcccagatcttctcggcttagcggctgaagactcacactgcctgattgcctcggaagccccctagaccatcacgcacgccgagcttcgggtaactctcacagtggaagaaggcaggaatgtcaggcca

SEQ ID NO: 139470 - DNA, 2454 bp, Homo sapiens
atggcagaggcaatggcaaaattgggatctgagagaaaaaaagagcagggattaattcaggaactgaaacaaaatcagtctctggaactctggtatgagaacaggaaaggcaaaatcaagactggagaatcaggtgatggagagcctgacgcgagtgaaatttggtgccatgactcagatcgggggacctcccttgggagatcaatcccctgtcctcctgctctttgctccatgagaaagatccacctacaacctcaggtcctcagaccgaccagcccaagaaacatctcaccaatttcaaatccgggagagacaaaggagacacgttttatccgtggacccaaaactccggcgccggtcatggacttgggtaggcagccttcccttggtgtttaatcattgcagggacggcctctctgatcattcagccacatttcaagggtgtcagaccatgcagggatgcctgccttggtccttcacccttagcggcaagtcccgcttttctggggaaggggcaagctgctcctcgccaggccgagctaggtcccaattcttcctcagcctctgctcctccaccctacaatccttttatcacctcccctcctcacacctggtcaggcttacagtttcattccatgactagccctccccctcctgcccagcaatttcctcttaaaaaggtggctggagctaaaggcatagtcaagcggctgaagactgacactgcccgattgccttggaagcccccagaccatcatagacgccgagcttcgggtaactctcacagtggaagggtacagcctccctcccggctgccttcgtgggctcatgttgagtgtctcaggcttttccaggagcacggtgcaagctgtcagtggatctaccgttctgggatctggaggacagtggttttcatgtgcgtccgtgtgaagagaccaccaaacaggctttgtgtgagcaacatggctgtttatttcacctgggtgcagtcgggctgagtccgaaaagagagtcagcgaagggagatgggggtggggccgttttataggatttgggaaggtaatggaaaattacagtcaaagggggttgttctcttttagggtctagggctgtaaagcgtctcagggttgctgccaaacgagccgtgaactgggctggatttttatatttgatgaaaaacagcctaaacgcttcggatttgaaattggtgagatgtttcttgggctggtcagtctgaggacctgaggtggtaggtggagctttctcatggagcaaagagcaggaggacaggggattgatctcccaagggaggtcccctgatccaccaaatttcatgcgcgtctgtgtgaagagaccaccaaacaggctttgtgtgagcaacatggctggttgtttcacctgggtgcaggtgggctgtaaatggcggagccagagttgtgagtccaggcagtctggtcccagagactgtacatttaaccaaggtgcgctgtggcctctgttctgataaaggcaggcactgaggacctcgggagcatagaggagcaacaaccagcccagcctggaggcaccagcagggaagagcctttccagacaagagggctcccgagctgcgtgaagtggaggagaaacacttgaccctgtgatgcaacgctgtaagtaggtgggcaagctacatgaaaagggagatcttttcacctctgccagcccatagaccacactagtccgtgacttaacaggacatgtgttggataaagcaaaacgtgttgctggcgcatcatagagtccatgcttaccagcaggttgcttgaggaattcaacatgccagagtcctttgtactctgtccctccaggtgctgggccaccattcagagaaaatgggcagcaagtctctgcttgggttatgttagctgatgtcacatggaccaaaacaggacacatggctaggcccagagtcagtgtggaagaacatttaaccctgcaagctggtactatcatgatccccattttgcagatgaagaaagtggtaggacaggagatgcactgcccaaatgccctttctggagggaaggacttgcctccagctgtcagctccttcagagtgtgcttgccatagacagctgctttgcccaagggcatctctttcctttccgggtagcccaaatgcaacagcatccaactcataggtagttgtgtggctgcttgagcaggcccagaataatcaccaatgatattaagaccgtcaggttctgtgaagaacctggacactcttaggatatgctgggggccattgcagcattgggttctagtaacttctccccctctctgccgctccctccccgagcttactggaaaagttccctcttcatgtttacaattctccatttcccactgggccataatggcccatgctccataagcatggagactatgcttataatgctctgcattagtcat

SEQ ID NO: 139471 - DNA, 4576 bp, Homo sapiens
atgggatgtcttgggagctgtcattggtacagaatgtggaacgatagaatcaggcttatcaatggtcttcctcaaagatggagagaggaaattatgcactccatccatggacactaccggttatgggaacctgaggttttactttgtgatggcaaagtggatctatatacctgaaaatgttgttaagggacgaaaagagataatccttgtacttgattttacatggtgcatggttcatagaggaatttgtgaccctggaaattctcatgaaaatgacataatcctgtatgcaaaaattgaaggaagaaaagagcatataacactggataccctttcctattcctcatataagtttatattggcccgtcatgtctcaaattctgttctggcagaggacagtgcactagacatggttgcaacttgtgagatggcatcccagacattcccaatgtttatttctgaaagctttggcagttccaggctctcctcttaccataacttttactctatccgtggtgctgaagtcagctttggttgtggtgtcttggccagtggtaaggccctggttttcaacaaagatgggcggcgtcagctaattacatctttccttgacagctcacaatccagaataatctccgtagaactaccaggtgatgcaaagcagtttggaattcagttcagatggtggcaaccgtatcattcttcccagagagaagatgtatgggctattgatgagattatcatgacatctgtgcttttcaacagcattagtcttgactttaccaatcttgtggaggtcactcagtctctgggattctaccttggaaatgttcagccatactgtggccacgactggaccctttgttttacaggagattctaaacttgcctcaagtatgcgctatgtggaaacacaatcaatgcagataggagcatcctatatgattcagttcagtttggtgatgggatgtggccagaaatacaccccacacatggacaaccaggtgaagctggagtactcaaccaaccacggccttacctggcacctcgtccaagaagaatgccttccaagtatgccaagttgtcaggaatttacatcagcaagtatttaccatgccagtgagtttacacagtggaggagagtcatagtgcttcttccccagaaaacttggtccagtgctacccgtttccgctggagccagagctattacacagctcaagacgagtgggctttggacagcatttacattgggcagcagtgccccaacatgtgcagtgggcatggctcatgcgatcatggcatatgcaggtgtgaccaggggtaccaaggcactgaatgccacccagaagctgcccttccgtccacaattatgtcagattttgagaaccagaatggctgggagtctgactggcaagaagttattgggggagaaattgtaaaaccagaacaagggtgtggtgtcatctcttctggatcatctctgtacttcagcaaggctgggaaaagacagctggtgagttgggacctggatacttcttgggtggactttgtccagttctacatccagataggcggagagagtgcttcatgcaacaagcctgacagcagagaggagggcgtcctccttcagtacagcaacaatgggggcatccagtggcacctgctagcagagatgtacttttcagacttcagcaaacccagatttgtctatctggagcttccagctgctgccaagaccccttgcaccaggttccgctggtggcagcccgtgttctcaggggaggactatgaccagtgggcagtcgatgacatcatcattctgtccgagaagcagaagcagatcatcccagttatcaatccaactttacctcagaacttttatgagaagccagcttttgattaccctatgaatcagatgagtgtgtggttgatgttggctaatgaaggaatggttaaaaatgaaaccttctgtgctgccacaccatcagcaatgatatttggaaaatcagatggagatcgatttgcagtaactcgagatttgaccctgaaacctggatatgtgctacagttcaagctaaacataggttgtgccaatcaattcagcagtactgctccagttcttcttcagtactctcatgatgctggtatgtcctggtttctggtgaaagaaggctgttacccggcttctgcaggcaaaggatgcgaaggaaactccagagaactaagtgagcccaccatgtatcacacaggggactttgaagaatggacaagaatcaccattgttattccaaggtctcttgcatccagaaaccctgaggttgctaaatcaattgtgttcaatcccaagattttgccactgagaagagaacagagtagcagcagacatcaggaaccaggcataacttggagaaatggaaatgaagcaaaacgtgctgagattctttatccttgtgtactaagaagctggattaactcaaaagtctataaatattggcagcaaaataaattggaatgtggatacaccaatacatcttcatcctttgattatagcggaactgagaaggaagagatagttccctgcaagaccagattccgatggatccaggagagcagctcacagaaaaacgtgcctccatttggtttagatggagtgtacatatccgagccttgtcccagttactgcagtggccatggggactgcatttcaggagtgtgtttctgtgacctgggatatactgctgcacaaggaacctgtgtgtcaaatgtccccaatcacaatgagatgttcgataggtttgaggggaagctcagccctctgtggtacaagataacaggtgcccaggttggaactggctgtggaacacttaacgatggcaaatctctctacttcaatggccctgggaaaagggaagcccggacggtccctctggacaccaggaatatcagacttgttcaattttatatacaaattggaagcaaaacttcaggcattacctgcatcaaaccaagaactagaaatgaagggcttattgttcagtattcaaatgacaatgggatactctggcatttgcttcgagagttggacttcatgtccttcctggaaccacagatcatttccattgacctgccacaggacgcgaagacacctgcaacggcatttcgatggtggcaaccgcaacatgggaagcattcagcccagtgggctttggatgatgttcttataggaatgaatgacagctctcaaactggatttcaagacaaatttgatggctctatagatttgcaagccaactggtatcgaatccaaggaggtcaagttgatattgactgtctctctatggatactgctctgatattcactgaaaacataggaaaacctcgttatgctgagacctgggattttcatgtgtcagcatctacctttttgcagtttgaaatgagcatgggctgtagcaagcccttcagcaactcccacagtgtacagctccagtattctctgaacaatggcaaggactggcatcttgtcaccgaagagtgtgttcctccaaccattggctgtctgcattacacggaaagttcaatttacacctcggaaagattccagaattggaagcggatcactgtctaccttccactctccaccattgcatcttggccaacttctgtggctctagctcccctgggtggccctccaggtgaccctggtccctgggcaccagcaacaacacttcctccctgtgtccctacagtctcagactcacattctcccaggacccggttcagatggattcaggccaactacactgtgggggctgattcctgggcgattgataatgttgtactggcctcagggtgcccttggatgtgctcaggacgagggatttgtgatgctggacgctgtgtgtgtgaccggggctttggtggaccctattgtgttcctgttgttcctctgccctcgattcttaaagacgatttcaatgggaatttacatcctgacctttggcctgaagtgtatggtgcagagagggggaatctgaatggtaagaaagaagaaatctggattgttgatgacttcattatcgatggaaataatgtaaacaaccctgtgatgctcttggatacatttgattttgggcccagagaagacaattggtttttctatcctggtggtaacatcggtctttattgtccatattcttcaaagggggcacctgaagaagattcagctatggtgtttgtttcaaatgaagttggtgagcattccattaccacccgtgacctaaatgtgaatgagaacaccatcatacaatttgagctcatccgcggatccagtgagactggaattttcaagggacttcggggcgacctggcaccttctgctgcccctctgctaccacagcagcagccacgtcagctctttatgctccaccgagcaccaccccagcagcacctactacgcaggaaccatgcagggctggaggagggaggtcgtgcactttgggaagctgcacctttgtggtttattcctgaagtcatcgttcacttgccactttatcatggggaaatttccacctga

SEQ ID NO: 139472 - DNA, 363 bp, Homo sapiens
ctaaacataggttgtgccaatcaattcagcagtactgctccagttcttcttcagtactctcatgatgctggtatgtcctggtttctggtgaaagaaggctgttacccggcttctgcaggcaaaggatgcgaaggaaactccagagaactaagtgagcccaccatgtatcacacaggggactttgaagaatggacaagaatcaccattgttattccaaggtctcttgcatccagaaaccctgaggttgctaaatcaattgtgttcaatcccaagattttgccactgagaagagaacagagtagcagcagacatcaggaaccaggcataacttggagaaatggaaatgaagcaaaacgtgctgag

SEQ ID NO: 139473 - DNA, 301 bp, Homo sapiens
attctttatccttgtgtactaagaagctggattaactcaaaagtctataaatattggcagcaaaataaattggaatgtggatacaccaatacatcttcatcctttgattatagcggaactgagaaggaagagatagttccctgcaagaccagattccgatggatccaggagagcagctcacagaaaaacgtgcctccatttggtttagatggagtgtacatatccgagccttgtcccagttactgcagtggccatggggactgcatttcaggagtgtgtttctgtgacctgggatatactg

SEQ ID NO: 139474 - DNA, 309 bp, Homo sapiens
gtgtgaccggggctttggtggaccctattgtgttcctgttgttcctctgccctcgattcttaaagacgatttcaatgggaatttacatcctgacctttggcctgaagtgtatggtgcagagagggggaatctgaatggtaagaaagaagaaatctggattgttgatgacttcattatcgatggaaataatgtaaacaaccctgtgatgctcttggatacatttgattttgggcccagagaagacaattggtttttctatcctggtggtaacatcggtctttattgtccatattcttcaaagggggcacc

SEQ ID NO: 139475 - DNA, 512 bp, Homo sapiens
tttatattggcccgtcatgtctcaaattctgttctggcagaggacagtgcactagacatggttgcaacttgtgagatggcatcccagacattcccaatgtttatttctgaaagctttggcagttccaggctctcctcttaccataacttttactctatccgtggtgctgaagtcagctttggttgtggtgtcttggccagtggtaaggccctggttttcaacaaagatgggcggcgtcagctaattacatctttccttgacagctcacaatccagaataatctccgtagaactaccaggtgatgcaaagcagtttggaattcagttcagatggtggcaaccgtatcattcttcccagagagaagatgtatgggctattgatgagattatcatgacatctgtgcttttcaacagcattagtcttgactttaccaatcttgtggaggtcactcagtctctgggattctaccttggaaatgttcagccatactgtggccacgactggaccctttg

SEQ ID NO: 139476 - DNA, 1171 bp, Homo sapiens
acagctggacgggaggtgccctctgcggggctttgacgtccctcgcagaagagtcgcgggctcagcggtcctcgacagcgtccccgtcccgctccccggcggcgcccctccctgtcctcccgggtgcgaaccgggcgctggccggggactccggggacgcgtgcgcccctcgccgcgcgagccccggtcccgcgctcccgcggcccaaagtaactttgggagccgccgtctcccgcggaacttctcggcgggggcccgctcccaggcccgctcccgagcccgttccgctcccgtccgccttcttctcgccttctctccgcgtggctcctccgtcccggcgtctccaaaactgaatgagcgagcggcgcgtagggcgcgcggcggcggcggcggcggcggcggcggcggcatggagcgcagtggctgggcccggcagactttcctcctagcgctgttgctgggggcgacgctgagggcgcgcgcggcggctggctattacccccgcttttcgcccttctttttcctgtgcacccaccacggggagctggaaggggatggggagcagggcgaggtgctcatttccctgcatattgcgggcaaccccacctactacgttccgggacaagaataccatggtaggtaccgcagcacctccgcgctcgccgccgccgggtgcgcccgccagcgcacctttctcatccctttccttcttccaaggggccttggaaacaagaaccatgacaaccctggccccagcgatgcgcttggtccagggagcgagaataaagttagtggagaatggagtcacaagttgggattcattctccatgtccccactccccgaacgcatctcctggtaatgagctggtgcttgtgctaaacgcctgagaattcttggaggccggtgtctttccccctcactccccgtacttaccgcaggcactttaaattgaacctgcgcattttgtttctttactcctaggacttggatttcagacctttgtcctgctcccggtccccccagatgggtccccgggggggcgttgggggctgtcgctgggctttgcgggcaggctggtgacagattgaagcgcccaggtctgtggctgccccgcgccgctcgaccgcaaagttcccgctgctcaccagccaggagtccctggcatttcat

SEQ ID NO: 139477 - DNA, 753 bp, Homo sapiens
atggacagtatgtctggagggggacagtataggaagattaatgggaatccaacatcagtgaagtgccctttgctgctgctgccagccattctgactccagagccggtgaataggtggagacaaagctgcaaagcatttgcacggcattctccgcttgctttcagagtgacaatttcaacaagcaccttttttgacggcttgctggtgacaggactatacacatctacaagtgttcaggcatcacagagcattggaggttccagtgctttcggatttgtgttggaagttctggccagggcaattaggcaggagaaggaaataaagggtattcaattaggaaaagaggaaatcaaattgtccctgtttgcaggcgacatgattgtatatctagaaaaccccattgtctcagcccaaaatctccttaagctgataagcaacttcagcaaagtctcaggatacaaaatcaatgtacaaaaatcacaagcattcttatacaccaacaacagacaaacagagagccaaatcatgagtgaactcccattcacaattgcttcaaagagaataaaatacctaggaatccaacttacaagggatgtgaaggacctcttcaaggagaactacaaaccactgctcaaggaaataaaagaggatacaaacaaatggaagaacattccatgctcatgggtaggaagaatcaatatcgtgaaaatggccatactgcccaaggcaaacaaaaacacacattccacatga

SEQ ID NO: 139478 - DNA, 1404 bp, Homo sapiens
atggggcattttagggggcaattagttcatgaaagtggagccctcatgattggcatcagtgcccttataaaagagaccccagtggactgccttgcctcttccaccatatggtaccagggattttaccctgccggctctcagccagtgacatgggccattgataatgtctacatcggtccccagtgtgaggagatgtgtaatggacaggggagctgtatcaatggaaccaaatgtatatgtgaccctggctactcaggtccaacctgtaaaataagcaccaaaaatcctgattttctcaaagatgatttcgaaggtcagctagaatctgatagattcttattaatgagtggtgggaaaccatctcgaaagtgtggaatcctttctagtggaaacaacctctttttcaatgaagatggcttgcgcatgttgatgacacgagacctggatttatcacatgctaggagtcaacccgtgctcctacagtattctctcaacggtggcctctcgtggagtcttcttcaggagttccttttcagcaattccagcaatgtgggcaggtacattgccctggagatacccttgaaagcccgttctggttctactcgccttcgctggtggcaaccgtctgagaatgggcacttctacagcccctgggttatcgatcagattcttattggaggaaatatttctggtaatacggtcttggaagatgatttcacaacccttgatagtaggaaatggctgcttcacccaggaggcaccaagatgcccgtgtgtggctctactggtgatgccctggtcttcattgaaaaggccagcacccgttacgtggtcagcacagacgttgccgtgaatgaggattccttcctacagatagacttcgctgcctcctgctcagtcacagactcttgttatgcgattgaattggaatactcagtagatcttggattgtcatggcacccattggtaagggactgtctgcctaccaatgtggaatgcagtcgctatcatctgcaacggatcctggtgtcagacactttcaacaagtggactagaatcactctgcctctccctccttataccaggtcccaagccactcgtttccgttggcatcaaccagctccttttgacaagcagcagacatgggcaatagataatgtctatatcggggatggctgcatagacatgtgcagtggccatgggagatgcatccagggaaactgcgtctgtgatgaacagtggggtggcctgtactgtgatgaccccgagacctctcttccaacccaactcaaagacaacttcaatcgagctccatccagtcagaactggctgactgtgaacggagggaaattgagtacagtgtgtggagccgtggcgtcgggaatggctctccatttcagtggg

SEQ ID NO: 139479 - DNA, 2507 bp, Homo sapiens
ggttgtagtcgattattagtcactgtggatctaaacctcactaatgctgagttcatccaattttacttcatgtatgggtgcctgattacaccaaacaaccgtaaccaaggtgttctcttggaatattctgtcaatggaggcattacctggaacctgctcatggagattttctatgaccagtacagtaagcccggatttgtgaatatccttctccctcctgatgctaaagagattgccactcgcttccgctggtggcagccaagacatgacggcctggatcagaacgactgggccattgacaatgtcctcatctcaggctctgctgaccaaaggaccgttatgctggacaccttcagcagcgccccagtaccccagcatgagcgctcccctgcagatgccggccctgtcgggaggatcgcctttgacatgtttatggaagacaaaacttcagtgaatgagcactggctattccatgatgattgtacagtagaaagattctgtgactcccctgatggtgtgatgctctgtggcagtcatgatggacgggaggtgtatgcagtgacccatgacctgactcccactgaaggctggattatgcaattcaagatctcagttggatgtaaggtgtctgaaaaaattgcccagaatcaaattcatgtgcagtattctactgacttcggtgtgagttggaattatctggtccctcagtgcttgcctgctgacccaaaatgctctggaagtgtttctcagccatctgtattctttccaactaaagggtggaaaaggatcacctacccacttcctgaaagcttagtgggaaatccggtaaggtttaggttctatcagaagtactcagacatgcagtgggcaatcgataatttctacctgggccctggatgcttggacaactgcaggggccatggagattgcttaagggaacagtgcatctgtgatccgggatactcagggccaaactgctacttgacccacactctgaagactttcctgaaggaacgctttgacagtgaagaaatcaaacctgacttatggatgtccttagaaggtggaagtacttgcactgagtgtggaattcttgccgaggacactgcactctattttgggggatccactgtgagacaagcggttacacaagatttggatcttcgaggtgcaaaacacgactacatacttcttcctgaagatgccctcaccaacacaactcgacttcgctggtggcagccttttgtgatcagcaatggaattgtggtctctggggtggagcgtgctcagtgggcactggacaacattttgattggtggagcagaaatcaatcccagccaattggtggacacttttgatgatgaaggcacttcccatgaagaaaactggagtttttaccctaatgctgtaaggacagcaggattttgtggcaatccatcctttcacctctattggccaaataaaaagaaggacaagactcacaatgctctctcctcccgagaactcattatacagccaggatacatgatgcagtttaaaccttttggtttctgcagatcggattcctggcagctcgtacagacccagtgccttccttcctcttctaacagcattggctgctcccctttccagttccatgaagccaccatctacaactctgtcaacagctcaagctggaaaagaatcaccatccagctgcctgaccatgtctcctctagtgcaacacagttccgctggatccagaagggagaagaaactgagaagcaaagctggagcaattgaccacgtgtacattggagaggcttgccccaagctctgcagcgggcacggatactgcacgaccggtgccatctgcatctgcgacgagagcttccaaggtgatgactgctctgttttcagtcacgaccttcccagttatattaaagataattttgagtccgcaagagtcaccgaggcaaactgggagaccattcaaggtggagtcataggaagtggctgtgggcagctggcccgatacgcccatggagactcactgtactttaatggctgtcagatcaagcgagcagctaccaagcctctgggatctcactcgagcaagcaaaatcatgtttgttttgcaaattggggagcatgttcgcagacgggacagcttgcaacagtgacctggagttggcccccacggtgttggacaagggcagttgttgctgcaattacagcgttcaacaacgggattcacctggcatgttcattcgcccagcaccagccaaaggactttcacacaagctcagagagtgtcttacaatgtccccctggaggcacggatgaaaggagtcttactgcgctggtggcaaccacgccacaatggaacaggtcatgatcaatgggctttggaccatgtggaggtcgtcctcactcgcaaacaaaattacatgatgaatttttcacgacaacatgggctcagacatttctacaacagaagacgaaggtcacttaggcgatacccatga

SEQ ID NO: 139480 - DNA, 11632 bp, Homo sapiens
cacgcgtgggctcggcgggggcccgctcccaggcccgctcccgagcccgttccgctcccgtccgccttcttctcgccttctctccgcgtggctcctccgtcccggcgtctccaaaactgaatgagcgagcggcgcgtagggcgscggcggcggcggcggcggcggcggcggcggcatggagcgcagtggctgggcccggcagactttcctcctagcgctgttgctgggggcgacgctgagggcgcgcgcggcggctggctattacccccgcttttcgcccttctttttcctgtgcacccaccacggggagctggaaggggatggggagcagggcgaggtgctcatttccctgcatattgcgggcaaccccacctactacgttccgggacaagaataccatgtgacaatttcaacaagcaccttttttgacggcttgctggtgacaggactatacacatctacaagtgttcaggcatcacagagcattggaggttccagtgctttcggatttgggatcatgtctgaccaccagtttggtaaccagtttatgtgcagtgtggtagcctctcacgtgagtcacctgcccacaaccaacctcagtttcatctggattgctccacctgcgggcacaggctgtgtgaatttcatggctacagcaacacaccggggccaggttattttcaaagatgctttagcccagcagttgtgtgaacaaggagctccaacagatgtcactgtgcacccacatctagctgaaatacatagtgacagcattatcctgagagatgactttgactcctaccaccaactgcaattaaatccaaatatatgggttgaatgtaacaactgtgagactggagaacagtgtggcgcgattatgcatggcaatgccgtcaccttctgtgaaccatatggcccacgagaactgattaccacaggccttaatacaacaacagcttctgtcctccaattttccattgggtcaggttcatgtcgctttagttattcagaccccagcatcatcgtgttatatgccaagaataactctgcggactggattcagctagagaaaattagagccccttccaatgtcagcacaatcatccatatcctctaccttcctgaggacgccaaaggggagaatgtccaatttcagtggaagcaggaaaatcttcgtgtaggtgaagtgtatgaagcctgctgggccttagataacatcttgatcatcaattcagctcacagacaagtcgttttagaagatagtctcgacccagtggacacaggcaactggcttttcttcccaggagctacagttaagcatagctgtcagtcagatgggaactccatttatttccatggaaatgaaggcagcgagttcaattttgccaccaccagggatgtagatctttccacagaagatattcaagagcaatggtcagaagaatttgagagccagcctacaggatgggatgtcttgggagctgtcattggtacagaatgtggaacgatagaatcaggcttatcaatggtcttcctcaaagatggagagaggaaattatgcactccatccatggacactaccggttatgggaacctgaggttttactttgtgatgggaggaatttgtgaccctggaaattctcatgaaaatgacataatcctgtatgcaaaaattgaaggaagaaaagagcatataacactggataccctttcctattcctcatataaggttccgtctttggtttctgtggtcatcaatcctgaacttcagactcctgctaccaaattttgtctcaggcaaaagaaccatcaaggacataataggaatgtctgggctgtagactttttccatgtcttgcctgttctcccttctacaatgtctcacatgatacagttttccatcaatctgggatgtggaacgcatcagcctggtaacagtgtcagcttggaattttctaccaaccatgggcgctcctggtccctccttcacactgaatgcttacctgagatctgtgctggaccccacctcccccacagcactgtctactcctctgaaaactacagtgggtggaaccgaataacaattccccttcctaacgcagcactaacccggaacaccaggattcgctggagacaaacaggaccaatccttggaaacatgtgggcaattgataatgtttatattggcccgtcatgtctcaaattctgttctggcagaggacagtgcactagacatggttgcaagtgtgaccctggattttctggcccagcttgtgagatggcatcccagacattcccaatgtttatttctgaaagctttggcagttccaggctctcctcttaccataacttttactctatccgtggtgctgaagtcagctttggttgtggtgtcttggccagtggtaaggccctggttttcaacaaagaagggcggcgtcagctaattacatctttccttgacagctcacaatccaggtttctccagttcacactgagactggggagcaaatctgttctgagcacgtgcagagcccctgatcagcctggtgaaggagttttgctgcattattcttatgataatgggataacttggaaactcctggagcattattcatatctcagctatcatgagcccagaataatctccgtagaactaccaggtgatgcaaagcagtttggaattcagttcagatggtggcaaccgtatcattcttcccagagagaagatgtatgggctattgatgagattatcatgacatctgtgcttttcaacagcattagtcttgactttaccaatcttgtggaggtcactcagtctctgggattctaccttggaaatgttcagccatactgtggccacgactggaccctttgttttacaggagattctaaacttgcctcaagtatgcgctatgtggaaacacaatcaatgcagataggagcatcctatatgattcagttcagtttggtgatgggatgtggccagaaatacaccccacacatggacaaccaggtgaagctggagtactcaaccaaccacggccttacctggcacctcgtccaagaagaatgccttccaagtatgccaagttgtcaggaatttacatcagcaagtatttaccatgccagtgagtttacacagtggaggagagtcatagtgcttcttccccagaaaacttggtccagtgctacccgtttccgctggagccagagctattacacagctcaagacgagtgggctttggacagcatttacattgggcagcagtgccccaacatgtgcagtgggcatggctcatgcgatcatggcatatgcaggtgtgaccaggggtaccaaggcactgaatgccacccagaagctgcccttccgtccacaattatgtcagattttgagaaccagaatggctgggagtctgactggcaagaagttattgggggagaaattgtaaaaccagaacaagggtgtggtgtcatctcttctggatcatctctgtacttcagcaaggctgggaaaagacagctggtgagttgggacctggatacttcttgggtggactttgtccagttctacatccagataggcggagagagtgcttcatgcaacaagcctgacagcagagaggagggcgtcctccttcagtacagcaacaatgggggcatccagtggcacctgctagcagagatgtacttttcagacttcagcaaacccagatttgtctatctggagcttccagctgctgccaagaccccttgcaccaggttccgctggtggcagcccgtgttctcaggggaggactatgaccagtgggcagtcgatgacatcatcattctgtccgagaagcagaagcagatcatcccagttatcaatccaactttacctcagaacttttatgagaagccagcttttgattaccctatgaatcagatgagtgtgtggttgatgttggctaatgaaggaatggttaaaaatgaaaccttctgtgctgccacaccatcagcaatgatatttggaaaatcagatggagatcgatttgcagtaactcgagatttgaccctgaaacctggatatgtgctacagttcaagctaaacataggttgtgccaatcaattcagcagtactgctccagttcttcttcagtactctcatgatgctggtatgtcctggtttctggtgaaagaaggctgttacccggcttctgcaggcaaaggatgcgaaggaaactccagagaactaagtgagcccaccatgtatcacacaggggactttgaagaatggacaagaatcaccattgttattccaaggtctcttgcatccagcaagaccagattccgatggatccaggagagcagctcacagaaaaacgtgcctccatttggtttagatggagtgtacatatccgagccttgtcccagttactgcagtggccatggggactgcatttcaggagtgtgtttctgtgacctgggatatactgctgcacaaggaacctgtgtgtcaaatgtccccaatcacaatgagatgttcgataggtttgaggggaagctcagccctctgtggtacaagataacaggtgcccaggttggaactggctgtggaacacttaacgatggcaaatctctctacttcaatggccctgggaaaagggaagcccggacggtccctctggacaccaggaatatcagacttgttcaattttatatacaaattggaagcaaaacttcaggcattacctgcatcaaaccaagaactagaaatgaagggcttattgttcagtattcaaatgacaatgggatactctggcatttgcttcgagagttggacttcatgtccttcctggaaccacagatcatttccattgacctgccacaggacgcgaagacacctgcaacggcatttcgatggtggcaaccgcaacatgggaagcattcagcccagtgggctttggatgatgttcttataggaatgaatgacagctctcaaactggatttcaagacaaatttgatggctctatagatttgcaagccaactggtatcgaatccaaggaggtcaagttgatattgactgtctctctatggatactgctctgatattcactgaaaacataggaaaacctcgttatgctgagacctgggattttcatgtgtcagcatctacctttttgcagtttgaaatgagcatgggctgtagcaagcccttcagcaactcccacagtgtacagctccagtattctctgaacaatggcaaggactggcatcttgtcaccgaagagtgtgttcctccaaccattggctgtctgcattacacggaaagttcaatttacacctcggaaagattccagaattggaagcggatcactgtctaccttccactctccaccatttctcccaggacccggttcagatggattcaggccaactacactgtgggggctgattcctgggcgattgataatgttgtactggcctcagggtgcccttggatgtgctcaggacgagggatttgtgatgctggacgctgtgtgtgtgaccggggctttggtggaccctattgtgttcctgttgttcctctgccctcgattcttaaagacgatttcaatgggaatttacatcctgacctttggcctgaagtgtatggtgcagagagggggaatctgaatggtgaaaccatcaaatctggaacatctctaatttttaaaggggaaggactaaggatgcttatttcaagagatctagattgtacaaatacaatgtatgtccagttttcacttagatttatagcaaaaagtaccccagagagatctcactctattctgttacaattctccatcagtggaggaatcacttggcacctgatggatgaattttactttcctcaaacaacgaatatacttttcatcaatgttcccttgccatacactgcccaaaccaatgctacaagattcagactctggcaaccttataataacggtaagaaagaagaaatctggattgttgatgacttcattatcgatggaaataatgtaaacaaccctgtgatgctcttggatacatttgattttgggcccagagaagacaattggtttttctatcctggtggtaacatcggtctttattgtccatattcttcaaagggggcacctgaagaagattcagctatggtgtttgtttcaaatgaagttggtgagcattccattaccacccgtgacctaaatgtgaatgagaacaccatcatacaatttgagatcaacgttggctgttcgactgatagctcatccgcggatccagtgagactggaattttcaagggacttcggggcgacctggcaccttctgctgcccctctgctaccacagcagcagccacgtcagctctttatgctccaccgagcaccaccccagcagcacctactacgcaggaaccatgcagggctggaggagggaggtcgtgcactttgggaagctgcacctttgtggatctgtccgtttcagatggtaccagggattttaccctgccggctctcagccagtgacatgggccattgataatgtctacatcggtccccagtgtgaggagatgtgtaatggacaggggagctgtatcaatggaaccaaatgtatatgtgaccctggctactcaggtccaacctgtaaaataagcaccaaaaatcctgattttctcaaagatgatttcgaaggtcagctagaatctgatagattcttattaatgagtggtgggaaaccatctcgaaagtgtggaatcctttctagtggaaacaacctctttttcaatgaagatggcttgcgcatgttgatgacacgagacctggatttatcacatgctagatttgtgcagttcttcatgagactgggatgtggtaaaggcgttcctgaccccaggagtcaacccgtgctcctacagtattctctcaacggtggcctctcgtggagtcttcttcaggagttccttttcagcaattccagcaatgtgggcaggtacattgccctggagatacccttgaaagcccgttctggttctactcgccttcgctggtggcaaccgtctgagaatgggcacttctacagcccctgggttatcgatcagattcttattggaggaaatatttctggtaatacggtcttggaagatgatttcacaacccttgatagtaggaaatggctgcttcacccaggaggcaccaagatgcccgtgtgtggctctactggtgatgccctggtcttcattgaaaaggccagcacccgttacgtggtcagcacagacgttgccgtgaatgaggattccttcctacagatagacttcgctgcctcctgctcagtcacagactcttgttatgcgattgaattggaatactcagtagatcttggattgtcatggcacccattggtaagggactgtctgcctaccaatgtggaatgcagtcgctatcatctgcaacggatcctggtgtcagacactttcaacaagtggactagaatcactctgcctctccctccttataccaggtcccaagccactcgtttccgttggcatcaaccagctccttttgacaagcagcagacatgggcaatagataatgtctatatcggggatggctgcatagacatgtgcagtggccatgggagatgcatccagggaaactgcgtctgtgatgaacagtggggtggcctgtactgtgatgaccccgagacctctcttccaacccaactcaaagacaacttcaatcgagctccatccagtcagaactggctgactgtgaacggagggaaattgagtacagtgtgtggagccgtggcgtcgggaatggctctccatttcagtgggggttgtagtcgattattagtcactgtggatctaaacctcactaatgctgagttcatccaattttacttcatgtatgggtgcctgattacaccaaacaaccgtaaccaaggtgttctcttggaatattctgtcaatggaggcattacctggaacctgctcatggagattttctatgaccagtacagtaagcccggatttgtgaatatccttctccctcctgatgctaaagagattgccactcgcttccgctggtggcagccaagacatgacggcctggatcagaacgactgggccattgacaatgtcctcatctcaggctctgctgaccaaaggaccgttatgctggacaccttcagcagcgccccagtaccccagcacgagcgctcccctgcagatgccggccctgtcgggaggatcgcctttgacatgtttatggaagacaaaacttcagtgaatgagcactggctattccatgatgattgtacagtagaaagattctgtgactcccctgatggtgtgatgctctgtggcagtcatgatggacgggaggtgtatgcagtgacccatgacctgactcccactgaaggctggattatgcaattcaagatctcagttggatgtaaggtgtctgaaaaaattgcccagaatcaaattcatgtgcagtattctactgacttcggtgtgagttggaattatctggtccctcagtgcttgcctgctgacccaaaatgctctggaagtgtttctcagccatctgtattctttccaactaaagggtggaaaaggatcacctacccacttcctgaaagcttagtgggaaatccggtaaggtttaggttctatcagaagtactcagacatgcagtgggcaatcgataatttctacctgggccctggatgcttggacaactgcaggggccatggagattgcttaagggaacagtgcatctgtgatccgggatactcagggccaaactgctacttgacccacactctgaagactttcctgaaggaacgctttgacagtgaagaaatcaaacctgacttatggatgtccttagaaggtggaagtacttgcactgagtgtggaattcttgccgaggacactgcactctattttgggggatccactgtgagacaagcggttacacaagatttggatcttcgaggtgcaaagttcctgcaatactgggggcgcatcggtagtgagaacaacatgacctcttgccatcgtcccatctgccggaaggaaggcgtgctgttggactactctaccgatggaggaattacctggactttgctccatgagatggattaccagaaatacatttctgttagacacgactacatacttcttcctgaagatgccctcaccaacacaactcgacttcgctggtggcagccttttgtgatcagcaatggaattgtggtctctggggtggagcgtgctcagtgggcactggacaacattttgattggtggagcagaaatcaatcccagccaattggtggacacttttgatgatgaaggcacttcccatgaagaaaactggagtttttaccctaatgctgtaaggacagcaggattttgtggcaatccatcctttcacctctattggccaaataaaaagaaggacaagactcacaatgctctctcctctccgagaactcattatacagccaggatacatgatgcagtttaaaattgtggtgggttgtgaagccacttcttgtggtgaccttcattccgtaatgctggaatacactaaggatgcaagatcggattcctggcagctcgtacagacccagtgccttccttcctcttctaacagcattggctgctcccctttccagttccatgaagccaccatctacaactctgtcaacagctcaagctggaaaagaatcaccatccagctgcctgaccatgtctcctctagtgcaacacagttccgctggatccagaagggagaagaaactgagaagcaaagctgggcaattgaccacgtgtacattggagaggcttgccccaagctctgcagcgggcacggatactgcacgaccggtgccatctgcatctgcgacgagagcttccaaggtgatgactgctctgttttcagtcacgaccttcccagttatattaaagataattttgagtccgcaagagtcaccgaggcaaactgggagaccattcaaggtggagtcataggaagtggctgtgggcagctggccccctacgcccatggagactcactgtactttaatggctgtcagatcaggcaagcagctaccaagcctctggatctcactcgagcaagcaaaatcatgtttgttttgcaaattgggagcatgtcgcagacggaccagctgccaacagtgacctgagtggcccccacgctgtggacaaggcagtgctgctgcaatacagcgtcaacaacgggatcacctggcatgtcatcgcccagcaccagccaaaggacttcacacaagctcagagagtgtcttacaatgtccccctggaggcacggatgaaaggagtcttactgcgctggtggcaaccacgccacaatggaacaggtcatgatcaatgggctttggaccatgtgggaggtcgtcctagtaaggcactcgcaaacaaaattacgtgatgaatttttcacgacaacatgggctcagacatttctacaacagaagacgaaggtcacttaggcgatacccatgaaggaatcaaaaagtttattttttttcttccaacatgtgatgtgttggctctccattcttttaaatctcgcacttacatctggatatcagggaaatatctgtggaagggacttgggtggattacctgaaaggcccttcttcaaggccggtgtacaccactttcccacactgtggaactaatgacagtggacttatttgctcataagtaaatgtcttcatgttgatgtgtccgtgaaagttgtgatctgttgtaatatcagttacagtggcagtattgacaataagaaacagtttaacagaaaaatgaaatttaagcacaaaaaatttaagagattttatgtttaaaatggcatttagcacagtatttaacattcttggtcacaaagctatttaagtggactgtatttcagctatgtctcatgttttatatgattaaattatcattgtttgtcctttatgtattctcttctacaatacaacacattgaaactgtatttacttgttatgttgtaatattttgctgctgaatttggggctacttatattctgcagaaaattaattgaaatacctattcaagaagatagttgtaaagatattgtatctcctttaatatactccttaaaaatgtatgttggtttagcgttgttttgtggaataagaaaaaggcttgaaccccggaaaaaattttcctactttaaattgtggatgaaagacccctatcctcccccacaaaaaagttcccccaattcccttgtcctaaagaatctttttttaagtgttcctgtggcctgatttacctaacagtaactgcccattttttgtcctgtgataatcagagtgattttgtaaaacagtggttgttttttccattgtgttttcctccgtggattgttttttctgcgggtcatattcataccttctgatgaagttgtacaacaccagcaacattataatggccctgtagctctgaatgctatttgtgtaactgaaaggttgcactctagggtgaaccaagctataaaagcccatgcttaaataaaaattatgtccaaaagccattgaaaaaaaa

SEQ ID NO: 139481 - DNA, 296 bp, Homo sapiens
tgtgtagatggggttttaggtggtgaagattataatcacaacaacatcaaccagtggactgcaagcatagtggaacaatccttaacacacctggttaagttgggaaaagcttataaatatattgatagttgtccctcatatgaatcctgtgcttgccttgcatcctgtgagagcctcaggcccagctgcaggcttgtctgctggcagggtagtgtcagcagtcctggctttttgcttaatgacaacgctgcatcaatgcctcttcctgcaattgcttctacaacagcttctatgag

SEQ ID NO: 139482 - DNA, 2332 bp, Homo sapiens
  misc_feature (1)...(2332): n = a,t,c or g
atggctcggagtctcggggtcctggtggcactgccattcccgctcccggttggcttcaatgctgaggaagcccacaatattgtcaaagagttcagccctgggaagagtcatccaagagaaagtttgagtcagcagagagaaacacttgttcaggctggtgcctttcattggtttgggtggagagggaaggagaaactaaagcccaagttcaacacatttgggagactcccaaatgagatgttagaacaatggttatcacccaccaaccagtgtgtagatggggttttaaaggtggtgaagattaataatcacaacaacatcaaccagtggactgcaagcatagtggaacaatcccttaacacacctggttaagttgggaaaagcctataaatatattgtgacctgtgcagtggtccagaagagcgcatatggctttcacacagccagctcctgtttttgggataccacatctgatggaacctgtaccgtaagattngggagaaccggaccatgaacttgtattgtcaacgttttttgccattgcttatttgttctttaactggactaaaaatgttgggctaaagccatttaacttaagaatttgtcagtgtatcctttccaaacagagtgatagttgattactagggtgctagatgaaaagcgtgcagtatgctttaaagctatcaacaaaaactggaatattataagcaagccatatcatagtaattggcagattagctccatattccatacagcatcgtttaaataggaaaaatttaatgctagcaaaaaaataaatttagaaatatggcatgacatgaaaatacaatcttatatttacaccagcttttcactaatattttgtacctaaggtgatggggaactccattcagataataaaattctctttcagctagagaagttaacaggaataaatatatggaacaaaaaagctgccaagggttaaatgtggagaaaatgatgagaattagctaacatttttaagtttttttaaactttcttcccctcagttgtacttaatatttagtggaaagtaataatttttttaattttctatcaactaatagtatagtaacaactatgattaacttgtttactttttctgaggattagtaaatcaattttttttaatttcaaatttttggatttacacttgagggtaaattaaatctggtaaactgaatttcctagttaaataaaattagttgcagtatatgatgaacagtgtatgactcaaacagctgccttacaattcactcattccatgtggaacaaacatttatcagatgcctattatgggcatatgtctctgctaccgcaccatagttggcaatgtgctgtgcaaatgctaagttccttttagcaattgttcagttggaagacgtattaatatttggggaaggaaaagaaagtagttgttttccaagggaggaaaaaagtgaatctggttccacatatggaagtaagcaaaatgaaaagcacttattgctttctgacagaattatagatgtaattttaagagttgctcctagcaagttaaaagtgcatataaaatatgcaactcttagttaaaggccttattatcagtcttacctatacaagtagtaaattttgtcattgctttagttacaaccatctgtaaataacttaaacgactctattatgtggggttcaaattgagtggaataaagtatagattaaaagtatccaatccttatcccggtatcttcagggctaatgaaatggtatttaaatttattatgaaaatagatgaaaaattagggtacacagctggccaccaaatgcgaagtcaatctgctacttaaccctgaaaacaaaatcagttttgcatattaccactaacactaatacatatagagagcggaaccataactcattgaattttggagaggaataagcttagcgttaatattgaccaatattaaggcaatattcttgtaggaatactatgtgcaatgtttgatattttgccaaataacaataattaataattgttcaatgtttaagaataatattaacaaaataaaggagtttaatgcagtgatcttttggtttttgccacatcaaaaattctcagtcattattcatgtttcttttatgctgctggcttttgtgccctggaagatcataatagtgaccaaaatatacatggcagacttgttttttattattgttggtttaagcataatttaagaaaaaaaatttttacctggtgaacttgctatctgctctgtttctagttaaaatataataaatattatcttcctgtgctgtaaaaaaaaaaaaaaat

SEQ ID NO: 139483 - DNA, 2964 bp, Homo sapiens
gtcctcaaagcaaaccagcaacattgagaatgggtgtcaagggcaccagagaggaaaagcacttgattttcacccactattgttttgctaagaacaggatgtgctgcttcattcacctagttgccttaatgggaagcctcaggaagaaggctggaggggaattaacagaaccgctgagtaaggaggctgttctgcgtgcagacaggaggctctccagtgggtcgtggtagtttgcatcacctctggcttgtcttttctcatgtcctttctctcctctgttctccctgcctcctggctccaggaatgtgggggtttcacgaccgggacctggtgttacggaaagctctctataccatgatgaggacgggagctgagagggaagccctgaagcggaggtggaggtggcagcagacgcagcagaataaggagtcagggctggtgtacacagaggaggagtgggagcgggagtggacggagctgctgaagctggcctccagcgagccgcgcacacacttcagcaagaatggcggcacgggcgggggacatttaccaccagagggcaagccgctgcatggctgctcctcactgctcagatctggaaagggtggccacgtcaaggcagaacccagcaggctgcagcaaagccaggccaagccacccctgacctctcaaatcagagcactgcactttccaatcccaagccagattaatgaaaagcccggagctggtcattggtcagcaaagctgcatttcccttattggcagcttggggaagctggagaagaagagggctcatcaccacctgacattatgagatgtttgttaacctgcttatctgtccccagcacagccgtgatccccctgacggattctgagcacaagctgctgcctctgcactttgcagtggaccctggcaaggactgggagtgggggaaagacgacaacgataacgcccggctggcccaccttatcctgtcgctagaagccaagctgaaccttctgcacagctacatgaacgtgacgtggatccggatcccctccgagacacgggcgcccctggcacagccggagtctcccacggcctcggcaggggaggacgtgcagtccctggccgactcgctggactcggaccgcgattcggtgtgcagcaattctaacagcaataacggcaagaacggcaaggacaaggagaaggagaagcagcgcaaggagaaggacaagacgcgcgccgactccgtggccaacaagctgggcagcttcagcaagacgctgggcatcaagctgaagaaaaacatgggcggcctcggcggcctggtgcacggcaagatgggccgcgccaactccgccaatggcaagaacggggactcggccgagcggggcaaggagaagaaggccaagtcgcgcaagggcagcaaggaggagtctggtgcgtcggccagcacgtcgccgtcggaaaagaccacgccgtcgcccacagacaaggcagcgggcgcgtcgccggcggagaagggcggtgggccgcggggcgacgcctggaagtacagcacggatgtgaagctgagcctcaacatcctgcgcgccgccatgcagggggagcgcaagttcatcttcgccggcctgctgctcaccagccaccggcaccagttccacgaggagatgatcggctactacctgacgagcgcgcaggagcgcttcagcgccgagcaggagcagcggcgccgcgacgccgctactgcggccgccgctgccgccgccgccgccgccgccacggccaagcggccgccgcgcagaccggagacggagggcgtgccggtcccggagcgcgcctctccgggcccacccacgcagctggtgctcaagctcaaggagcggccgagccccgggcccgcggcagggcgtgcggcgcgggcggcggcgggcggcacggcctccccggggggaggcgcgcggcgtgcgagcgccagcggaccagtgcctggccgcagccccccggcgccagcgcgccagagcgtcatccacgtgcaggcgtcgggcgcgcgggacgaggcgtgcgcgccggccgtgggggcgctgcggccgtgcgccacgtacccgcagcagaaccgctcgctgtcgtcgcagagctacagcccggcgcgcgccgccgccctgcgcaccgtcaacacggtcgagtcgctggcgcgcgcggtgcccggggccctaccgggcgcggcggggaccgcgggggcggccgagcacaagtcgcagacctacaccaacgtgtttggtaaagcatttgtatacaacagagtatgtgcgcttctcaagggtgtatatttgctctatgttttgagaacctcttctattgaatttgaaggaaccagtcagagagctccaggaccaagatgcaaaaactgggacctgacagccgctctgagcgactatgagcagctccgccaggtgcacacagccaatctgccacatgtgttcaatgaagggcggggtcccaagcagccagagcgagagccacagcccgggcacaaggtggagcgaccctgcctgcagaggcaggacgacattgcccaagtttccctgaagctcctggggcacgcagttatcatccatcttcactgtgctggagcacaggctctggtggatgctcctccagatgagagtcggggaagggggctagaaggacccttctctctgctaccagagagattggcagaatcagggcctaaaaagcggctttcccgggggatttcccacgccagctcagccatcgtctccctggcccggtcccacgtggcaagtgaatgcaacaacgagcagttccccctggagatgccaatctacacattccagttgccagacctgagcgtgtacagcgaggatttcaggagcttcatcgagcgggacttgatcgagcaggcaacaatggtggctttggagcaggcagacaactcctccgtgggtgttgaatga

SEQ ID NO: 139484 - DNA, 1119 bp, Homo sapiens
atgcacaaggcactgtccaacgtccagcagcagggcatatgtgggtccttggggccatattcctttaacctgtggacacttcacccacggctggaggaaattcccgtcagcttgtgggagaggccatctgagagagatttcagcacatccatcccccccgagatccagaaccgtatcaagtcctaccccagtcccgcagagcagcttcttcctccacagcttctgagctgcaccgaagcaggcctccgccagcctttgctacccaaggctgatgttgggtttttaacactcagccaagtcatagggaagagactaaatgagttaatatgtgagaggctcttggaacagggccaggcccatgatgggctctctggtgggctctcaagctctcgccagccgatgatcattgggccctttgatgctgagtgggcagaagctgcagacttcatacactatggaatactatgcagccataaaaagaacaagatcgtgtctcttgtaggaacatggttggagctggaggccattatccttaagaaactaatgcaagaacagaaaaccaaataccacatgttcttacttgactccctgtcccacgggatgcagcaggcagaaagggtgctcatcgcagatggaacaatgcttttatctgcccagtaccagtttgaaaacaaccttcttgtcccaatcctgagagtatcctttcgaaagagcctccagaggaaagaagagccaggccgaaaggcaaagaaatcccagacctcaggggaaggaatcaagaaaagaaggttctggtttgagtggaaggagcccgtggcactttctagccaggggtggtatgaggccaaaggttctgagaggcctgagaaaggacacctaggtctgctgagggcggagtctttccaagatctgaggactgccttaatttccaagccctacttctcagtcccagggaaagttggcccagctataaaatgccctgaaactctcccagaactcaaaacatacccacagtacggtgtcactcttggggaacctgtccgtaatgaacagcaacaagcatcttctttcccttccctctccaacacgcacctttccaagaagagaaatgagagctag

SEQ ID NO: 139485 - DNA, 6464 bp, Homo sapiens
ctagttgtggtgacacgtgtaagatgagcaagaacactagattgagctaatgctgactcttgtctttgtagaatgaccgccagccttttttcttttctttggaacactattctgcaggtgcatcagctgctttttcttttttctctttgcagttaaaaattcaagatgtccatttacgctttgaagatggtgtcaccaatctgttgaatgaatgacattcacgaataaagacagtcatcctattttcttctttgtcttttttacctcaggtacagaaactaatgcggaaaaagcaattagacgtagcattgtaaaagagtgactaccagaaggaaagccattcggagcagagcaggtgttcttgtgacacacaggaggccatggccaggagcatggagagtcgcagccatcactacgtcctggagcctgtgtttgcatctgctcttttgaagagaaactgctccaagaagcccctgcataggtcttaactgagtaaaagaaacaaacctattctaacctagtatctcttaacctctaatacaaagctgcaataccggcaaatcatggaattcctcaagctcaggagaggagtggggttatgtggattgtcctggattggtagccttttcgttgcttttgttgtaagaagtgattacatcgttatggactatttcagctgccgagaatggtggtattttgctttgaatgctaacttgtatgagatcagagagcagaggaaacgttgcacctgggactttatgttgcaccgcgctcgtggtgtccagtgtctctggatctacaacgtttgtgtttttgtttatttgcttttgttttcacccaaacaggaggaaatgtgtcggattgaagaggaacagagctaacagcagcatatcacagcttgcttttatctttgagtactcatctctgctcctttgtgattgacacagagtctgcgggagcctcagtttgattctccaggagcctgtccgggagccccagaacccggtggaggcagtgggatgctgcagtatctccagtcctggtttcctggatggggtggctggtacgggcagcagaccccagaagaacatcatcataactgtgatcagtctgcttgctggtgcttttttattcttccacgttttttcttacagtcttttctcccttaccatttaggcactgaggagttttttgaccccactgcagatgcctcgtgtatgaacacgtatacaaagcgagatcatgtctttgccaaactgaatttgcagttgcagcgaggtacagtgaccacaggtctgttaataaggctatagtttttgccttgttccgtgttcttattcctgttctttcctttagctgcagatccagatggccccgtttttgagatgctgtatgagagaaatccggcgcacagccactttgagaggcggctcaatgtcagcacaaggcccttgaacatgatgtagcacttttgttcacccagccgtgtgaaaattctgactctgctgtgtatttccaaccttgcaggttttggttatcagtctgaacttgagctgagagtggctgaagctgcccgaagacaatataacagcttgagcaccatggataaagctgttgggtttcggcagttatggttaatgactgttttatttgtacaggaggagagtaaacgatggaccgtgcggctggatatttctgcccctcaggtgatatttcctgatgatattacattaagggaaagaggagggaaatagcagacatatatttgaatcttcttttttttatcttcagataactccaggaggaaaagtagggatgggtcagcatctgaagagacccagtttagtgatgatgaatataagacccccctggccacacctcctaacaccccacctcccgagtcaagcagcagcaacggagagaaaacacctcccttttctggagttgagttcagtgaagaacagcttcaagcacatttaatgagcacaaagatgtatgagaggtactcgctgtcatttatggacctccagatcatggttggacgagtgaaagacaattggaagcatgtccaggatattgacgtgggaccaacacatgtggtagagaagttcaacgttcacctacagttagagcgtcgattgatttatacttcagatcccaaatatccaggagccgtgctctcaggcaacttaccagacttaaaaatccacattaatgaagataaaatatctgcactaaagaattgctttgctctcctcaccaccccagaaatgaaaacttctgacactcagattaaagaaaagatttttccccaggaggagcagcggggaagtttgcaagactccgtaatgaatttaacccagagcattgtgttgttggagcagcatacccgcgaggttctggtggagtcgcagctcctcctggcggaatttaaagtgaactgtatgcagcttggtgttgagagcaatggccggtacatttctgtgctcaaggtgtttggtaccaatgctcactttgtgaagaggccttatgatgctgaagtctccctaactgttcatggtttgctcctggtggataccatgcagacatatggtgctgattttgaccttttgatggcttcacataagaacttgagctttgatattccaacgggaagccttcgggatagcagggcccagtctcctgtctctggaccgaatgtggcccacttaactgatggagctacactgaacgaccgatcagctactagtgtttcacttgacaaaattcttaccaaagagcaagagtcccttattaagttggaatatcagtttgtgagttcagagtgcccatcgatgaatttagacagtactcttcaggtgatttccctacaggtgaataatttagatattatcctcaatccagagacgattgtggagctaattggttttcttcaaaaatcctttcccaaggaaaaagatgatttaagtcctcaacctttaatgactgattttgaaagaagcttcagagaacaaggaacttaccagtctacatatgaacaaaacactgaggttgcagtggaaatccataggctgaacttactgcttcttcggacagtgggcatggcaaatagagagaaatatggcagaaaaattgcaactgcaagtataggtggcaccaaagttaatgtctcaatgggtagcacgtttgacatgaatggttctcttggctgtttacagcttatggatttgacacaagataacgttaaaaaccagtatgttgtcagcattgggaattctgtaggctatgaaaatatcatcagtgatattggctactttgaatctgtgtttgtcagaatggaagatgcagccctcactgaagctttgagtttcacgtttgttgagagatctaaacaggagtgttttctcaacctgaagatggcttctttacattataaccactctgctaagtttttgaaggagttgacgttatccatggatgaactggaagaaaattttcgaggtatgctgaaaagcgcagccaccaaagtcaccacagtactagctaccaagactgccgagtatagcgagatggtatcgctctttgaaactccaaggaagactcgggaaccctttatcttagaggaaaatgaaatatatgggtttgacctagcttcgtctcatttggacactgtaaagctaatcttgaacataaacattgaatcaccagttgtttctatccctcggaagccggggagtcctgagttgttggtgggacacttgggacagatattcatccagaattttgtggcgggagatgatgaatccagaagtgaccgtctgcaggtggaaatcaaggacattaaactgtattctttgaattgcacccagttggcaggtagagaagctgttgggtctgaaggaagccggatgttttgcccaccttccgggtctggcagcgtttaatcagcagtaatgaagtaaatattaaggtttatggtctatcatttcatctcttttatgccagcttttcacatcctgaacaacaccaccattcagtttaaactggagaagatccctatagagagagaatctgaattgactttttctcatttatgggcattacatctacgtgcatttaataataagagtaactgaatttttctcttttcaatacaggtggtgttagcaaagcatgtatatgagcaggttttacaaaccctggacaatctcgtgtacagtgaagatctgaataagtatccagccagtgctacctcctccccttgccctgattctcctctgcctcccctcagtacctgtggagaatcttctgttgaaaggaaggagaatggattgttcagccactccagcctttctaacacctctcagaagtcattgtcagtgaaggaagtcaaatcctttactcagattcaagccaccttttgtatatcagagcttcaggttcagctaagtggagatctgactttgggggcccaaggtcttgtgagcttaaagtttcaggactttgaggtggaattcagtaaagaccatccccagactttatctattcagattgccctgcattctctgctgatggaggacttattggagaagaatccagattctaaatataagaacctgatggtgtctcgaggagcccctaagccatctagtttagcacaaaaagaatacctttctcagtcttgcccctcagtgtccaatgtggaatatcctgatatgcctcggtctctcccttcccacatggaagaagctcctaatgtcttccagttgtatcaaaggcccacctctgcgtcccggaaaaagcaaaaggaagtccaagacaaggactatcccttgaccccacctccttctccaacagtggatgagcccaagatacttgttggaaagagtaaatttgatgattccttagtccacatcaacatattcttggtagataagaaacatccagaattctcttccagttacaatcgagttaaccggagcattgatgttgattttaattgcttggatgtgctgatcacactgcaaacctgggttgtgatattagacttttttggaatcggctccactgcagacaaccacgcaatgaggctgcctcctgagggcattctgcacaacgtgagccgttttcctgaaagataccttttctccccagtaatattggccttgctttatcttgtctgttcctaggttcattcactttctctagtgctccagacatatttaagttgtgtgacaaaaaaggatacatagtaatgtgttctaactttatcatccctagagggagacctggccttacagggcagcattgggagtctgtctctaagtgacctcacatgctgagttttcttgaaatactaacttgtgtcttgctgttatctgagtcacacttttatcctaatttttagatacggacggcctgaccctctgctccggagagaacacgacattcgcgtgagcctccggatggcctctgtgcagtatgtgcatactcagcgtttccaggcagaggtggtggcctctgaggttatttggtggtaaaattagggaattaattatcctctgagtcagttttccttcctctttcaggtgagagatcaagcccagcgctgttcacgggttctcctggatattgaggctggtgctcccgttctcttgatcccagaaagttccagatcaaataatctgattgtagcaaatttggagagtcccaccaccagtgctgcccccttcccatttcctgcattctagttttattttgttccttcccaggaatctgtgccttcagcttccccaacgggtattcccaaacacagtctgaggaaaacgacaagcacggaggagcccaggggaacccattcccaggggcagttcacgatgcctcttgctggaatgagcctaggaagcctgaagagtgagtttgtgcctttgtttagtgcaacccctttttgggtccccttttcttcattacctctctttccttgggtccttgtagaagaccatgtctgcctgctggattgcgttgtcgtggatctccaggaccatggaccatctttgctgcggagagacatccggagagattactcgaagggcaccagaggatagtagtggagatctgatcttcccttcctattttgtgcggacagacaggaggaagcctccttaaccgagccttgtaggctgaaattgcaggtggaaaggaatttggacaaagaaataagtcatactgtgccagacatatctatccatggcaatctctcctcagtccactgctctctggatctgtataaatacaagctgatccgcggcttattagagaacaacctgggagaacccatagaggaatttatgcggccttatgatttacaaagatccaagaattcatactgtcctgagtggagaagtgtacacctgtatgtgcttcctcattgatatggtgaatgtaagtctggagcttaaagatcc

SEQ ID NO: 139486 - DNA, 2315 bp, Homo sapiens
gacacaggttgaacatcacggcggagaacgactgccggcggctgcactgctccctgagagacttgagctccctgctgcaggccgtgggccgcctggccgagtactttatcggggatgtgtttgctgcacggttcaatgatgccctcacagtcgtggaaaggttggtcaaagtcactctgtacggatctcagataaaattgtacaacattgaaactgctgtgccatcagtattgaaacctgacctcattgatgtgcatgctcagtccctggctgcgctgcaggcttactctcactggttagcacagtattgcagtgaagttcaccggcagaacacgcagcagttcgtgacactcatctctactaccatggatgcaatcacacctctaatcagcaccaaggtccaagacaagctgctgctatctgcgtgccacttactggtctcactggccaccaccgtgcggcccgtctttctgatcagcatccctgcagtgcagaaagtattcaacagaatcactgatgcctctgccctgcgacttgtcgataaggcccaggtgttggtgtgccgagccctctctaacatcttgctgcttccgtggccaaaccttccagagaatgagcagcagtggcccgtgcgctccatcaaccacgccagcctcatctctgcactctcccgggactatcgcaacctgaagcccagtgctgttgccccacagagaaagatgccactggatgacaccaaactgattatccaccagacactcagcgtcttagaagatattgtggagaatatctcgggggagtccaccaagtctcgacagatttgctaccagtcgctgcaggaatctgttcaggtctccctggccctctttccagcttttatccatcagtcagatgtgactgatgagatgctgagcttcttcctcactctgtttcgaggccttagagtacagatgggtgtgcctttcactgagcaaatcatacagactttcctcaacatgtttaccagagagcagttagccgagagcatcctccacgagggcagcacaggctgccgggtggtggagaagtttctgaagatcctgcaggtggtggtccaggagccaggccaggtgttcaagcccttcctccccagcatcatcgccctgtgcatggagcaagtgtatcccatcattgccgagcgtccctcccctgatgtgaaggccgagctgtttgagctccttttccggacgctccatcacaactggaggtacttcttcaagtccaccgtgctggccagtgtccagagggggatcgctgaggagcagatggagaatgagccccagttcagtgccatcatgcaggctttcggacagtcctttctccagcccgacatccacctttttaaacaaaatctcttctacttggagactctcaacaccaagcagaagctgtaccacaagaagatcttccggactgccatgctgttccagtttgtgaacgtgctgctccaggtcctggtccacaagtcccatgatcttctgcaggaggagattggcatcgccatctacaacatggcctcagtcgactttgatggcttctttgccgccttcctcccagagttcctgaccagctgtgatggtgtggatgccaaccagaaaagtgtgctggggcggaatttcaagatggatcggctatgcccctgccttccaggacctgccctcattcacccagaatgtgcacaggctggtcaacgacctgcgctactacagactctgcaacgacagcctgccccctggcactgtgaagctctaggcctgctactgcctggggacacggacttctgctgctgccacctgcgccagccctaccttccaccacagatgtctcccagatgggccttggtcacactccttggcttctcccaccgcaagcaacgctgcctgcctctgccgctcctccacatcttgccgctgcccagcagagctggcttctgggtccacctgagcactggacggtgctcccagggcgttggagcaggcggaggggtgtgtggccaggatttaggggcctgggaattccctgagctcatgtcagttactcctaaacggcacattctgatggcggaaggagacagcatcccggtcactgttcccattgagtcacaaggagatggaggcccaaagcatgactcacctggggtcacagagctggaagccaggggcgccgtggctgctctgtccattttactgcctagtgaaaggcctgcggggggcgctgtcaggctccttgcggtgctgctggtggagcgccagagcctgggcctggctgcgggctga

SEQ ID NO: 139487 - DNA, 1160 bp, Homo sapiens
caccgtccctgggtgccacactggagctgattcctgagctccccgtgtctcggcgaccttgcttccagcctctgaagggcactcgaggaagactgattgagactctggggaaggacgatttaggggcctgggaattccctgagctcatgtcagttactcctaaacggcacattctgatggcggaaggagacagcatcccggtcactgttcccattgagtcacaaggagatggaggcccaaagcatgactcacctggggtcacagagctggaagccaaactgattatccaccagacactcagcgtcttagaagatattgtggagaatatctcgggggagtccaccaagtctcgacagatttgctaccagtcgctgcaggaatctgttcaggtctccctggccctctttccagcttttatccatcagtcagatgtgactgatgagatgctgagcttcttcctcactctgtttcgaggccttagagtacagatgggtgtgcctttcactgagcaaatcatacagactttcctcaacatgtttaccagagagcagttagccgagagcatcctccacgagrgcagcacaggctgccgggtggtggagaagtttctgaagatcctgcaggtggtggtccaggagccaggccaggtgttcaagcccttcctccccagcatcatcgccctgtgcatggagcaagtgtatcccatcattgccgagcgtccctcccctgatgtgaaggccgagctgtttgagctccttttccggacgctccatcacaactggaggtacttcttcaagtccaccgtgctggccagtgtccagagggggatcgctgaggagcagatggagaatgagccccagttcagtgccatcatgcagggccttcgcactggctgcctctgctgcctgcagcactgttcactcgcatacctgagtagtttactcctcctctcccttgtcatttttctcaaatgttatcttcccaaggaggcctttccatttaatctatctaaaattccaaatgtccctcccctgacactctccatcttccttctggatggattcctaacagctacaacagaacctggcctccctgatgccacggacacagacctggccaccaaggatgcagcactgagcaaatcatggcccaacttctag

SEQ ID NO: 139488 - DNA, 456 bp, Homo sapiens
atggctgcggtagctccagacatcacatccttacccaaccacttccaaatgcaggaaataaggggcattcaggatgagacattgatgtggcgagtgattgaagtcaaagactcaatgcctgttcccaaagagatcaaaatcggccctactgtcttgctgggcattggcgactcagtccacccagtgaagcagacatgcaaaatggctatgcagggtgccgtctttggcaccaggcgacccacatcagctgatgaacagatcctcaacctacggaaagcaccttgcctaacacgggatcaggagctgtatctgaggcctgtttctgagtaccttctccactgtggtcaaggtaactcaagtgtcacctccttggagaagccttctccgacctcactatctgaaggagatcagctccccatctacaaccgccagagtagaacagtggatagagtgtga

SEQ ID NO: 139489 - DNA, 1206 bp, Homo sapiens
atgcacaaactcaaaaactaccgtacaacacagagggcaaaagaagcaacttacaaaacaatgcagacattgatgtggcgagtgattgaagtcaaagactcaatcctgttcccaaagagatcaaaatcggccctactgtcttgctgggcattgcgactcagtccacccagtgaagcagacatgcaaaatggctatgcagggtacttctttggactcgaggctgtggttggtgtgcatgtggcagggctcggtgacctacagctgggaaccctgtcctgcatgttcaaagcaggagagcccagcccctttgccgcccctgcactgccacagctgcacaaaccaccgtgcggcgtcagaccacctggtgctcaaactgaacccaggcttcacacacattccttcctctccatggaaaatccttggtctccttcctcgtgcgtctttcaggctgctgttatggcaaagaaagaggaacactttgacatagacaagttgggtataccatctcaggcacagtttcaggaagaagggcaaaatgaaaaacacaagaacaagaaggaagtggatcttcagaaactctccaccacccggcagcctgtgctgccctcgtggaggatgctctcggcaactgctctctacagaggagaaagccacacagtgagcaaccacatgttttctgggggccagcatgaaaacccatgctgtggcaagtgcagaacaggagaaaaagccacactttgtcgccagacccaccacttctcccttgaatctgaaactatagatgatgctgtgccagctgcaaaggccagtgtggggtcccactcctgttcccgaggggtcctccagcccagtcccatcgccagtcccagtcccaagtccgcagtccgcattccccgtcccccagtcccccagttccacatgccccaacccatcccatcctatccatcctatccctatggtcccgagttcctggtctggccattgggattcaaaatgaattgggaaatctatttggctgcaagcgacaaaatccagctcaaacagcacaagcaaaaagacaaatttctactggcttatgtgaagaaaaagaaccacaagccattagtggatgaagaaaacacagcctcagtttcctgtggagaaacttcttcccctccagaagacccactccagttcatcaatgttattaataacaagtatgtttaa

SEQ ID NO: 139490 - DNA, 5724 bp, Homo sapiens
ctagaacaacaacataggcattttatttcttttcattaagcttcttagtttcttagtatcacaatggaatgatgagaaaacaacaaaaacgtgagtctttgcaaatctctgacaaagagcagagatctcaaggcaattggggcgggggaggcttgacagaagtgccagagcagttccaacgtcacatctctccttggctggaatggtgagaaggtggcactgtcgtgagctgtccttggcaattctgccccatgagccacgtgcgcctggtctgcatgggccaccccgcgggatttcctggtgcctcctagtacctggccacacacccctccgcctgctccaacgccctgggagcaccgtccagtgctcaggtggacccagaagccagctctgctgggcagcggcaagatgtggaggagcggcagaggcaggcagcgttgcttgcggtgggagaagccaaggagtgtgaccaaggcccatctgggagacatctgtggtggaaggtagggctggcgcaggtggcagcagcagaagtccgtgtccccaggcagtagcaggcctagagcttcacagtgccagggggcaggctgtcgttgcagagtctgtagtagcgcaggtcgttgaccagcctgtgcacattctgggtgaatgagggcaggtcctggaaggcaggggcatagctgcagccaacaacacaccaggtcacccacccaccagaccccaacagctacttccatcccagagtgtgcactgaagataggggagcactttctaaaactcaaaacttctattcactgttgcactgcgtgtcacagagactctgtgccaggcgctgtgggagaaaaagaacaagaggaatacgtccctagggcctctcgggtgccagacactgctgcaatcaacatacagacatcaactcactgagtcctcaccacaaggctgccaccaagccctaccagaaccactagtctaaggacagaaagaccaaagcgctgcaccatgaagaagctggccccagctcacactgaagagaccagcacacttgctcctgagtccggcccctcaaacgcagacatggctgtggtgacagccctcttcttcaccatggccccttgaggtgacgcgcacaccgagcaatgtctgcagaacctttacccacggggctccaggccgcccctgcccctcgagagccacccgagcagcagcaaacacagtcccaaggcctgtcccactgggcgcagcgtgggccatggaaggccctgggccagaagtgaggccctgacctccgccatcatgcacacggtgagaccctgctttttttttcagtgtaggtcccggtgaggactcaaacaggcccagcaagccccagcagagccatgagcaggaccaagttcattttcctgcccaaccactattcctcttccagaactccattcaaagcctgcctcttcccaaagtctgcacagatgcctcctatttcctggccccagcagccagctcagcgcctctgtcctgagcaatctgcttctggggagtgtgtgcaggctctggggccagaacacccaggtctgcctcctgcttcgcagctctaccacttccaagttctgtgaactgctcaccttctgagcccccaccatctgtgaaatgggggagtaacaggacccacacttcagaggcttgttagaaggcttactcgagccaagacatgtcacatgcttggcactatgtggtccacagagggtgctgtattggcctgtctaccatgaaagacttggtgaaggctgggactggtgccccagttcctggcccggggcttgagaagcagctggcttcaaacacacagtgcgtgactgaatggaaggtggtgattcttttattttaccctcaaaaaaccaactaagggatgtcttttaaatcagtggctcccaaatgccaaaccagaatttcctgggtagaacacagaagtctgtttctccatttttaataagtaccccaggtgcttctgatataactagatttttttttttgagacaaagtcccactctgccgcccaggctggagtgcagtggcacaacctccgctcactgcaacctctgcctcccgggttcaagagattcttgtgcctcagcctcccaagcagctgggattacaggcgtgtgccaccacacctgactaattttttttatttttagtagagacagggtttcgccatgttggccaggctggtctcaaaccccctaacctcaagtgatccgcccgccttggcctcccaaagtgctgagattacaggtgtgagacaccgcgcctggcctataactagattttgaaaccacagctttaaatcaaaaagttgactgatattgatgtcgttagaagctgatcattaagtattaggatctggcctctagaaaaaggaaaaaacatatccaggggctgaagtgaactggaagaggcttaggagagaacaagtcccaagaaaaggaagaccccaagacaaaggagaacaggatgagtctaagcaaaagcttccctgccacacgtggcaaatgaggaaagcaggcggccaggtttgcaccagtgagagcaatgtgtgcatctgagcactacggtggagccgtggacaagctgcttcacagaggactcaggtcaagaaccccaagaggaccagggagaaagcgatttcttttcctaatttcatcaagtataaaacggtacaaggaaaagttcccagaagttcctatcaggcaagagagaggcctggtcacctgacacaggaagaagagaacaggtgagccccatggggaaggaggtcccaggcactgtcaggctccaacaagatggcctcatggacaccaagagccagcagcacccagctcccaccgaggtgctgcacgggtggggacagcccacctgacagtccctgcacaggtggcagcagtgggacaagagggtgagtactaggagggctcctcccaggacctggcagcaactcagcccaagctgagctggggctggtctggaaagagcccaagacagccggggaacctgggtcccacctctaaccctggggacccagaagtgcagctcccaagcaccaaccatctcagcctgaatgcaagcctgggcacactccaatgctggccccaccggggctcatcacccaggagggagaacggcagggtcctgggtatgaacaaagatgccaagacaaatggaggggctgcagagccaggaactcgggacctccatggctgagactaagaacatacgtgctacagacaccaagactggggaaaaggctgtgcccctcaatcaggctacagcaccaggtcagcaggcatctcgtgagctgccgccaagctgcagggtgggcacagaccacgcccagaggcctcaatgtgccccctccttgctgcacaggtgccaggcttgcgtgcccactctgccctcctcttagcccggcctctttctctcctcacccgatccatcttgaaattccgccccagcacacttttctggttggcatccacaccatcacagctggtcaggaactctgggaggaaggcggcaaagaagccatcaaagtcgactgaggccatgttgtagatggcgatgccaatctcctcctgcagaagatcatgggacttgtggaccaggacctggagcagcacgttcacaaactggaacagcatggcagtccggaagatcttcttgtggtacagcttctgcttggtgttgagagtctccaagtagaagagattttgtttaaaaaggtggatgtcgggctggagaaaggactgtccgaaagcctgcatgatggcactgaactggggctcattctccatctgctcctcagcgatccccctctggacactggccagcacggtggacttgaagaagtacctccagttgtgatggagcgtccggaaaaggagctcaaacagctcggccttcacatcaggggagggacgctcggcaatgatgggatacacttgctccatgcacagggcgatgatgctggggaggaagggcttgaacacctggcctggctcctggaccaccacctgcaggatcttcagaaacttctccaccacccggcagcctgtgctgccctcgtggaggatgctctcggctaactgctctctggtaaacatgttgaggaaagtctgtatgatttgctcagtgaaaggcacacccatctgtactctaaggcctcgaaacagagtgaggaagaagctcagcatctcatcagtcacatctgactgatggataaaagctggaaagagggccagggagacctgaacagattcctgcagcgactggtagcaaatctgtcgagacttggtggactcccccgagatattctccacaatatcttctaagacgctgagtgtctggtggataatcagtttggtgtcatccagtggcatctttctctgtggggcaacagcactgggcttcaggttgcgatagtcccgggagagtgcagagatgaggctggcatggttgatggagcgcacgggccactgctgctcattctctggaaggtttggccacggaagcagcaagatgttagagagggctcggcacaccaacacctgggccttatcgacaagtcgcagggcagaggcatcagtgattctgttgaatactttctgcactgcagggatgctgatcagaaagacgggccgcacggtggtggccagtgagaccagtaagtggcacgcagatagcagcagcttgtcttggaccttggtgctgattagaggtgtgattgcatccatggtagtagagatgagtgtcacgaactgctgcgtgttctgccggtgaacttcactgcaatactgtgctaaccagtgagagtaagcctgcagcgcagccagggactgagcatgcacatcaatgaggtcaggtttcaatactgatggcacagcagtttcaatgttgtacaattttatctgagatccgtacagagtgactttgaccaacctttccacgactgtgagggcatcattgaaccgtgcagcaaacacatccccgataaagtactcggccaggcggcccacggcctgcagcagggagctcaagtctctcagggagcagtgcagccgccggcagtcgttctccgccgtgatgttcaacctgtgtcctgaccctgaagtgactataaactgttgtaatcccaaataaacttctaaattgtcctgaagaacagggaacagtgtggagaaggcgtgcgtgggcaggagctccatcactttggccaccacctccaagctctgccgtaagtaccgctgccactccgtctgctgatcgtcatccagagtctcatcatccaactcctccagctgggcttggttgtatctgaactggattcgattcaacacctctgtgagcaggagcaccagggcatcttcgtacctgttgagaactgcttccttgtctccaagacgacttttaattttacttgtcagatagtccaaaaacagcgtccagatatccaaacaagagaagtagccttcatgagtaggctgatgaaatgtgtacttgaacaaaagtgtcaaaaactccaccacagggaactgggagtaagactcgattcttcttaggtgaacactcacaaagagccgaagaaagtcagtaaacttctcgatatagctaaatgagacaagacaaaaggtgacaataagaaacccagccacctccttagaacttaaattcaat

SEQ ID NO: 139491 - DNA, 2825 bp, Homo sapiens
atgtggcctgggaacgcctggcgcgccgcactcttctgggtgccccgcggccgccgcgcacagtcagcgctggcccagctgcgtggcattctggagggggagctggaaggcatccgcggagctggcacttggaagagtgagcgggtcatcacgtcccgtcaggggccgcacatccgcgtggacggcgtctccggaggtaacgctccgttccgggagtcgttccaagacctttcccgagcttgcgctggaatggaggtcctggatctgcaggctctggaggagtttggagctggcctcagctctgtccgctttatctgtggaacccaggtacacagtgagtggtggggggttgtggggactgaccccagctgcctgcttcccacagtcagcaaggccagctgttatgacgccaacgccggcctctttgaggtgtgtggaagctgtcctgcgggtgagggttggtggggcctgttaggctgaggaaggcttgggtgtgtccggctgtgcaaggcccacaagtaccgctatcgccacctggacatggccgacctagaagccaagctgcaggaggcccaggtggggcgacgcctgggtccaccctcagcctccgcctggggaaggaagtgaggcttagagaggccaaaggagatctgctgcctcgcctctagatatggtgccctggtcttcatggatgaatgccatgccactggcttcctggggcccacaggacggtgggaccatgtggcacctgaggcctggggtggggcttctgagggtggctgggaaacgaggaggccactgggtggagcatcaggtacctgcaaggttgtgtccctggggtccccttgtccttttgaagggccctggaggggctcagggaactccaacagtctgccacctgctgtcgttggctgcgcctccaaggccctagatctgctgatggggagtaacaccattgtccagtctatggctgccaagacccagaggtgcgactcccagcagggcaggctcgggggcggagagacgtggtgagagccagcctcatgtgtctgcatgctgggtgatgcccggctggcctctcgcatggcggatgacatgctgaagagaggtaagggtgctgagacaagggaactggtggtgggtcctgagagaagagaaagggaaacccctagactctcagcagtgcatagcgaggaagacattgaccgctgcgtggaggccttcgtggaagtggggcgactgcacggggcactgccctgagctctgggtaaggacgagaagagccaaggtccgcctatccagactgggggccttgggccgcggctgttcaggctgcccagcagtcaaggccaggagaggcgatttgctgctgccaaggccccatcctcccttgtgccccacaacggctcgccgctttcctgttggaggggcctgcgggaggagggcggtctctccctggcgaccttgtggaccccttgtggggtggggagtggggtccccgcagctccaccctcagcgtggtgtgaccttgggaagctcttagtttgctggcggggccagaacagagggcccaggtccacccagaccgacgtgaggcggcacgaggcgagatccagacagcggcgcagaaagtgcgtcgccgcccctgtggctcccaggagccgccgctggcgttgccctgctgcgctggcagcgccggccgtggcagtgcctgtggtctttgccctaatcttcctgctgggcacagtgggcaatgggctggtgctggcagtgctcctgcagcctggcccgagtgcctggcaggagcctggcagcaccacggacctgttcatcctcaacctggcggtggctgacctctgcttcatcctgtgctgcgtgcccttccaggccaccatctacacgctggatgcctggctctttggggccctcgtctgcaaggccgtgcacctgctcatctacctcaccatgtacgccagcagctttacgctggctgctgtctccgtggacaggtgcgctgtgcctggggcacccgctgggcagggctgtgggggcgggggttgggggaggagtcctgaacgtggggctggtgtggctgctggcggcgctcttctcggcgccctacctcagctactacggcaccgtgcgctacggcgcgctggagctctgcgtgcccgcctgggaggacgcgcgccgccgcgccctggacgtggccaccttcgctgccggctacctgctgcccgtggctgtggtgagcctggcctacgggcgcacgctgcgcttcctgtgggccgccgtgggtcccgcgggcgcggcggcggccgaggcgcggcggagggcgacgggccgcgcggggcgcgccatgctggcggtggccgcgctctacgcgctctgctggggtccgcaccacgcgctcatcctgtgcttctggtacggccgcttcgccttcagcccggccacctacgcctgccgcctggcctcacactgcctggcctacgccaactcctgcctcaacccgctcgtctacgcgctcgcctcgcgccacttccgcgcgcgcttccgccgcctgtggccgtgcggccgccgacgccgccaccgtgcccgccgcgccttgcgtcgcgtccgccccgcgtcctcgggcccacccggctgccccggagacgcccggcctagcgggaggctgctggctggtggcggccagggcccggagcccagggagggacccgtccacggcggagaggctgcccgaggaccggaataaaccctgccgcctggactccgcctgtgtccgtctgtctcactcccgttctccgaaggcgggacgccac

SEQ ID NO: 139492 - DNA, 1900 bp, Homo sapiens
atgaaggacaaaagtaaaacccttggccttgaggcatccatcttcagaaataattggaagtgcaaaagcatattcgagggactaaaaggacatcaagagggatacttcagtcaaatgataatcagctatgaaaaaataccttcttacagaaaaagtaaatctcttactccacatcaaagaattcataatacagagaaatcctatgtttgtaaggaatgtgggaaggcttgcagtcatggctcaaaacttgttcaacatgagagaactcatacagctgaaaaacactttgaatgtaaagaatgtgggaagaattatttaagtgcctatcaactcaatgtgcatcagagatttcatactggtgagaaaccctatgagtgtaaggaatgtgggaagacctttagctggggatcaagccttgttaaacatgagagaattcacactggtgagaaaccctatgaatgtaaagaatgtgggaaggcctttagtcgtggctatcaccttacccaacatcagaaaattcatactggtgtgaaatcttataaatgtaaggaatgtgggaaggcctttttttggggctcaagccttgctaaacatgagataattcatacaggtgagaaaccttataaatgtaaagaatgtgggaaggccttcagtcgtggctatcagcttactcagcatcagaaaatccatactggtaagaaaccttatgaatgtaaaatatgtggaaaggctttttgttggggctatcaacttactcgacatcagatatttcatactggtgagaaaccctatgaatgcaaggaatgtgggaaggcttttaattgcggatcaagtcttattcaacatgaaagaattcatactggtgagaaaccttatgaatgtaaagaatgtggaaaggcctttagtcgtggctatcacctttctcaacatcagaaaatccatactggtgagaaaccttttgaatgtaaggaatgtgggaaggcctttagttggggttcaagccttgttaaacatgagagagttcatactggtgagaaatcccatgaatgtaaagaatgcggaaagaccttttgtagtgggtatcaacttactcgacatcaggtatttcacactggtgagaaaccctatgaatgtaaggaatgtgggaaggcttttaattgtggatcaagccttgttcaacatgaaagaatccatacaggggagaaaccctatgaaatgtaaagaatgtgggaagggttttagtcggtggctatcaccttactcaacatcagaaaattcataccggtgagaaacctttcaaatgtaaggaattgtgggaaggccttcagttggggttcaagcctagttaagcatgagagagtccatactaatgagaagtcttatgaatgtaaagactgtgggaaggcctttggtagtggctatcaacttagtgttcatcagagatttcatactggtgagaagctttatcaacgtaaggaattcgggaagacctttactcatggctcaaaacttgttcatgaaagaactcatagtaatgataaaccctacaaatataacgaatgtggggaagcctttctgtggacaacttactcaaatgagaaaattgatactgatgaaaccttatgattgaaagttgtaaaagaatattttgtgtgtgtgtatagacaacttatcataataagaactcttactcttgagaaaccttgtgaatgtaagggttgtgcaaaagccattcatttctgtttatgggcaattatcttgctatccagcaattcatactagtgagaaatattttgaatataactaatatgaaaaggcctttagacttctgtacagtcttattggatatcaatttatactgatgtaaaatcatttaaatgtaaaaaaaaaaaaaaaaaaa

SEQ ID NO: 139493 - DNA, 447 bp, Homo sapiens
atgaggggcaagaactcagccaccgagttgagtactcggaggcagtatgatgttcagggaaggtcaaagggggaacaggcaaaagggaccaaaaaagaggaggaacctcgctttgtcttcggcattattggcgtcaaccgcactcggcaggtggacaaccacgtcattggagacccgggtagtgttgtctacgacagcagctttgacctcttcaaggaaattgggcacctgtgtcacctctgcaaggccatcgcagccaactccgagctggctacagcatctcctccttcctgcagatgtttgcaccctgagtgcaaggagctgcccgagcccaacctgctcccggggcagctgtcccacggggcagtgggcgtcagggagggccgcgtgcagtggatctccatggctttcgagtcggctggaacaggctccgagcagcctctatga

SEQ ID NO: 139494 - DNA, 861 bp, Homo sapiens
atggccgaaggcgaaaggcacatcttacatggcagcagacaagagagaatgagagccaagcgaatttataaaatcttcagatctcggctgttcgtctccatcctcatcttgtccctggtgttcgccagccggctccgccccgccagccgggccccgctactcttccggcctgataccaacatccaggtgctgctggacctcaagtacaacctgagcgccgagggcatctcctgcatcacctgttcagggcaggactcaccttcgtactgcagatccaccaggactagcaggaaggggaataccgagcccagccggctggtcacggagccgggggccaccatgtccgagggctcgcgagtgaagaggaggaaaggttggcgagtgggactatttgatcctttccaggttcgccagcgtggtgttacgagaggaaagcgcagccgcagcgtacgaatgggaaggccaaacacggtcccggggagtctgagggaagctgcagggcgcctggaattggggtctcgagggcccactaatgcagatatggctgcagtgaccaaaaacttagatcacaacatccaagcccatttgaatacctggaatgccttcccaagaaggatgactacaaacaagccctactgtgaagactacaataaatacctaactcttcaatgcccagacaccaacaaacatccacaagcaccaagtcatccaggaaagcatgacctcagcaaacaaactaaacaagattcatccctctttgagagagattcaaatgtgttttcttatcagcttgctgagatatgggccaaagggaaagaggaaggggtgagcctaaaagatgccagcagtaaaatggagtaa

SEQ ID NO: 139495 - DNA, 1495 bp, Homo sapiens
ggctcaccacacggcaaggtgcccgcttccaagctgaccccaccagcactcagacacgcatgcacacacacacgcagacctactatgaactggcttgtgctcagcaagagcagaattgatgagcagataccttaagaatcttttagagcaggaccacgtacaagggcaaatcctccttccagacctactcggactacctgcgctgggagagcttcctccagcagcagctgcaggccttgcccgagggctcagtcctgcgccggggcttccagacctgcgagcactggaagcagatattcatggaaatcgtaggggtgcagagcgccctgtgcggcctggtgctatccctgctcatctgcgtggccgcggtggccgtgttcaccacccacatcctgctcctgctgcccgtgctcctcagcatcttgggcatcgtgtgcctggtggtgaccatcatgtactggagcggctgggagatgggggctgtggaagccatctccctgtccatcctcgttggctcctccgtggattactgcgtccacctggtcgagggctacctgctggctggagagaacctgcccccccaccaggccgaggacgcccgaacgcagcgccagtggcgtacgctggaggccgtgcggcacgtgggcgtggccatcgtctccagtgccctcaccacggtcatcgccacagtgcccctcttcttctgcatcatcgccccatttgccaagttcggcaagattgtggcactcaacacgggcgtgtccatcctctacacgctgaccgtcagcaccgccctgctgggcatcatggcgcccagctctttcactcggacccggacttccttcctcaaggccctgggtgccgtgctgctggcaggggccctggggctgggtgcctgcctcgtgctcctgcagagcggctataagattcccctgcccgcaggggcctccctatagcccgggacgggctctggacacttgcacctttggtcccatgggtgggggacaggagctgcttcccagctcgacttcagctagctgtgtccccaggcctgggcccagggcgccctgcgggccagcgtggaggctgacacccacacagatggtgtggaccatgctgccttgtggagctgggagttggagacagccgccaccccacaggccgggctactggcagccacactcggctttttgcccagtggcagaagagaccagccctcctcccatgcccggtcaccatgggggtcaggttatttttgtagggggtctccctctcacactgcctcagtgctcacaaccttccagtgtggatgttacagggtggcccccattctaccgatgtgaaaactgaggcgccaggacacagtggctgccctgtcgctggatcagtagcagagccagagctgcctccgagcgccatgccgccctcgggaatcatacaggaagagcacagtggatccagggtgggggcctctcaccccctaaccccgcccccc

SEQ ID NO: 139496 - DNA, 1596 bp, Homo sapiens
atgggtgtgagtgtgcgcgtggactgtgggtgtgcgcgggcttctgagtttctagggcggccgcgaggcgctgtccgcggtgctgacccggggagtgggctgacggagacctgcgcgcagtctcgcacatgggcgagagcccgatccaagggcggcttcagactgacgctcaacttttatggacccagatatccctcagaggggacaagcaggggccagaggtcggaagccttgccgttcctggacatccaacatccaactccccttggccgaccaagaatgctgcagtcccgcggggagatggtgcggagctggggcccggtcgtagagggcaagcttgggttctgtccacccctgaccgtctttcccggggggctccgaggcccgcatcccgggctggctggagagcgagagaacttcgcgcgcggcgccaagcaggaagcgtgtttactacaggggcctggggatgctggcctcacacatccctgcccagccacagggtacttccctgaagcctcctgtacctccagatctattcgcatgttcattaactcccaagaacgccagttggctgacatgtccctgttcattgcagattcctggctctgttactctgggatcatctgctggaagtctctggagcaccagaggggtgcaagtctcagctgtgtctacatggaaggaaaagggggaaacatctggatgaaagccagcaacgtcctgccactctgccagatgctgcccacatctggacattcaaaaagtgatctgttcggtggcttagcagtcgagaagcaaatgagacaagatcaccacatcctccttcacgacaggagtggcttccagctggcagtcacgtctcctctattaacaaggcttggcaaaggacacatcatccaggtgccagtgtatgtgctggatgccccgagcagatggctgggcggactgagactctttcgtgatagctcttgcggcctggtgctatccctgctcatctgcgtggccgcggtggccgtgttcaccacccacatcctgctcctgctgcccgtgctcctcagcatcttgggcatcgtgtgcctggtggtgaccatcatgtactggagcggctgggagatgggggctgtggaagccatctccctgtccatcctcgttggctcctccgtggattactgcgtccacctggtcgagggctacctgctggctggagagaacctgcccccccaccaggccgaggacgcccgaacgcagcgccagtggcgtacgctggaggccgtgcggcacgtgggcgtggccatcgtctccagtgctctcaccacggtcatcgccacagtgcccctcttcttctgcatcatcgccccatttgccaagttcggcaagattgtggcactcaacacgggcgtgtccatcctctacacgctgaccgtcagcaccgccctgctgggcatcatggcgcccagctctttcactcggacccggacttctttcctcaaggccctgggtgccgtgctgctggcaggggccctggggctgggtgcctgcctcgtgctcctgcagagcggctataagattcccctgcccgcaggggcctccctatag

SEQ ID NO: 139497 - DNA, 5699 bp, Homo sapiens
atggaccacccaggcttccgggagttctgctggaagccccacgaggtgctcaaggatctgccgctgggctcctactcctactgctcgccccccagctcgctcatgacctacttttttcccaccgagaggggcggcaagatctactatgacggcatgggccaggacctggcggacatccggggctccctggagctggccatgactcaccctgagttctactggtatgtggatgagggcctctctgcagacaatctgaagagctccctcctgcgcagtgagatcctgtttggagcacccctgcccaactactactcagtagatgaccgctgggaggaacaacgggctaagtttcagagcttcgtggtcacctacgtggccatgctggccaagcagtctaccagcaaagtccaggttctctatggggggacagacctgtttgactatgaagtgcgcaggacgttcaacaatgacatgctcctggccttcatcagcagcagctgcattgctgccctggtctacatcctcacctcctgctcagtgttcctgtccttctttgggattgccagcattggtctcagctgcctggtggccctcttcctgtaccacgtggtctttggtatccagtacttgggcatcctgaatggggtggccgccttcgtgatcgtgggcattggtgtggacgatgtctttgtgttcatcaacacctaccgccaggccacccacctggaagacccacagctgcgcatgatccacaccgtccaaactgcaggcaaggccaccttcttcacctccctgaccacagccgccgcctacgcagctaacgtcttctcccagatcccagccgtccacgactttggcctgttcatgtctctcatcgtgtcctgttgctggctggccgtgcttgtcaccatgcctgcagctctgggcctctggagcctctacctggcaccactggagagctcctgccagaccagctgccaccagaattgcagccggaagacctccctgcacttccccggagacgtgtttgccgctcccgagcaggttggaggcagccctgcccagggccccataccctacctggatgatgacatccccttgctggaggtcgaggaagagccagtgtcactggagctgggagacgtgtccctggtgtctgtgtcccccgagggtctgcagccagcctccaacacgggcagccgcggccatctcatcgtgcagctgcaggagctgctgcaccactgggtcctgtggtcagccgtcaagagccgctgggtgattgtggggctgttcgtctccatcctcatcttgtccctggtgttcgccagccggctccgctaccgccagccgggccccgctactcttccggcctgataccaacatccaggtgctgctggacctcaagtacaacctgagcgccgagggcatctcctgcatcacctgttcaggtctgttccaggagaagccccacagcctgcagaacaacatccggacgtccctggagaagaagaggcgaggctcaggggtcccctgggctagccggcctgaggccaccctgcaggatttcccaggcaccgtgtacatctctaaagtgaagagtcaaggccaccccgctgtctacaggctctccctcaatgccagcctgcctgctccttggcaggctgtgtcgcctggggatggagaggtgccctccttccaggtgtatagagcgccttttggtaacttcaccaagaagctgaccgcttgtatgtctacagtagggctgctccaggcggcgagcccctcccgcaagtggatgctgacgaccttggcctgtgatgccaagcggggctggaagtttgacttcagcttctacgtggccaccaaggagcagcagcacacccggaagctgtacttcgcccagtcccacaagccccccttccacgggcgcgtatgcatggcaccccctggctgcctgcttagctccagccccgatgggcctaccaaaggcttcttcttcgtgcctagtgagaaagtgcccaaggcccgtctctcagccaccttcggcttcaacccctgcgtgaacacgggctgcgggaagccggcggtgcggccactagtggataccggggccatggtctttgtggtcttcggcattattggcgtcaaccgcactcggcaggtggacaaccacgtcattggagacccgggtagtgttgtctacgacagcagctttgacctcttcaaggaaattgggcacctgtgtcacctctgcaaggccatcgcagccaactccgagctggtgaagccgggtggggcccagtgcctgccttcaggctacagcatctcctccttcctgcagatgtttgcaccctgagtgcaaggagctgcccgagcccaacctgctcccggggcagctgtcccacggggcagtgggcgtcagggagggccgcgtgcagtggatctccatggctttcgagtcgaccacgtacaagggcaaatcctccttccagacctactcggactacctgcgctgggagagcttcctccagcagcagctgcaggccttgcccgagggctcagtcctgcgccggggcttccagacctgcgagcactggaagcagatattcatggaaatcgtaggcaagcggcagcctcgcccctccatcctgggggtgcagagcgccctgtgcggcctggtgctatccctgctcatctgcgtggccgcggtggccgtgttcaccacccacatcctgctcctgctgcccgtgctcctcagcatcttgggcatcgtgtgcctggtggtgaccatcatgtactggagcggctgggagatgggggctgtggaagccatctccctgtccatcctcgttggctcctccgtggattactgcgtccacctggtcgagggctacctgctggctggagagaacctgcccccccaccaggccgaggacgcccgaacgcagcgccagtggcgtacgctggaggccgtgcggcacgtgggcgtggccatcgtctccagtgccctcaccacggtcatcgccacagtgcccctcttcttctgcatcatcgccccatttgccaagttcggcaagattgtggcactcaacacgggcgtgtccatcctctacacgctgaccgtcagcaccgccctgctgggcatcatggcgcccagctctttcactcggacccggacttccttcctcaaggccctgggtgccgtgctgctggcaggggccctggggctgggacgcagcttcctccaggaagccttcattggtgcccaagtctgggttcgtcgtcccggaactccaggtgaagatgcggattgtcagcagaagatgaatgcccaggtctacctgacgggacgctgcttgtacttacctggtttgcatggggaggagagaagagcttcctcccgggctgtccccagtcactccactctgcctgcccgagcgccttcagggttgatctgccttgcctcgttgcaaactaacacagctggtatcctgataaaaagagggaatttgggcacagacacagctgaaggaagacgaggtgaagacactgggacaaaatgccatgtaaggatggagaataggttggtgcacccacaagccagggacagccagcagagcgtcagaggctacggagaagcaaggaaggaatcccgccccaccaggtttcagagggacatggaaactatcagcaccttggtttcagagtctagcatccgggactgtaagatgagacatttctgttgtttaagccacctggttacgctacagagttatggcagccttcaggaactagcaccctccccaggcctggcatcagagctggcacaacatcacttctgccgcctttggctgtcaaggtgcttcccaaaggacccacacttcaaggaatgcccagtgagttgtctgctcctccaagttaggtctccattctacccaagtccaggggccacttgtcacctaggcttcctggttctcaagaaggatccagtttctccatcctccttttcccagatcatcaatccaacaggaagaaatgaagatcctcctaggcaagtggcacagcactgcgggtggagtgataggcatttgccttttccccctccttgcaaaaccaactggaaactaaagcagccggagggctcggcgggaccctacaatctatggaaactgcaggattttattagcttggctgtagataggcaggggaaccagggcagcaaactcaaccgtggggagacagtcttcagtggaagttccgtatgtgaaatgggtctggaaggtggtggctgggaggatccaaagttctgcccattggccctgcagagacccctgaggaacagtgtgcaaacctctggcctcgacggtctcagggctctgctgtccccggattttccaggaggtactgagctcatccccattctgcagatgagaagactgaggcacaaagcagttatgaaatctgtgcagggtcagctgtgtgctgtccagacagaggcagaagcagcagcaaatttgtgggtggccagggtgagcggaaatgaagttccagtaaatcatggatgtaaggcacagagctcagctgtcctgtgcagggaacctgaggggccacagtggaccgtgggtttcagtggcagctaccggacccggacctggaaggacgggaggctgagctgcacggtgccaccccaggaggagagcctgtttgaagccaacacagaagctgccagccagtgcagagagaactgggcactggaagccagctggatgcaggtggccacagcagacaccatatttgcccaggagctaagccagggccatgtagaatcaaaaagatttttaaaaacagcgccccctgccatgtgggttaatgtggtggctttggttcctgcggaggcgaagggaaatgacaagcttgaaaagattaggaggctgcaggcttcccaggcagaattcccacctcagagcccaaaatcccgccaagtggggaaccgacagctcagaaaattgcaagaatcctgtgatttaaagaaatgcacagcacggaagctaagcggcggccagatggacgcattgggcattggtcactgtgccgttggcggctggggcatctccaggacgtctacactggggttcggaatccagccaccatgctgtgaggaagcccaagcagcccatggagaaactgacatggaaagaagacgaggccctcggcccatggcctcagccaagctctcagctgagccagaaccaacataccaggcagaacgagccttgccagctctgggcttccagagcaggggttttgcaggagagtcagaggttttccagtgccagggggccctgaaagcaacagccacctgcagaggcggcccaaggagaggcagtggtcaaggccccccgctccctgcttgcaagagtggaactgattgtctgactcaggggagactgtgctcagcattgtctagaatgttcttcgatatcagctggtcaaagcgaaaacacattgctgctccctgcagcctctcacccagaaaagagaggaatggggaaaagaaacggggaaaagctgcaatatttcccccacgcagccggcagctgacagctgcaggtctgggcagggcagtgctgcacagctgtggacccaacagcccagtcaaggacaagcctgccaggaaagcgtttgcacctgcagcataa

SEQ ID NO: 139498 - DNA, 1740 bp, Homo sapiens
atgctctatgcagctgaatgcctcaggaatgtcatgaagctgcaagtcatcccatcagctctgaacgaagccctccaggcccagagcacctggagcgacctgggtttggcttcccatgccctgagcagcacctggtgcctgcacggagaaagcgccgcctggagccagcctgcagttgtggagtgtgggcaacccagagaccagctccagacacacagcgaggcgtggctgtgtgcgctggtggcgactttctcgcaggaactagaacagtttgctgtaacaggagcacagatatcagacaggcagggccacgctgtctgcacggctccaccgagaggccgtccatcgacactgatgacgaatctcgtctgtgcgagcagcgcagatgagtgtggcggcggcaagacagagacacaaacggctggggggcgcctccaaggagctgaaactaggagcagggggcagctcacacgccttatcaccaggacacaggccgcagaacctcggtggttccttcagctcctgaagcggtccgcaaacaggtcgagggcgctgacgaggccgttttctgggctaagcagcgacggcgctaggcgactccgcttgtccttcgtttccgctgtcagctcagcagacacaaaaccaacagttccggtctcttccgatagttctggcagagacggctgcggggagacacgggcggaggcgggtccgggcgggccccacgtcgcgcagcctcagcgtgttgcgcctcccgcggctgcggccagagacttccgcaaacctcggggcctcaatcgacagaacgtgtcacctcaggcccaggagagcagggtccggggcgcgtcctcagaagccggcagggcgggctcctcgctgagccgcagggcgagcccggcttgggcctcttcccgcgggaggaggccgccgcgttccttccccggttctccagccgaccccgccgcctccgtctcccacacgcagggaccctctcccgacaccggcctgcctggaacgtgccagaatcgtctccctaacccggcggccgtggatgagcaaacctgcacccgcggcagcctgaactgccgtttgtcgcgtagtcctcgagtctcggagcgcaggggtcccgagggcaccccgggccgccgtcctgcggcccccccacagtgtgccgggactcggggtctctcaccacgagcagacctcggcgctgctatccggactcctcgagccccttacaggccacatggccaggggcgaccctcccgtcacaactgtgactctgtgagctcacagggctggcctccacattcttgctggtggaagaccacaagcaacgggatgccttggaaagcatcgttctgcagcaggactgctcaaccggccaatcagaacacagggaaccatgaaagaggactgcggagtgtggccatgtttggagacagggcctctagagaggccaccccagctctgtccctgtgtgaatctcagggctgtttcgaggatgaaaaggaggtgtttagccccgagcctcacgtggaaacatctgatgagcctttgccaatatgctcgggacctggggacggctggggtgaccccatcgcaaggccgggccgtggaaacaatctcagccctggaaccagcgcctgggaagtcccgcggtggatccgcgtcacgggggaggattggctcagcactggtcctgcggaatgtgtttttatcaatgacttgacgacgtga

SEQ ID NO: 139499 - DNA, 1831 bp, Homo sapiens
gctcctttctagcatctccgcctggttcggcccgcctgcttcaactcctgcctttaccatgtccatcagggtgacccagaagtcctacaaggtgtccaacttcttgcccccgggccttcagcacgcgctcctacacgagtcggcccggttcccgcatcagctcctcgagcttctcccgagtgggcagcagcaactttcgcggtgacctgggcggcggctatggtggggccagcggagatgggaggcatcaccgcagttacggtcaaccagagcctgctgagcccccttgtgccggaggttgaccccaacatccaggccgtgcgcacccaggagaaggagcagatcaagaccctcaacaacaagtttgcctccttcataggacgaggtagggttcctggagcagcagaacaagatgctgggaaccaagtggagcctcctggaccagcagaagaccgcctcgaagcaacatggacaacatgttcgagagctacatcaacaaccttaggcggcagctggagactctgggccaggagaagctgaagctggaggcggagcttggcaacatgcagccgctggtggaggacttcaagaacaagtatgaggatgagatcaataagcgtacagagatggagaatgaatttgtcctcatcaagaaggatgcagatgaagcttccatgaacaaggtagagctagggtctcgcctggaagggctgactgacgagatcaacttcctcatgcagctatatgaagaggagatccgggagctgcagtcccagatctcagacacgtctgtggtgctgtccatggacaaaagccggtccctggacatggacagcattattgctgagttcaaggcacagtacgaggatattgccaaccgcagccgggctgaggctgagagcatgttccagatcatgtatgaggagctgcagagcctggctgggaagcacggggatgacctgcggcgcacaaagactgagatctctgagatgaaccggaacatcagccgggctccaggctgagattgagggcctcaaagggcagaggggcttccctgggaggccgcccattgcaggatgccgaagcagcgtggaaaaagctggcccattaaggaatgccaacgccaaggttgtccgaggctggaagcccgcccttgcaagcggggcccaagcaggacatggggcggccagctgcgtgagtacccagaagctgatgaacgtcaaagctgggccctggaccatcgaggatcgccacctaccaggaaagctgcttggagggcgaggaagagccgggctggagtctcggatgccagaacatgagtatttcataccgaagaccacccagcggggctatgcaggtcgtcctgagcctccgcctatggggggcttcacaagcccccggcttcagttacaagcctggggctccaggttttggctctggcgcgggctccaggctccttcaaccggcaccagctctctccaggggccgtggttgtgaagaagatcgagacacgtgatgggaagctggtgtctgagtccttctaacgtcctgcccaaagtgaaacagctgcggcagccccttccaagcttacccctcctgcgctgccccagaggcctggggaaggaggccccttatccagggtagcactgggaacagggagacccacctgaggattcagccctaagcctcagccccacctggggagtttactacctggggagcccccttgcccatgcctccaagctacaaaacaattcaattgcttttttttttttttggtccaaaataaaacctcagctagctctgccaatgttcaaaaaaaaaaaaaaaa

SEQ ID NO: 139500 - DNA, 1282 bp, Homo sapiens
atggcatatttgtgtaatgccatttgcatgacccacatggtcaccctggaccccgtggatcaggccctgcctggtgccaccaccgccacttctgtgccaggcccccagtgtgatgcaagttgcatgatgctctttgctgtagtgccttttaatggcatagctttggcagcaactcagggagcccagagcatgctgccgccccgcgtgcaagggagcctaagttccaaaccgagcacgcgcagagggcgggacgctccgggcctccaggtctcgcaggccccgccccctcgccgcgggttcgctgttgggcggagatattcgccgccggcgcttgcgcccggaaggtgtgccgcaccacacgggggaggaaggaaggagctcccaactcgccggcctggccacgggatggcccccaaattcccagactctgtggaggagctccgcgccgcgcggcagtgagagtttccgcaacggccagtacgccgaggcctccgcgctctacggccgcgcgctgcgggtgctgcaggcgcaaggttcttcagacccagaagaagaaagtgttctctactccaaccgagcagcatgtcacttgaaggatggaaactgcagagactgcatcacagattgcacttcagcactggccttgggtcccttcagcattaagcccctgctgcggcgagcatctgcttatgaggctctggagaagtaccctatggcctatgttgactataagactgtgctgcagattgatgataatgtgacgtcagccgtagaaggcatcaacagaggtcccggtctcaaggaagacaccactcagaagaggtggaattccttgccttcggagaaccacaaagagatggctaaaagcaaatccaaagaaaccacagctacaaagaacagagtgccttctgctggggatgtggagaaagccagagttctgaaggaagaaggcaatgagcttgtaaagaagggaaaccataagaaagctattgagaagtacagtgaaagcctcttgtgtagtaacctggaatctgccacgtacagcaacagagcactctgctatttggtcctgaagcagtacacagaagcagtgaaggactgcacagaagccctcaagctggatggaaagaacgtgaaggcattctacagacgggctcaagcccacaaagcactcaaggactataaatccagctttgcagacatcagcaacctcctacagattgagcctaggaatggtcctgcacagaagttgcggcaggaagtgaagcagaacctacactaa

SEQ ID NO: 139501 - DNA, 2375 bp, Homo sapiens
atgcatttattgagtgcctacttcgtgccaggatctatgctagtaggctcaggttatatgatggtgaatatcacagatgtgtccccaccatcatggagcttcctgtgtagcatgctcatcaccacaactcagggagcccagagcatgctgccgccccgcgtgcaagggagcctaagttccaaaccgagcacgcgcagagggcgggacgctccgggcctccaggtctcgcaggccccgccccctcgccgcgggttcgctgttgggcggagatattcgccgccggcgcttgcgcccggaaggtgtgccgcaccacacgggggaggaaggaaggagctcccaactcgccggcctggccacgggatggcccccaaattcccagactctgtggaggagctccgcgccgccggcaatgagagtttccgcaacggccagtacgccgaggcctccgcgctctacggctgcgcgctgcgggtgctgcaggcgcaagggtcttcagacccagaagaagaaagtgttctctactccaaccgagcagcatgtcacttgaaggatggaaactgcagagactgcatcaaagattgcacttcagcactggccttggttcccttcagcattaagcccctgctgcggcgagcatctgcttatgaggctctggagaagtaccctatggcctatgttgactataagactgtgctgcagattgatgataatgtgacgtcagccgtagaaggcatcaacagaatgaccagagctctcatggactcgctttgggcctgagtgggcgccctgaagctgccctcattccccttggtgcctgtgtcagctcagaagaggtggaatttcttgccttcggagaaccacaaagagatggctaaaagcaaatccaaagaaaccacagctacaaagaacagagtgccttctgctggggatgtggagaaagccagagttctgaaggaagaaggcaatgagcttgtaaagaagggaaaccataagatagctattgagaagtacagtgaaagcctcttgtgtagtaacctggaatctgccacgtacagcaacagagcactctgctatttggtcctgaagcagtacacagaagcagtgaaggactgcacagaagccctcaagctggatggaaagaacgtgaaggcattctacagacgggctcaagcccacaaagcactcaaggactataaatccagctttgcagacatccagcaacctcctacagattgagcctagggaatggtcctgcacaggaagttgcgggcagggaagtgaagcagaacctacactaaaaacccaacaagggcaactggaacccctgcctgaccttacccagagaagccatgggccaccttgctctgtgcccgctcctggaaacccagcatgccccaagtggagctctggaagccccctccttcaatcccttggatgggccttcccaccctggttaagagggtttggttgtttcaaattaaattcagtgttagttcaaacacagacatggttgtttgcaccagaaaggtccccactaggagctaagggttgaagctggaagctcttgttccctatttcccccaggcccagctagctgatcacaccaacagatccttattaggcaaagcatttggctttgtcctgtccaagtgggctgcatactgtagtgctgcccttgtagcttccccagaccccaactcactgcagttcatctgaacaacctgagctcctgggccggggtggaaggagggggataaacctaaggccctgaatccaaagcagcctgttgagctggttcccccagggctgccagtctctccagggtgtacagctgctgtcccctgcccctgtccctgtccttgcaaaagtcccccctatgtcctgaagccccccagtgcccttcctgttcgggcccctccctttgggtggggaagggcagagcccctgaccccttgaattggttgtccttgaactctgtgctgctgccttcttgcagagaggcaactaagctgttttaaaagagccccagtgattgtgggctgctccctcctagaggtgggagggggcaagagccctcccttggtcaagtgtccatgctttctgggcagggacttgggttttttgttccaacagtgggccttctccgggcttcatagttctttgtaatatgttgaagttaatttgaattgactgaatttgctgacactgtgtgtttaagctgttgcattaaaaagctttcttctacatgttccaacagtggccttctccgggcttcatagttctttgtaatatgttgaagttaatttgaattgactgattttgttgaactgtgtgtttaagctgttgcattaaaaagctttcttctacatcaaaaa

SEQ ID NO: 139502 - DNA, 491 bp, Homo sapiens
gcggcattacctttacccattcaccggcggctaccggcggcggcgcgcagcgtgtcaggcggagagacccgccgccaggtgtgcaactgaggaacatggctcaagaaactaatcacagccaagtgcctatgctttgttccactggctgtggattttatggaaaccctcgtacaaatggcatgtgttcagtatgctataaagaacatcttcaaagacagaatagtagtaatggtagaataagcccacctgcaacctctgtcagtagtctgtctgaatctttaccagttcaatgcacagatggcagtgtgccagaagcccagtcagcattagactctacatcttcatctatgcagcccagccctgtatcaaatcagtcacttttatcagaatctgtaggcatcttctcaattgggacagtacatctgtgggacaaaggcagtacctgaaacagaagatgtgcaggcttcagtatcagacacagcacatgtatt

SEQ ID NO: 139503 - DNA, 1080 bp, Homo sapiens
cacttactgctgttggcaattgactataatttaccaatagctggtgtgctcatggagtcccagtatttaggagcatcacctaagcgcttagttataccaaacctctatgctcatcgtaaatctttggcaacgcttgagccttatgcaccgcgtaggcctatgcctatcgcaaggcggtacgctatcccctacatgtcacaccataacggttatatcggggacgtttattaccgcctaactgttgaggagaaaaagtcgtcatttatcgcccgaagatcaattttgacgacagagttcacaataagacgaacgaagaaggtgcccgttccaagtattaacatgtcgtcggcgtcacccctagaggatgagagtcgtccttccgcaggagttcaactacgcaagggacgttataggctcttgcgcgatcggtacagaccaggatgcaactctgtaggcgaatccccgcgtaaaagcagcttctcagatgatatcatggcgacagagagcagagagtcaatcttcgcagaagaaccacgcaccggggagcatagcgtccggggccctgtatcaaatcagtcacttttatcagaatctgtagcatcttctcaattggacagtacatctgtggacaaagcagtacctgaaacagaagatgtgcaggactcactcaatgcctcaccaactaaacaacaatgcggtgcgtacagactgtggatctgtactctaacaacaaagagttattcgcccaaaaatgttaccgacaccgatatatctccagacttaagaagtgttgcctttgtcatgagcttgtacccagagataccatcaaaagcccagagtctttatctgtgggatcctgatacattcataggtattggcaccttctacgcagcagaggcaaggaatgaatctggccacccagggaaacagaaggtgcagcttagccctctcagccctccctcgagcaccagcgtggaatgcccgggtgccgtgggtgtcgcaaccatggaccagccaggggaaaagagccctggaccaggacccaggaggctggggttccagtgtggggagtccctgtga

SEQ ID NO: 139504 - DNA, 1196 bp, Homo sapiens
atagtggccagaactatagtgccagtagtaaaggtgaacgactaagtgccagactcagagctttacctgggacaaatgaaccttatgaaagtagcagtaacaaagaaataggcaagtactctccacccagttcctccaggcatagcaggtctgaagaagaatgcacaggccctgagcgcgcgaccccaggccctgggcgccccgccgcatgctcgcggctggaagccccagtttgcgtggcccttcgggttattccgctcaagagccgccgcgtcgccccatctcggcgcgaatctgaaagcgctttcgggggagaagatgttgggggcactggcaggatctgggagccgagggaggttatggatgagaatgacacacagggttcggggatcgtggtctgggccacccagatctgcccacatgtggaacctcagtgctgggtggtcccaggagcaggagtggcagctgcagcagggtggctgaaggtgtcatgtgcatcatttttcatattatttagcaacagtgatgagatcactccccatgggcaaacggaggctctggggcttcctgaagaggcactgcagacatctggatggattttcagagttcctgcgactccatggctggtttgtgctcctggtgaggagcccagacctggaaagatgaaggtattggccccagctcagtttccatcacctctaatcatccctggaggactcgtcctttgttcctggattaagccgggccacctgtcactcgctcaagccaagcttcccacgtggccagggacacttctgcgatcccatcagaggggaaaacttgatgtgtttcaagaatgccctggtgccaagcttctgcagagcagcacgcagaaaataatctcctacgacccggcgaggtaccccaggtacctgcctgaagcctactgcctgtgccggggctgcctgaccgggctgttcggcgaggaggacgtgcgcttccgcagcgcccctgtctacatgcccaccgtcgtcctgcgccgcacccccgcctgcgccggcggccgttccgtctacaccgaggcctacgtcaccatccccgtgggctgcacctgcgtccccgagccggagaaggacgcagacagcatcaactccagcatcgacaaacagggcgccaagctcctgctgggccccaacgacgcgcccgctggcccctga

SEQ ID NO: 139505 - DNA, 708 bp, Homo sapiens
  misc_feature (1)...(708): n = a,t,c or g
gtgccagtcaagggaagtattcagtgctttgttgtagagttgttggatagaggcacaggatcatttcatgttgttgaggagaaaggagcaacagcctcctcccaccttattaaaaatagagatttaaaaaaacctctaatttcctcgaagtacagaatctcaagaggtagctctaaggagaatccctctgggttttgagcgcaattccttctttccaggggggccttaattcttggaactgcttttcctttaaatagagaaaatctctctggagccaaaaaatcggccttccccccaaattcccaatcttgtcggcccccactttttcttgttccgggagacttccaaagccaagtccccaacttccttcctttcaagccaagttcgggcccgnacccggcggccggcaagggccagcccttctccttccttcctgcgtggcgcagcacaggccctgagcgcgcgaccccaggccctgggcgccccgccgcatgctcggcgctggaagccccgagtttgcgtggcccttcgggttattccgctcaagagccgccgcgtcgccccatctcggcgcgaatctgaaagcgctttcgggggagaagatgttgggggcactggtctggatgctggtagccggcttcctgctggcgctgccgccgagctgggccgcgggcgccccgagggcgggcaggcgccccgcgcggccgc

SEQ ID NO: 139506 - DNA, 1444 bp, Homo sapiens
gttagcgtagcgaactgatacggcattcttggccgaggcacgcccaactgagaggtgcgcgggcgaggacagcggtatcgattcgggaatgcatatcagtccacgtgggccaagcgggagttcagattggcaatgcctgctgggagctcttctgcctggaacacggcatccaggcagacggcacttttgatgctcaagctagcaagatcaacgatgatgactccttcaccacctttttcagcgagactggcaatgggaagcatgtgccccgggccgccatgatagatctggagcctactgtagtggatgaggttcgggcaggaacctaccgccagctcttccatccagagcagctgatcacaggaaaggaggatgcagccaacaactatgcccccgggccacctacaccggggggcaaggaaagcattgacctggtggctggaccgcatacggaagctgacagatgcttgctctggcctgcagggcttcctgattttccacagttttggtgggggcactggctccggcttcacttctctgctgatggaacgcctctccctggattatggcaagaaatccaagctggagtttgccatctacccagccccccaggtctctactgcagtggtggagccctacaactccatcctgaccacccacaccacactggaacattcagattgtgctttcatggtggacaacgaagccatctatgacatctgccgcaggaaccttgacattgagcgccctacctataccaacctcaaccgcctcatcagtcagattgtgtcctcaatcactgcttctctccgctttgacggggccctcaatgtggacctcactgagttccagaccaacctggtgccctacccccgcatccacttcccgctggtcacctacgcgcccatcatctctgccgagaaagcctatcacgaacagctctctgtggccgagataaccagctcctgctttgagcccaacagccagatggtgaagtgcgacccgagacatggcaagtacatggccatgctgcatgctctaccggggcgacgtggtgcccaaggatgtgaatgtcgctattgctgccatcaagaccaagaggaccatccagtttgtagactggtgtcccacaggctttcaaggtgggcatcaactaccagcccccgaccgtggtccccgggggagacctggccccggtgcagcgggccgtgtgcatgctgagcaacaccacggccattgcggaggcctgggcccgccttcgaccacaagttcgacctcatgtacgccaagcgggccttttgtgcattggtatgtgggaagaggggattggaagaagggagaattttctgaggcccgcgaggacctggcagctctagagaaggattatgaagaggtgggcgtggattccgtggaagctgaggctgaagaaggcgaagaatactga

SEQ ID NO: 139507 - DNA, 621 bp, Homo sapiens
tttcgtccgccgggagggagccagatcccagcgatcttccccgacggctgtgctttacccataggctgccggcggctcgtaggtgggttcagctctgcgtccacgccagcccggagcccggggggcaaggggtctgtcccgggcgcagcgagaggatggtcatccgcgtgttcatcgcctcttcctcgggcttcgtggcgataaagaagaagcagcaagatgtggttagatttctggaagccaacaagatagagtttgaggaggtggatatcacaatgtcagaagaacagaggcaatggatgtacaaaaacgtccccccggataagaaacccactcagggcaaccccctgccacctcagatatttaaatggcgaccgatactgtggattgctagtatctttctcagttatttgcatcaagaacccaaactggcacaacttattcttgttgattccctggagtggaatcaatccttactgtgagcaggattcttccttctctgagaatgtgggtgatgagattctaaagaattctggcgttccaagggatttcactagtattctgatacagaaagaaagaaagtctgagaaggttaaaggagttgatcaaggtcatagataa

SEQ ID NO: 139508 - DNA, 428 bp, Homo sapiens
tttcgtggacgatggcagccacgattcaggccatggagaggaagattgaatcgcaggctgctcacctgctttccctagaaggtcaaaccgggatggccgagaagaagctggctgattgcgagaagacagccgtggagttcgggaaccagctggagggcaagtgggccgtgctggggaccctgctgcaggagtacgggctgctgcagaggcggctggagaacgtggagaacctgctgcacaacaggaacttctggatcctgcggctgcccccgggcagcaagggggagtcccctaagactacgccatctccaagtccgaggtcctctcccagattgaacaagggaaggagccctgcaactggcgccgccctgaccccaagattccagatgttcctgtggaccccagtccagaagcagaaactgaggccc

SEQ ID NO: 139509 - DNA, 3805 bp, Homo sapiens
atggagcccattgagggcaagagatccagctgccataaaacaggagaagctacagcagttgtccactgtccacccggctggaacatcaccatgggggtggaagcctcatgtgccttcgtcggccgcgccggctcccaggatacagtgcggaccggccgggcgctaaaggcgttgacgcaactgcgggcggcgcagggcaggggcagtcagggagcagcggcggcagagacagggctgggcgggcgccgcctgcggagagcaccgggaggcgggccctgcgtggggccgcgcgcagcagcggcgacgactttatctgggccgcgggggacagcgcagggccatggaggaggcggccgcagctccggtaagggcgaccagcgcgcgcacgaactcgcggcctggattccccgggcgacccgggcccggcacacgggggctgcgggagccgagccgtactaccgcgcctggggctccggggaacagggccgcggcgtctgccggggcctactgcgcttgccagccgggccccccactccgggccgagcccgagcgctggcggaacggttgtccccgccccgggccgccccacgccaagattcttggcccctccggggcttcctgcccccgccccagccgctgaaccctacatctgcgtccccccacccgaggctcttttctctgcttggcgctcggcctatttctccgtggacgatggcagccacgattcaggccatggagaggaagattgaatcgcaggctgctcacctgctttccctagaaggtcaaaccgggatggccgagaagaagctggctgattgcgagaagacagccgtggagttcgggaaccagctggagggcaagtgggccgtgctgggaaccctgctgcaggagtacgggctgctgcagaggcggctggagaacgtggagaacctgctgcacaacaggaacttctggatcctgcggctgcccccaggcagcaagggggagtcccctaaggtagccctggggcgccctggggttggggaggccgcggccaagcctgtgagcgtgtggttctctgagcaagtgtggggcaagctggaggactggcagaaggagctctgcaagcacgtgatgaggggcaactgcgagatgctggtctctttggactacgccatctccaagtccgaggtcctctcccagattgaacaagggaaggagccctgcaactggcgccgccctggccccaagattccagatgttcctgtggaccccagtccagccccagtgcccttgcccttgttttgttcattgtatccacctggtgaaatccatcagtgttctgtacctgcagccaaacagctgcacgtggtgcagagaaccagtcctgtgactgctaaactgtcgactctccagccaaagccccacttccacctggtgctgcatcccaccccatgccagcttctcaagggcaacacagtcaatcctaccttgacctctacccctacagccacggcctgcttctctgctccgcttcgtggcagagccccttggatctataccatggaagggaacagattaaaccagtgtttccaaactgggtgctggagggctcctgggcacatccaggccggggaagaagcccccgggagccgtgtggtgttcacacgcatcacaggttcaggagaatgcaggagggggcctgagaagagctgcggatttggtcactcccgggaagcgttaggagaggagtggatgattcggaaggtgaaggtggaggacgaagatcaggaggcagaagaggaggtcgaatggccccagcatctatcgttacttccccagcccctttcccgcgcctgacctggggcatctggctgccgcgtacaaactggagccaggggccccgggggcactgagtgggctcgcgctgtctgggtggggtccgatgccggagaagccctacggctgcggggagtgtgagcggcgcttccgggaccagctgacgttgcgactgcaccagcggctgcaccggggcgagggcccctgcgcctgcccggactgcggccgcagcttcacgcagcgcgcccacatgctactgcatcagcgcagccaccgcggcgagcggcctttcccgtgctccgagtgcgacaagcgcttcagcaagaaggcccatctgacccgccacctgcgcacgcacacgggcgagcggccctacccgtgcgcggagtgcggcaagcgcttcagccagaagatccacctgggctcgcaccaaaagacccacaccggcgagcggcccttcccctgcacggaatgcgagaagcgctttcgcaagaagacgcacttgattcggcaccagcgcatccatacgggcgagaggccctaccagtgcgcacagtgcgcacgcagcttcacgcacaagcagcacttggtgcggcaccaaagggtgcaccagacggccggcccggccaggccctctcccgactcgtccgcttctcctcattccactgccccgtccccgaccccatcctttcccgggccaaagcctttcgcgtgctccgactgcggcttgagcttcggctggaaaaagaacctcgccacgcaccagtgtctgcaccgcagcagagggtcgcccctttgggtgcgatgagtgcgcactgggcgccaccgtggatgcccccgccgccaagcccctggccagcgcgcctggcggaccgggctgcggcccaggatccgatcccgtggtgccccagcgcgccccctcgggcgagcggtccttcttctgcccggactgcgggcgcggcttctcccatgggcagcacctggcgcggcacccgcgcgtgcacacgggcgaacggcccttcgcctgcacgcagtgtgaccgccgcttcggctcgcggcctaatctggtcgcccactccagggcccacagcggcgccaggccttttcgcctgcgctcagtgcggccgccgcttcagccgcaagtcgcacctgggtccgccaccaggcggtgcacactggcagccgcccccacgcctgcgccgtctgcgcccgcagcagcttcagctccaaaaccaacctagtccgccaccagggcattccacacaggctcccgccccttctcctgcccgcagtgcggaaagagcttcagccgcaagacccacctggtgcggcaccagctcattcacggcgaagccgcccacgcggccgccggacgccgcccttgcggccccagcctggtccgctccccccgaggtggcgccgccccccgctcttcttctgagcctagttctcacgaggaccctttcttgccccacagtttcgaaaaggcccgtgcccatgaagaccgccctggggtgaagcaaggcgaccctggctgctgcccgaagggtttggccgccgcgggacacctgtttccttcccgcagtgtctgcgtccgcacagcatacccagctcggacctcctaggacagagactcagcgaacccttgctgggaaccgctgagctgaagttcttggaaggctcccacccaggtgccccgttggaaagcagatatttcccggacccagcgcggcctcaaccaggggcaggaaagagtggttatttatgtacttaaagtttcattaaagttaaaatcggaaagttctggggctgctaaatgaattgggggagggaacacctgactctccttagccactgtcccacctccatccacacacagaccacccccctccacttccccttctgtcctgggtgagttacatttagccagctgctgttaattggttctccacaaataaaaatgtaatatatttattcactaaaaaaa

SEQ ID NO: 139510 - DNA, 484 bp, Homo sapiens
cattttttatctcattgcggttcttttctgtgatatagaagtttgaactatcggcatgctggagtgcaaaatattcatggttggcaagagaccacccatcacagacttcctttattattgcagacagtggttttttctgatcaatttccatgagtttggggtaggcgcccggccattctatggccaccttgacgatgtccgcgggtggcggcattgtaagtccccaaaatgttcaaagccagtgggaatgaggatcctacagcgtaaacggccacacgtgtctatacctgcttggggtcgcaggacagcagcggcaagggttcccggcgatcagagctccggcgacccgccaccattgaaggggaactggaggctctgtcgcccagcgtgggcccgcggcggcgtgggtggctctgcctctatcctgtgcccatcctcgcccgctaacgctcgccccagcacacgcacttacactctgacgaaa

SEQ ID NO: 139511 - DNA, 503 bp, Homo sapiens
tttcgtgcgcagaccacgagtgtcctggcgcaggtttcgggggcgttggctgcaactccacaacgtccgctcgggaggagagttcgcggctgatctccggatgccttgcacatgcaaaatgtgtctctggccagcaggaggagggaagaggaagtgagagcagcggcagccggcggtgcagcagccggccgacccagagtgtatagacacgtgtggccgcttacgctgtaggatcctcattcccactggctctgaacattttggggacttacaatgccgccacccgcggacatcgtcaaggtggccatagaatggccgggcgcctaccccaaactcatggaaattgatcagaaaaaaccactgtcttgcaataataaaggaagtctgtgatgggtggtctcttgccaaccatgaatattttgcactccagcatgccgatagttcaaacttctatatcacagaaaagaaccgccatgagataaaaaattggcactatccttccg

SEQ ID NO: 139512 - DNA, 1541 bp, Homo sapiens
tcaaaaagtcgtgggcatccccctaggcaaagtgcagtgggcagggaccaggcagggtgcgggcgcaaggcgaacgcgcagaccacgagtgtcctggcgcaggtgccgggggcggcggctgcaactccgcagcgtccgctcgggaggagagttcgcggctgatctccggatgccttgcagatgcaaaatgtgtctctggccagcaggaggaaggaagaggaagtgagagcagcggcagccggcggtgcagcagccggccgacccagagtgtaagtgcgtgtgctggggcgagcgggagcgtgcgaggatgggcacaggatagaggcagagccacccacgccgccgcggccccacgctgggcgacagagcctccagttccccttcaatggtggcgggtcgccggagctctgatctccgggaacccttgccgctgctgtcctgcgaccccaagcaggttcgtaaagtttcctgggctggcgccgcgccccgactcgctgaccagttcttgcagaatccgtagcaggcattttccacctcttttacggtgagaactggggccaccagtccagccctgaacatggtgatggtactgtagccagtcatctgtgcatcctctgtggtctgcccactggctggcgtgtagaatatgcccagcaggggattttcagagcttactgggccctccttcttgggctcacctgccagttttccctcctctgtcagacctacaaatgtttgagtgccccaggaacaatcacatcgagtggggacgaatgatgattgtttgacgcagagcgccgagtggacctctagtgagtagcctgttcgaatccaacctggtttatgtggattgaatcgcttcgagattcttgagataccagtggcgtgagtcccaagatccttggaaggagaagttgatggcccatgtttcgattcgagacccctatagagtgggacattggtgctggcatagagccgggttttggcccgatgattccggatgggagtccggattaacgtgttccttgttggccagtggtcttgacagggtggaggaattcgtgtggattgaacagtctttgcaatgtcattttcgggacatttggtttccccttgaacgggagggatttggaccccttgcgattcccttgggaagaaactcagctccggattgtaccagggttgaaattttggggttaaactgtttaaatttgtagagggacgcgtaggtacacctcttggtgcctttagattgagcaccgttttcttaatgtggcccgtcttggagacatcgcactcggagtataagaagtgcacatagcccggtgtcgtggagaggagtatatacggagtgtgtatctttggaagccctgtgtggtggaacttgaggcctgcctgtgccgacttgacattctcagagggcgcaaatcctccacaggaagacgtctggagtttagcagacacctttgtgcacaccacaagaactcggggaatgttcgtgtaatatagcccaaggtctgaaattttcttgatagtatgac

SEQ ID NO: 139513 - DNA, 544 bp, Homo sapiens
aagaagaagtatgatgtggacacactggacatggtcttcctcgaccactggaaggaccggtacctgctgcggaaggggacagtgctactggctgacaacatgatctgcccaggtgcgccagacttcctagcacacgtgcgcgggagcagctgctttgagtgcacacactaccaatcgttcctggaatacagggaggtggtggacggcctggagaaggccatctacaagggcccaggcagcgaagcagggccctgactgcccccccggcccccctctcgggctctctcacccagcctggtactgaaggtgccagacgtgctcctgctgaccttctgcggctccgggctgtgtcctaaatgcaaagcacacctcggccaaggcctgcgccctgacatgctaacctctctgaactgcaacactggattgttcttttttaagactcaatcatgacttctttactaacactggctagctatattatcttatatactaatatcatgttttaaaaatataaaatagaaattaagaatctaaatatttaaaa

SEQ ID NO: 139514 - DNA, 2655 bp, Homo sapiens
atcagaaaaagtaccctctttatttgcattgcagaaatgccagggggctcggacatgggtgcccacagggtaggtttccacccaggtcgtcatcatctggcaccaggagcctgggggggggtgcccggcggcagaggctgagaggtgcaggggtgaggtggacagtcccctgagccatccctgtggggcacacgggccacctgtccagcacttgcgctccacgctgaccatctcacaggcgctccaggagagggttgaggccccccaaacctggcctgcagccatcctgggtctggcctccgaggagctggcggcgggcgcaccgtgtgccctggcctgcagggatggcgcttaccctcagcagcctgtcaccgtggggtccaggcctgagcgcttggagatgcgcagcttgactacctcctcagagcatgtgggatggatacccacggtccgcatcacctgcgcataggaagccccacacttgatccccagagcaaatccttgagtaacttcgcctgcgttggggccaaggaaatgcaggcccagcaccagctgtgggggctccctcaggcacaccatctttacataacactgggatgcatctcgtccagccaccgtgaactccagtggtttataatgggcgtgatagacctcaacatgctcctgcccgtggcgagccactgcctcctcctcggacagccccacacagccatactccagtggggtgaagacggtcgtgggaacattgtcgtagtccatcagatctgaggacccgccgaagagccgctgcaccaggagcctcccggccatgatcgctgtgggtgtcagctcaggccgcccctccaccacgtcaccaatggcgtagatgtggggcacagaggtggcttcccgggagtccaccaggatcttctgagtgtcggggctagtatctaccccagccttctccaaattcagacttctggtgtctgggactcgacctatggcccacaggacggtgtcaaaggtgcccgtgtcctccttgccggtggtgctgtcctcccaggtgacctgcagctggccatcagggagcctcctgacccgcgagggggcacagcccctcaggaaccgggtgccatgagatgccatgtgctctatgaccatggaggacatttgctggtcgaagccgcggagggggatgctgcgcatcatgatggtggtgtccagcccaatcccggtgaggaagccagcacactccagggccacatagctggccccgaccaccaacgtttttccaggggattccttcagccagaagatgtcatcacttgtgattccatattccaaggcaccttcgatgtgcgtggggtatctcggccgccctccagtagcaatgatgatgtgatcggctgacagcagaatctctttcccacctttggcaacgccgcaaaccgtgtgctcgtcaacaaagctggctttgatgttaaagtacttgacttttctgtcctgaagctggacacggtggccccagttcaaggatttcacgtgattttgaacagcttctgccatcttcctccagtcatgcggcacgggctgggccacctcccagccatagttgggggcatcttggatcaggcctcccagcagtgccgcctggtgcatcagcttcttggggatgcagcccacgttgacgcaggtgccgccgaggccccaccgggtgccttggggagaaggttccacgtagtccaccacggccaccttccttcccagctgggcggcctccttggcacaagccaggccaccagatcccccgccgaccaccaggagatcatagtcccgctgacctgctgctgcgccccgcgccgcgccccgcaccccgcccgccacggcctgcgtccgccaccggaagcgccctcctaatccccgcagcgccaccgccattgccgccatcgtcgtggggcttctggggcagctagggctgcccgccgcgctgcctgcgccggaccggggcgggtccagtcccgggcgggccgtcgcgggagaggtgagagcgctggctagaccggggccgaatgcggccggattcggggcgggggccttcagactgctgcatccgatattcttccggaccactggatcacaaatcaaaccatgtgactcccgcatgagcaggcagagtggagataacacggatcgctgtgtacactgtgtgctccggttgttgcatccgagggttgatcggatggtggttcccatccagatccaagtcctggcccctgtactggctctccctggattactggatcgcagtcgaatcccctgccagaatcctggtccccctttatcacaccggatcagccccaaagggcagggcttcttgcagcagttccagcctttgctgggggtttccagcccaggtctgaccacatgtttaactttttgaagaactaccaaactgttttccacggcattcacaccagcaatgcaagagggttcccatttcatcacatccttgctaacacttgttattttcaagggaatcccagcgctcttctcctctggcggttgctggagggccttgtgaggtggccgtgggcactgtagcccccaggcactgcattgtggcctgggcgtgttggcctttgagcctttggccttgagcacttccccatcccccat

SEQ ID NO: 139515 - DNA, 1845 bp, Homo sapiens
cagcccgcacggcctgcgtccgccaccggaagcgccctcctaatccccgcagcgccaccgccattgccgccatcgtcgtggggcttctggggcagctagggctgcccgccgcgctgcctgcgccggaccgttgcttttccagtcccgggcgggccgtcgcgggagagaaataacatctgctttgctgccgagctcagaggagaccccagacccctcccgcagccagagggctggaagcctgctcagaaggtgctttgaagatgccggaggccccgcctcgtgctgttggcagctgtgttgctgggcctggtgctgctggtggtgctgctgctgcttctgaggcactggggctggggcctgtgccttatcggctggaacgagttcatcctgcagcccatccacaacctgctcatgggtgacaccaaggagcagcgcattcctgaaccatgtgcttgcagcatgcgggagcccggggaacgcacagagcgtgctgggaggccatttgacacctaattgcgagcagaaggagtggggccattgaacgtgggcgacaagaaagggcaagattcgtgggacgccttgatttcaagggagcaaccagcccttccgtgcttgcttggaaacttgggggcctactttgggctacttcagctgttgcgcatggcccggcctgctggtcaaccagggggcgaggctcattcaccattcgagattcaaccccgacctgtgcccgccatcacccaagcggatgggtggatttcgctggcgtgaaggacaaggcgctgttccaggtcacccttggtgtgtggagcgtccccagagacattccatccccccagcttgaagaagaagtatgatgtgggacacaactggacatgggtcttcctcgaccactggaaggaccggtacctgtccggacacgcttcttcttgaaggaatgtggccctgctgccggaagggggacagttgctattggctgaacaacgcttatcgtccccaggtgcgccaagacttccttagcacacgtgtcgcgggaaccagcttgctttggggtgcacaacattaccaaatcgttccctggaaatacagggaaggtggtggacggccttgggagaaggcccatctaacaagggccccaggcagcgaagcaggggccctgactgcccccccccggcccccctctcgggctctctcacccaagcctggtactgaaggtgccagaccgtggctcctgctgaccttagtgcggctccgggcgtgtgtcctaaatgcaaagtcacacgctcgggccgagagcctgcgcgcctgacatagctaacctctcgtgaacatgcaacacgtggagttgttcttcttttaagagctcaatcatgacttcgtttactaacactgggctagcgtatattatcgttatatactaatatcatagtttcacccaatataaaaatagaagattaagaatctaaatatttagatataactcgacttagtacatccttctcaactgccattcccctgctgcccttgacttgggcaccaaacattcaaagctccccttgacggacgctaacgctaagggcggggcccctagctggctgggttctgggtggcacgcctggcccactggcctcccagccacagtggtgcagaggtcagccctcctgcagctaggccaggggcacctgttagccccatggggatcgactgccagcctgggaaacgaagaggagtcagccagcattcacacctttctgaccaagcaggcgctggggacaggtggaccccgcagcagcaccagcccctctgggccccatgtggcacagagtggaagcatctccttccctc

SEQ ID NO: 139516 - DNA, 3460 bp, Homo sapiens
  misc_feature (1)...(3460): n = a,t,c or g
tttttttttttaagaaaagagctctttattccacgtcgtccgatatttttacacaagtaaaataaaatgcatatctctatataccgcgatctgggtgggaggcggcgttctggaacaaacgctgccgccgaaccctgtaaacatgatggggtggagatgggggtggcgggcggcaggcgtccatcagggaggacctggcctggcctgccccacgggttcggccgcccggctggcttggcggcgttggagagagaccccgtatgttacacacacctgggctgctgaagcacgctcttgtgtccgctgggggtcaagcagggcccaagcactnttccacagcaccagcgccagggcccaggggggtgaggctgcaggtgaggctgggtagggcacctgagccttctgagtcaccagtcccgccacccccgctgcctgcctggcccagacggcagtggctgcgggtgcggttcttgcgtgaacagcctggcctccggcgagggcccgaggtggggaaccctggtggctcggagccctcgggccgcactgcagtgagcgggggctcagcagagccaggcagagtcccaaagggtgagtcattgatgtgccgtgggccagagccgttgcccggcgggctgtcaccgggcggcacgcgtcccttcagcgcattgcctgccgaagctggtcttccaggctccagtactgaggccttgtcagcggcatctggctggcagcacttgggaagccccagcggctcctcatcggtggccctgccggtccagatgggatggtaagggccggtggccacagcgcagccctgcaggtcattggcagctaggcgtttgaggtcacggccagccaggcgttgcgggaggctgcagggcacctcggaggaggagccgcggaacttctgcagccaggcccagagtgggcgtgcccggcagtcacacaccccaggggttgtcgttgagcctcaggtactgcagggcacgcaggggggccagggcctcagtgggcagcgctgatagattgttggcaaacagatagagtgtcatgaggcggccaaggtcacggaaggcatgcgggtgcacatgggccacgcggttctggtgcagtaggagacggtcgaggctgtgcagcccacggaaggcgcgctcgggcacgctggagatgcggttcccgtgcaggaagaggtgtgtgaggttgcccaggtcgcggaaggtgtcatcaggcagtgcctgcagcgcgttgtcctgcaggtagaggtactgcagggcagccaggccgcggaacagccccgggcccagctcctgcaggccgcagcggtccaggtgcagcgtgtgtaggcggcccagcccgtggaaatgtggccagggtcccacagaccggaagctgtgcaatttatcgctgaaggtccagctgctcccaggagggccaggccagtgaaggcagccgcatcaattcgggccagcacattcgagtgcagccacaggatggtgaggttgcggcaggcacggaagctggcagctggcacatgcgagatgcggttgccgtgcaggaagatgcgctggctggcagcagggatgcccacgggcacagcctgcaggccctgctgggggcagcttgtcgtcaccttgggctcattgtagcatacgcaggcacctgggcatggggctgccacctgccaggcctgcagccacagcacccatgccagcagccggctccggtggtgcggggtcgggggagacaggggaggacatgggggagtggccacgtggcgctcagttctgccaggaagtgggtattgggcgcaaagacacggctcggttcctgccgagacaactgcttttcgtaaaccaacttctgagagtcgggtgaggtgggctctctcctcgctgcagccatggtaattggctccagcctggccccccttggggcctgcccgctggtctccatggcaacccctctgctgagcgagcaggagggggcatctttttatgagataatcaaacccaactttgcagcatgggtttgtcttcacagccggggccctccgtgccctcccaagcttgggctgaagttccacagggatgcctttgcctctgcccagcgatgccaggaggcagcacagggcaggcagctgtggaggcgccgagcaccggctttcatccacgcacagcttggtgccctcgggccccaatgccgcccctgggctgggatcaccggagggtcccatcacctgccgccatccatcctcaggcccacagacacgtgcaggggcagccagaattcccatggtgtttcctgtgcccttccagggctccaggtgctgcggcaggagattggcagcagcttctggtgggggcagtctgcccttgaggggtcctgagtctcctagggaagtgagtaccagcccctgatgccctggccctggcccctgctccttgttgatcttggcttggcaaggtgtgaagtggcccctgtcccaggtgctgtgctgagtgccgcccatacaagaccaggccgaggagccgggtcccaggcactcacggtccagggccagctgaccacgggcagccaccctgctgcatggcaggtgcccaccctccacggcctcaggcctggatgctcctgcagacccatagccaagattgtgaaggaaaagtaggctgtggaggcattttctgtccttgttatcatcattgtaaacatactcatcatcaccatcaccatcctcatcaccatcactatcattatcatcaccataatcatcatcagcatcatcatcatcatcatcaccaccactatcatcattaccattctcattaccatcactatcaccaccatcatcttcatcaccatccatcaccatcaccaccatccttatcctcatcactatcaccatcaccgaggccaggatcaccatcctcatcctcatcaccatcatcacatcactatcatcaccatcactatcaccaccactatcatcctcatcaccatcctcatcaccatcaccagcctcaacaccatcatcaccaacactatcaccatcattatcatcatcaccatcctcatcaccctcaccatcctcatcaccatcatcactatcactatcaccaccatcatcatcaccactatccatccttatcctcatcactatcaccatcaccatcaccatcatcaccatcctcatcctcatcaccatcatcccatcactatcatcaccatcctcatcacaatcactatcatcaccatcaccatcctcatcatcaccatcgtcctcatcaccatcaccgccatcagcatcctcatcactatcatcatcaccatcctcatccctgtcaccatcatcgtcttcatcatcatcaccgtcatcatcactatcatcacaccagctctgtgcaaggcccgggcagccagccagccggtgcctccctcccaggccaggcctgcaggaagccat

SEQ ID NO: 139517 - DNA, 461 bp, Homo sapiens
gacgctgagaggcaggaggcactagggatcgtccgcaggattgggactgatacagaggccgccacggagcccgccggagccaccgttcctgctgctgccgccgctgcccgaatcggaaccgtcgggccgcagccgccggcaatgccgcgaaggaagaggaatgcaggcagtagttcagatggaaccgaagattccgatttttctacagatctcgagcacacagacagttcagaaagtgatggcacatcccgacgatctgctcgagtcacccgctcctcagccaggctaagccagagttcttcaaggatttccaggtcctgttcgaaatctggcagtcttttggcactgaggagcctgcttactctaccagaagagtgacccgtagtcagcagcagcctaccccagtgacaccgaaaaaataccctcttcggcagactcgttcatctggttcagaaactgag

SEQ ID NO: 139518 - DNA, 2540 bp, Homo sapiens
tgaggattctttatatccctgatgggcatcgggccccaggggcttcccaaagcggcaactgggagcatcccctcctcctcctggagcctggcaaccttgccagctctccttccatgtccttggcatatccccacccttgtggcctgaccattcatcaagaacatcggcgtgcccacgaagagctggcatacacccccaacgacagagcctcctctacaggacacccagcctttattgaagatggcaacccatctccagtccttgcctttgctgcctcccctcgacctaatgatagctacatcttaaaacgggagcccccagaaagctgtgagaaagagcgtgtgtttgaagaagccacaacaagaggaaagtatggggaaggagccaagcaggagacgttcacctttgccttaactttggtcttcattcaatgtgtgatcaatgctgtgtttgccaagatcttgatccagttttttgacactgccagggtggatcgtacccggagctggctctatgctgcctgttctatctcctatctgggtgccatggtctccagcaattcagcactacagtttgtcaactacccaactcaggtccttggtaaatcctgcaagccaatcccagtcatgctccttggggtgaccctcttgaagaagaagtacccgttggccaagtacctgtgtgtgctgttaattgtggctggagtggcccttttcatgtacaaacccaagaaagttgttgggatagaagaacacacagtcggctatggagagctactcttgctattatcgctgaccctggatggactgactggtgtttcccaggaccacatgcgggctcattaccaaacaggctccaaccacatgatgctgaacatcaacctttggtcgacattgctgctgggaatggctgttagttgcccagaccaagggcctgaattagttccaagatgcccttttgttcaagcccttgagaaaccttcctggaaaaacctgcaccagcaggatttgtttgctacttgttactggcacaatgaaggagagtcgtgtgtcagttgtcatgggaagacactcagtagtaaaacacagggaggaatcctgttcactggggagctctgggagttcttgagctttgctgaaaggtaccctgccatcatctataacatcctgctctttgggctgaccagtgccctgggtcagagcttcatctttatgacggttgtgtattttggtcccctgacctgctccatcatcactacaactcgaaagttcttcacaattttggcctctgtgatcctcttcgccaatcccatcagccccatgcagtgggtgggcactgtgcttgtgttcctggggtccacccagataatcttggataatctcaagatccttaatacatctgcaaaaacgttactatacaagacgcccctgtcctggcaagagctagaaggtgagcgtgccagttcctgtgcacacaagcgctcagcatcctggggcagcacagaccaccgaaaagagatttccaagttgaagcaacaactgcagaggacgaagctgagccgcagtgggaaagagaaggagcgaggttcaccactcctaggggaccacgcagtgcggggagcactgagggcgtcccctcccagcttcccctcagggtcccctgtcttgcgactcagcccctgcctgcacaggagcctggaagggctcaaccaagagctggaggaggtatttgtgaaggagcagggagaagaggagctgctgaggatccttgatatccctgatgggcaccgggccccagctcctccccagagtggcagctgtgatcatcccctcctcctcctggagcctggcaaccttgccagctctccttccatgtccttggcatctccccagccttgtggcctggccagtcatgaggaacatcggggtgccgccgaggagctggcatccacccccaacgacaaagcctcctctccaggacacccagcctttcttgaagatggcagcccatctccagtccttgcctttgctgcctcccctcgacctaatcatagctacatcttcaaacgggagcccccagaaggctgtgagaaagtgcgtgtgtttgaagaagccacgcaccaacggagagacagcttcgatataagggaaaaagtggctgaactcaggaagaaaagaaattctggactgagcaaagaacagaaagagaaatatatggaacacagacagacctatgggaacacacgggaacctcttttagaaaacctgacaagcgagtatgacttggatcttttccgaagagcacaagcccgggcttcagaggatttggagaagttaaggctgcaaggccaaatcacagagggaagcaacatgattaaaacaattgcttttggccgctatgagcttgatacctggtatcattctccatatcctgaagaatatgcacggctgggacgtctctatatgtgtgaattctgtttaaaatatatgaagagccaaacgatactccgccggcacatggatggatctggcagtctttga

SEQ ID NO: 139519 - DNA, 2337 bp, Homo sapiens
atggctctcccggctgcctgcctcagccccactgcgagactcacacagccccccaacccccgaggccgctgcttatctgctgtacggggcggggaccggccccctcatcctagagctgtcattggactgcggaaacccagaccttccaccccagccaatccacagcttagccttccctttcctgaggatgattggtcgatgagcctagcgatccaagccaagaccccaccctcacaccgcccccttcggttttccaacatcccaggggctgctgattggcctgtacagaagagggctggttctccagcgccaccaatgagaagacgcagaataggggagcgtcacacccagtcccagaacgctccagacgctgagaggcaggaggcactagggatcgtccgcaggattgggactgatacagaggccgccacggagcccgccggagccaccgttcctgctgctgccgccgctgcccgaatcggaaccgtcgggccgcagccgccggcaatgccgcgaaggaaggctgcttcaaattcttttaggacagtggtggatatgagtgaagacggggcaggcaggccacatctcttagaagaggaaggtgattgccacgtctccttcctccatgctgatggcaaggcgtgcgggctgtgttctcttgcagccagcgtcccatgctcggtggccccagaaaagtcagtgtgtaggcctcagccacttcaggtccggcgtacattctccctggacaccatcctcagctcctaccttctgggccagtggccacgagatgctgatggggccttcacctgctgcaccaatgacaaggccacccaggcctatgtgactgtctctaggagacagtgctcagtgtctcctgccacacgcgtcctggtgccaggtggctggacacccagcctttcttgaagatggcagcccatctccagtccttgcctttgctgcctcccctcgacctaatcatagctacatcttcaaacgggagcccccagaaggctgtgagaaagtgcgtgtgtttgaagaagccacgtctccagggtcctgaccgggcctttcctgacttcctgtcctgacaaggaacaaagtccattttcaacccgactggctcagccttctgccccgtcaacctgatgaagcccctcttccccggcatgggcttcatcttccgtaactgcccctcaaacccggggatctcctcttcccccggccagccccaggccaccacctcggaaggatccggaagcctccaaggcctccccactgccattcgagccatggcagcgcacccctaccatcagtaagagccgtgtgctctttccacgagctcccgtgagtggtctcgagggtcccaccccatgccccacttttaccatagagaccagtgccttggtggcaggtccctccccaggtcccctgagatggggtatggaggggcccttccctctcggccttcgagcactttctttcacttactgagtcaaagccctggggtcctcttttttgatgggcaccggcccctctgaacgtgatgggaactggccttctccaatagtagctgggcagctcacaattcacacctgtgtaacctgccacatccctcacttggtgggaaaacacccagaaggtctttgagtcccccacccctgggtgttcagttccaaatggactgtataggaggccctttatttttgtcacagagcaagctgggccatgaacgaaggagagaagacgccacagatttccttccctctcctccaggagaccataagatagatccccccatcctctcagcccttattccccatgcctccctcttcattggagggagctgacccaaaagcagccctaaacgggccattaacacttgacccaattccagctgctggccagagggaggaaacaagtgttttccccaagtggcattttcatctcgctttcaccctgactaaagattgtcttaaagtagcagcccagcccgcccaagccccaggtgggtagtggggaggagagctggcattcctccaggtggcaaatggcgactctatactctccgcccgccccagggctggatggattagaaaaaatgcctaatttttccttgtatcgatgtagaggactctatttttctcccaaagacactaattttttgcagcctgtttgaagtttgtatattttccgtactggcagagcttgacacaaaattgaagaatgttaatgttcgagttttcttatgcttgtgtttagaggttgttttttgcagatcttggtgttaatagaccaaataaataaattaaatatttcccagcaaaaaaaaaaaaaaaa

SEQ ID NO: 139520 - DNA, 1509 bp, Homo sapiens
atgacggaactagagacagccatgggcatgatcatagacgtcttttcccgatattcgggcagcgagggcagcacgcagaccctgaccaagggggagctcaaggtgctgatggagaaggagctaccaggcttcctgcagatcctcaccaacgaggatgagcccctggtgaccattcccttcttgagccatagctgctcacttgcctatttgctgactacatcagggaaccgtgttaacgcactgctgaagtggctcttgaaacttggggaaaggtggcagatgacggaagaaggaatcaaaggacagagaagtgggcatggaccggagcaggcagaaaacccactgggtgacagcgttccacaagacaccaccaaggacgtcccactgacccagcaccggcttcaccagggattagaagcgggggtccccaaaacctctgtgccggccaggcccggtcttccagttccagcgttgcagcatgctcaaatcccaggtccctgtgagcgagcgctcctccactgccacaacggaccccagcgcctgcagcacagcctgcagggagaggagcagagggagacacatctgcgaggacaggactggccgtgtactttacagatgaggacactgaagcgggaggtgcatgctttaccaggtggccgagctggaggagcagcccgggagggccttggtgcttccatctgtgaaacgggggagcatcagatgaccaacttccaggtcccacgctggcctccttgcttcccagggcaggctggccctgtgctgggcactggtacccgccatggcctagacctgctctcaggcaggccagggaccgtgaggaaaggatcctccgtggcgaggatcatgaaagaggaggtgacagtcacaaaacagtcagccgctgatctaaggcatacaggacaaggccccacctgctgtgtgttgtctggaggccggtgtggcagccaggcctgcagccgcaggcccttctccctgcttctgggtgatgagagtgaaccccacgggcgagggccctttgccgcagctctgcaccaccgcaggaatcctttgaatgatgtgatgcttgtgggcgacgatgcaggacctgcaggacattttgcctcggtctacaacccgctggcctggacggtcaccaccatcgtcaccctgactgttggtttccctggagtccgcgtcacagatgaggcgggccacccagtgccctcgcaggtgtccggcatccaacggtgtcttcaggggatgaaggctccacccgtgacggtgacagtgagcggtgagaaaggcagctgcctttgcgcaagctgtgtcctctgcctggagcatccctacttccctctcgtcccctggctacctcctgtttttcgggacagcgtcattcccagctccacatctccacaggaagctgtattagctgacgtgggcttccgtaacaacgtaccccagagggctcagcttaaaccacagaaacagattctcacaccgttctga

SEQ ID NO: 139521 - DNA, 817 bp, Homo sapiens
ttcccgggtcgacgatttcgtgccgcagggatggggcagctgtgctggctgccgctgctggcaccgctcctgttgctgcgaccgccaggggtccagtccgccggccccatccgggccttcgtggtgccccacagccacatggacgtgggctgggtctacactgtgcaggaaagcatgcgggcgtacgccgccaatgtctacacctcagtggtggaagagctggcccgcggccagcagcgccggttcatcgctgtggagcaggagtttttccggctgtggtgggatggcgtcgcctcggaccagcagaaataccaggtccgccagctcctggaggaaggacgcctggaatttgttcatcggaggccaggtcatgcatgacgaggctgtgacgcaccttgatgaccagatcctgcagctcacaggtttggccaccctaccctgcacccagggtccctcaggacctccagtggggctgggacatggtatcagaacccccaggttttgagctctgtctgcccctcttagtggggtcggggaccttaaccagtgaaagcagtgatttgctagtgccatattcatgcctcaccaaggaagttgaatgtaggggttaagagcatggatgctagagtcagatggtctcaatatatcctggctctgccaattccctcctctgtgaccctggaaaggaatgtaacttcagtttcctcatagataaaatgagtttgatggtaatacctacctcaaagggttgttgtgagtattaaatgggataattcaaataaagccctttagtaggaaaaaaaaaaaaaaaaaaaaa

SEQ ID NO: 139522 - DNA, 1395 bp, Homo sapiens
atgactaacacaccagtcatgccggatttaacagcaggagacagtgctaacgcactgctgaagtggctcttgaaacttggagaaagatggcagatgacagaagaagggatcaaaagacagagaagtgggcatggaccggagcaggcagaaaacccactgggtgacagcgttccacaagacaccaccaaggacgtcccactgacccagcaccggcttcaccagctctttgggttcctcatggttccatgtggttcttcagagcctccattggtggctctaacctccctgaggtcctcggagtgccctccactggagcagtggccaatgggccgcgtccccgcccgcgcggccgccccgcccctcgcggacccggaagtgggcctggcaccttcccggcctgccgcagggatggggcagctgtgctggctgccgctgctggcaccgctcctgttgctgcgaccgccaggggtccagtccgccggccccatccgggccttcgtggtgccccacagccacatggacgtgggctgggtctacactgtgcaggagagcacgatcccatccagtggggagagcctggtatggagcgagtgcctaatagctgtgtggggggaaagcatgcgggcgtacgccgccaatgtctacacctcagtggtggaagagctggcccgcggccagcagcgccggttcatcgctgtggagcaggagtttttccggctgtggtgggatggcgtcgcctcggaccagcagaaataccaggtccgccagctcctggaggaaggacgcctggaatttgtcatcggaggccaggtcatgcatgacgaggctgtgacgcaccttgatgaccagatcctgcagctcacaggtttggccaccctaccctgcacccagggtccctcaggacctccagtggggctgggacatggtatcagaacccccagcaccataatgaccatgactactaccatcaccaccaccaccacgatgaccatcactaccactaccatcaccaccaccaccaccatcaccatcaccactaccaccatcaccaccatcaccaccaccatcaccatcaccaccaccaccaccatcaccatcaccagcaccaccaccatcaccatcaccactaccaccaccaccaccatcaccaccaccatcaccatcaccaccaccaccaccaccatcaccatgaccagcaccaccaccatcaccatcaccaccaccaccaccaccatcaccaccaccaccctttaccaccatgaccaccaccaccatcaccaccaccatgaccatcaccaccaccatcaccaccaccaccaccatcaccaccaccaccaccaccaccatcaccatcaccaccaccatgaccatcaccaccaccaccactacccttga

SEQ ID NO: 139523 - DNA, 412 bp, Homo sapiens
tttcgtgaggagagcgacaacgtgaaaatgccccgtgccgtggcgttcaccggagtcctgccagctgtccggcgctggggtggacgtctgatttatgaagctccccatccacctatctgagtacctgacttctcaggactgacacctacagcatcaggtacacagcttctcctagcatgacttcgatctgatcagcaaacaagaaaatttgtctcccgtagttctggggcgtgttcaccacctacaaccacagagctgtcatggccgccatctctacttccatccctgtaatttcacagccccagttcacagccatgaatgaaccacagtgcttctacaacgagtccattgccttcttttataaccgaaagggaaagcattcttgccacagaatgggacacagcccgcaacg

SEQ ID NO: 139524 - DNA, 948 bp, Homo sapiens
atgcccagcctaaataccatagtcagccctctgggctcccctcacaccagcctgatacctcccatgctcctttctgccaatctgccctttgacaccacaatcatgattaaactccaaactgcctgttctgctcccattcacaacctccagaggccttgtggggaaaacttaaggacaagcacgtttgttaggcggctggacagaaacttagttaaaagtcctcagcccggtggtgggggacaaccgagtcgtcagtgggaagcgagaggtgcggagccccaggggcgcagggacccctcggaggtgcaagtccagcgggacgaggttttgggagaatttcgagggcccctcgcaagccctcccgcgcacccaccccgacccaggggctcggtccgccgctgggtgcgggaggccaggggagcctcgcctcctgcaggccggctcgcaagaacgcacggccacccacccgcgccgcggcccacagcgcgcacccacactctcactggcactcgcacgcgcgcccccaaccacaaagcccgtccgcggcgggacagtcgggagacccgtggccgccagctcgggtcccacccccgcccctcctgcgcttaccccagcgccggacagctggcaggactccggtggacgccccggcacggggcattttcacgttgtcgctctcctcttcccactcgaaaagctctggaaaacatcgcggggcccgcaaaaccccggaaatgtggcctctctttcgtggctcactttctaaactttccagaaggcgcaaagtttctcccagcgccgccctgcactggaggctgcgaagaacgcagaagcggctttgctgctaggaaggtgcatacgtttctagttctgatttttcacttcactggatctgtaaacgaaagcaagtgtgtctgctcccctagttctccatatccacgattataa

SEQ ID NO: 139525 - DNA, 1086 bp, Homo sapiens
atggataaagctggaatccatcattctcagcaaactaacacaagaacggaaaaccaaacaccacatgttctcactcataagtgggagttgaacaatgagaacacatggacacaggaaggggaacatcacaccctggggcctgtcgggggttgggggcctaggacagggagagcattaggagaaatacctaatgtggatgaagggttgatgggtgtgattgctgctgtggccatcgtcctagtctccctcctcttcgtcatgctgcgctacatgtaccggcacaagggcacgtaccacaccaatgaggccaagggcacggagtttgctgagagtgcagatgcagccctgcaacagagagagagagcacttgattcttcccgagatagccacctggaaacactaggtgcctgcccagggaggaacggaggaggactcgcgctacaagaggccactcccagggacccagggaggcgatggccaccccagaggccaccttttgctccacggaggtgggagaaaatctgggcacatgggcccctgggcagtgcaggacaacatcagctcactggcaggaaagtccttgttgaggggcttggctgtatctgcatggcccacactgatcttcagaacaccagtgtggcaaaaatggcgataaataggcccaatgaatatgcacaagtcagtttagaaaatgatgtatcatgtaaagtgaaagcagtgcaggctcctcagcgtcttcactggcccagtgtggatgctgacactggtgggaggggagctgtgcacatagcctttcccaagcatgttgaaccagagaccccatttgctcacacgatacctgctaggaactcgtggaccaagtggtcctcggagcacattttggaaacactcagcccccagaagcctgccttgccttgggctcccagacagcaagggcgtcctctgggcctcactgcccccatttctaagcggctggggcctggggatgggcctgagggagaagccggtgagcggctggcccaagcccattttatcaacaccaggccacccagcacaggcccaccaggtacccctgcagctgactga

SEQ ID NO: 139526 - DNA, 427 bp, Homo sapiens; identical to SEQ ID NO: 132566

SEQ ID NO: 139527 - DNA, 1179 bp, Homo sapiens
  misc_feature (1)...(1179): n = a,t,c or g
cggacgcgtgggcgggaggagtgtgacccaagtgccgcttcctctcgccgccgagggttaggacgcccgggagcgcgaccctcccccggcccggcctggcccggcctggccagtccccgcggtctctgcccgggctgacgcccaggaatgtggtcgacgagaagccccaacagcacggcgtggcctctcagcctcgagcctgatccggggatggcctctgcctccaccacaatgcataactaccaccattgcaggagcctgattccagggatgttctggatggccggatggcagaatggagacctccacccccaccataatggacattgtcgtcattgcaggtgtgattgctgctgtgggccatcgtccctagtctccctcctcttcgtcatggttgcgctaacatgtaaccgggcacaaggggcacgtaccacaccaatgaggccaaagggcacggagtttgctgagagtgcagatgcagccctgcagggacgaccctgccctcctaagatgctggtgatagcagcagaaaaggagtactttatttgagggacaacagacttaactttccttgaatgccttcccccatcttccatcaggaaaaattacaccccatccgcccagcaccccctgctggataccacccagacagagagagagagtacacttgatttcttcccgagatagcccacctggaaaacactaaggtgccctgccccccagggaggaaacggaaggaaggaactccgcgcctacaaagaggcccacttcccccagggaccccccagggaaggccgaatggcccaccccccagaggcccacccttttgcctcccacggaggtggggaagaaaatcttggggcacattggggccccctagggcagtgcaggacaacatcagctcactggncaggacaacatcagctcactggcatcactgcagggaaagccctgttgagggttagggggttcttgggttacccgggggctggggaagcaaggaaataagtcatctgtatgctgactggggataatggcatcaaatgtcagtccttgacatttggggggaacagcaggtgccagagctaaaaggtacctttgtctacacattgatccagctcagaacgattggaaataaatttgaaatgtaaccgagcaaaaaaaaaaaaaaaaaaaaga

SEQ ID NO: 139528 - DNA, 599 bp, Homo sapiens
ttttttattttacaaatacattcatattcaaagacatgggtgcttatgggagaggatggtgtaaagaaagggaaaaaagccataaaaccagagaatctttgcatgggactgtattcctgagatcccaaaccaaagggatgaatgtgctgttatgccttaaatgtgtgcaccaggaaatgcaaactagaaagggtggctctgaagggtcctcaggtgaggaagacccccagggctgagaatccaccaccttcatccttcaaaagagtacctcagttgtctgcttacgcttcagccagcatgtgtgagcttggtcatttcctgcaagccaggcaaccacaccagtgtataagcctcaagcaaatgtcactcccaaagccccaaatgggactaaggcctctgctgggctaggcgtggtgtaaatcccaggcctggaagctcctacccaaccctcatttgtttcaactcactttcaatatgtgcatagtttcataaagcagacattttccatgaggaaaagaggatggtggtgaaaaagagagtgcttgttccaggtaaaggacttcaagataatttacaggcagatttatttttattagtaa

SEQ ID NO: 139529 - DNA, 1905 bp, Homo sapiens
agccgggtcccaagcctgggcctgagcctgagcctgagcctgagcccgagccgggagccggtcgcgggggctaccgttctgtgggaccgctgggcccccaccgaaggcgaccctgtggggaggccttcttcggcttggctccttgctcagcctgtcgtgcctggcgctttccgtgctgctgctggcgcagctgtcagacgccgccaacaatttcgaggatgtcagatgtaaatgtatctgccctccctataaagaaaattctgggcatatttataataagaacatatctcagaaagattgtgattgccttcatgttgtggagccccatgcctgttccgggggcctaatgtagaagcatactgtctacgctgtgaatgcaaatatgaagaaaagaagctctgtccacaatcaaggttaccattataatttatctctccattttgggccttctactttctgtacatggtatatcttactctggttgagcccatactgaagaggcgcctctttggacatgcacagttgatacagagtgatgatgatattggggatcaccagccttttggcaaatgcacacgatgtgctagcccgctcccgcagttcgagccaacgtgctggaacaaggtagaatatgcacagcaggcgctggaaagctttcaagtccaagagcagcgaaagtctgttctttgaccgggcatgttgtcctcagcttaatttggggaattgaattcaaggtgactaggaaagaaacagggcagacaactgggaaagaacttgactggggttttgctggggtttccatttttaattaccttgttggattttcaccaactgtttgctgggaggatttcaaaactggggaggcaaaaacttgcttgattttttttttcttgttaaccgtaataatagagacatttttaaaagcacacagctcaaagtcacgccaataagtcttttcctatttgtgacttttactaataaaaataaatctgcctgtaaattatcttgaagtcctttacctggaacaagcactctctttttcaccacatagttttaacttgactttccagataattctcagggcttttgttgcggggtgttctttgtttgtttgttttggtgccacaggggagggatgcctgggaagtggttaacaacttttttcaagtcactttactaaacaaacttttgtaaatagaccttaccttctattttcgagtttcatttatattttgcagtgtagccagcctcatcaaagagctgacttactcatttgaacttttgccacctgaactgtaattatcctgggtatcctgcctgtgtctgcacttccatggtaaacgggatctaaaatgcctggtggcttttcacaaaaagcagattttcttcatgtactgtgatgtcctgatgcaatgccatcctaggaacaaactgggccatttgctagtttacttctaaaggacttaaacataggtcttgggtgtgtgtgggtcttacttcatcttcctaggtaccctttaagggacaaatccctaagggacttggggacacttggcaataaaggaaatttttatttttaaacccaagcctcccctggattgataatatatacacatatgtgagacatttcccgtcgctgggttgagacagcctgtttttgcgtccaatgtgtgcagctttgaactaaggctggggttgtgggtgcctcttctgaaaggtcttaaccatttattgggttaactggctttttttcttcctatgtcctctttggaatgtaacaataaaaaataatttttgaaacatccatcagtgtatctatctatgtctcctagttttttcctcctccctcttttgctgtataatgagattgaagatataaagacattttgtaccctgtaaaaaaaa

SEQ ID NO: 139530 - DNA, 1326 bp, Homo sapiens
atgaaattaggtcgtgctgctcgtgtcagtcaacacggaggcagaggaatcggagaaggccgcaacagagcaaaggcgctggaagggacagaccagacactagatgtggaggaggagcaggaggaatccaaagcagcagcctgtggcagcaagaagcgggtagtgccaggtattgtgtacctgggccatatcccaccacacttccagcccctacatgtccgcaaccttctcagtgcctatggtgcagcccctcccattatgacctatggaatctcaagtacttgcaccatttcacctggtcccaccacagcgagcaccttgcctttgagcgccaggtgtgcacacaggcagcacctgagagtggaggtcactcaggccaagtgtgagaccatcttctatcttcaaagtgtggaatggggacaatgctttcttgctgttgatggggatcttgctcacccagatggctcctggacatttgcccaacgtcctactgagcaggaactgagggcccggaaagcagcacagccagtagggaaagttttaaattattacccaacccagttaagtttagagtgtgaggtcccatcccagccaatgggaacgggacacagccataggggattgtgtcaggatgtaaaggttataaatgtccctgtctcctttgtttggtgtgctctcgtggctggactgctggtggtagtcccgcctcctcctcctcaggctccggaggcagaagtctctgatatctccttaaaaagagggcttcagagagagatagaacaatgtagaagggatattcaaaattttccctttccctgcgcttccgaagagctggcttctcagctcttccctctaatggaggtgccacagggtaggggtacaactggattcatgaacgcccctttaaccacctctgaagtccgaggtctaaagaaagagcttaagcctttgctagatgacccagagagagtagcagagcaaattgaccagtttttaggttccaaactatatacttggactgaattaatgtcaatcctgggtatcctcttttcaaaggaagagcggaacatgatctgcagagctgctatgggggcctgggaacgtgattaccctgccggtcaaaatattccggcagcggatgttacatttcctgctcgggacccacaatggaataataataatgctgctcaccagaagaatatgagggatctacaagaattaattataaaaggtatcaaggagtctgcacccagaccccaaaacctcactaaggcctttgatgaacaacaagagaaagatgagggacctatgcactttttagactaa

SEQ ID NO: 139531 - DNA, 490 bp, Homo sapiens
ggcacgagcggcacgaggccgctcgtgtcagtcaacatggaggcagaggaatcggagaaggcgcgcaacggagcaagagccgctggaagggacagaacagacactatatgcggaggaggagcaggaggaatccgaagaagcggcctgtggcagcaagaagcgggtagtgccaggtattgtgtacctgggccatatcccgccgcgcttccggcccctgcacgtccgcaaccttctcagcgcctatggcgaggtcggacgcgtcttctttcaggctgaggaccggttcgtgagacgcaagaagaaggcagcagcagctgccggagggaaaaagcggtcctacaccaaggactacaccgagggatgggtggaggtcccgtgacactcgccatagccaagcgggtggcgggccgctctacttaaatagcctatgggtgcccgcaggcgcagccccttccgttatgatctttggaacctcaagtacttgcaccgt

SEQ ID NO: 139532 - DNA, 574 bp, Homo sapiens
cccgggtcgacccacgcgtccgcacgaagctgggacagggcaggcaggagagagaccgccatccgaccttataagtagagtacgaggctatctggaaatgaggcttcctgatattcctcttcgtcaagatatagctgaggaatgtgttgcctttatgttaaactggagagaaaatgaataccttacactccaagttcctgcatttttgcttcagagtaatccatatgtaaagcttggacagcttttagcagctacatgcaaagaacttccaggccctaaagaaagtagacggactgccaaagacctttgggaagttgttgttcaaatctgtagtgtgtccagtcagcacaaacgaggaaatgatggcagagttagtttaataaaacagagggaatctacgttaggtatcatgtatcggagtgaactgctttcttttatcaaaaaattacgagaaccactcgttttgactattattttatcactctttgtgaaacttcacaatgttcgggaggacattgtgaatgatattacagctgaacacatttctatttggccatcttccattcccaacctc

SEQ ID NO: 139533 - DNA, 1548 bp, Homo sapiens
gcggccgctcccttccccgcgcagccccgcacggcccgggcccacgtacaatgactcttcttgcttttcacctaagttgaataagcaccctgtgcactttaatctcctgtcggtaccattgggccaactaaagacaaggttttgaaatctcagctataaaagacatccagccaaactctcagtcttgccttaacaatgttccagaggctgaataaaatgtttgtgggtgaagtcagttcttcctccaaccaagaaccagaattcaatgagaaagaagatgatgaatggattcttgttgacttcatagatacttgcactggtttctcagcagaagaagaagaagaagaggaggacatcagtgaagagtcacctactgagcacccttcagtcttttcctgtttaccggcatctcttgagtgcttggctgatacaagtgattcctgctttctccagtttgagtcatgtccaatggaggagagctggtttatcaccccacccccatgttttactgcaggtggattaaccactatcaaggtggaaacaagtcctatggaaaaccttctcattgaacatcccagcatgtctgtctatgctgtgcataactcctgccctggtctcagtgaggccacccgtgggactgatgaattacatagcccaagtagtcccagcatccttccaaacaagatgctgtctgttcacgttggaactgccatccacaaccaagcagctctttgtcagtcagttgagagctattggcagtgtggaatccagctcctcacacagttccagagtcagtccaagcttggacagcttttagcagctacatgcaaagaacttccaggccctaaagaaagtagacggactgccaaagacctttgggaagttgttgttcaaatctgtagtgtgtccagtcagcacaaacgaggaaatgatggcagagttagtttaataaaacagagggaatctacgttaggtatcatgtatcggtatgtattggaaccactcgttttgactattattttatcactctttgtgaaacttcacaatgttcgggaggacattgtgaatgatattacagctgaacacatttctatttggccatcttccattcccaagaagcaaatgtcctcaaggaccttcatgtctcaggaggaaacagtttgtagagcagctcacacaccctctctcccggaggaaaagtgggtggagcagttgatctacgctctggtagtcgccgcagctagaataatggctatgtgggggccgaatgcagcgtggcttgttttcttggccgcggcgggacctcctcctctcacccctcctcactcccctccactcctcctcctccgcctgctctcggccgttggatggggccgccccttcgggactcggcgtcggggctcccgcggccacccccgggacgcatctccgaagacagcggcgcttgggcttgtggcccggcgctctgtccccgccctgcgatcccgtcccctgcgcctgccctccgagttccggaggccctgcggctatggggaacctgctccgtga

SEQ ID NO: 139534 - DNA, 603 bp, Homo sapiens
ttcacttcccccaagacagcccggaactggggctggttaatgcaggtgaggaaccagcggttggtattgggaaaggctggcggaaagaaggggtcgcctttggagcagagaggaggcaatggccaccatggaggtacaaggttgatctgcgccttggtccctggtttccaatgcggcccctggcaacctttgcggagccccagacagagacgtgtacagtggccccccgtgaaagacagaattgtggttttcctgggtgtcacgccccccccagtgtgcaaataagggctgctgtttcgacgacacccgttcgtggggtcccctggtgcttctatcctaataccatcgacgtccctccagaagaggagtgtgaattttagacacttctgcagggatctgcctgcatcctgacgcggtgccgtccccagcacggtgattagtcccagagctcggctgccacctccaccggacacctcagacacgcttctgcagctgtgcctcggctcacaacacagattgactgcttctgacttttgactactcaaaattggcctaaaaattaaaagagatcgatattaaaaaaaaaaaaaaagggcggccgct

SEQ ID NO: 139535 - DNA, 3673 bp, Homo sapiens
cttcaccactgctagaggacagggaagagggggacctggggaaggcctcggaactagcagagaccccaaaggaggagaaagcagagggggcagcaatgctggagctggtgggatccattctccggggctgtgtccctggggtgtatcgagtccaaactgtgccctctgcccggcgccctgtggtcaagttctgtcatcggccttcaggtctccacggtgatgtctccctcagtaaccggctggccctgcataactcccgtttcctgagtctctgctctgagctggatggtcgagtccggcccctcgtgtacaccctccgctgctgggctcagggtcgggggctgtcaggagagggggaacaggtggaagtcgatggctgggactgcagtttccccagggatgcctcaagactggagcccagcataaatgtggagcccctcagttccctgctagcccagttcttctcctgtgtatcttgttgggatcttcgtggctccctgctgtccctgcgggagggtcaggcactgcctgtggcagggggcctgccttctaatctctgggagggtctgcgccttggccccctgaatctccaggacccttttgacctgagtcacaatgtcgcagccaatgtgaccagccgggtggctgggcgcctacagaactgctgccgagcagcagccaattactgccgaagcctccagtaccagcgccgttcctcccggggtcgggactgggggctgctccctcttctgcagcccagctcccccagctccctgctctctgctacgccgatccctttaccccttgcacccttcacccagctcactgctgccctggtgcaggtattcagggaagcactggggtgccatatagaacaggcaaccaagagaacgcggtcagaaggaggtggaactggggagtcctctcagggagggacaagcaaaagactcaaagtagatggacagaaaaactgctgtgaggaggggaaagaggagcagcagggatgtgcaggggacggtggggaagacagggtagaagagatggttatagaggttggagagatggtgcaggactgggccatgcagagccctgggcagccaggggacctgcccctgaccactggaaagcatggagcccctggagaagaggggcagcccagccacgcagccctggcagagcgggggcccaagggacatgaggcagcccaagaatggtctcagggtgaggcagggaagggggcatccctgccctcctcagcgagctggcgctgtgccttgtggcaccgagtgtggcaagggcggcggcgagcccgtagacgcttgcagcagcaaaccaaggagggagctggaggtggcgctggcacaagagcagggtggctggcgactgaggctcaggtcacccaggagctgaaaggactgagtggtggcgaagagaggccagaaactgagcccctgctgagctttgtggcgtctgtctccccggctgaccgaatgctcactgtgaccccgctccaggatccccaaggcctgttccctgatctccatcatttcttacagaacttcctgcagctgctcccgtctgaccccgaacatgggtctctccctgttgctctccaccccaccagcttctccttcctacagttcgcacagctcgaggggagtgcgggggcagcaccgcgcgtggcacctggcacccgcgcagagttcctgaatggcagagcgatttatgcgcacaaggacggagatttgcgttcagcgttcttcattctctcctttaaacgaggagagttcatcccgttcttaaactgggtaagagatttcaaacctgaacatgggtcaaaagccatgaacatcagaagcgacgatgtcaggtcttccagcgtcagcccctccaggggccgagtccggaggaggtgggagggacagggcgcgttctccctcatgtccctgccctgcttcgggccggagggccggtgccctgctcgcagtaacagcaccctggagctgtcaggggttggatcgccactggataccgaactgtcgtacgtatgtcttctgtttcgtcctcgctttccggctgctgtttctccacggctctcctctttccccctcccttctctcccgggcggcttactttgcggcagcgccgagaaccccaccccctttctttgcggaatcaccatggcggctgggaccctgtacacgtatcctgaaaactggagggccttcaaggctctcatcgctgctcagtacagcggggctcaggtccgcgtgctctccgcaccaccccacttccattttggccaaaccaaccgcacccctgaatttctccgcaaatttcctgccgggcagggtcccagcatttgagggtgatgatggattctgtgtgtttgagagcaacgccattgcctactatggtaatttgcaggggtatatgggaatgggagaatttggagtgagcaatgaggagctgcggggaagtactccagaggcagcagcccaggtggtgcagtgggtggagcttttgctgattccgatatagtgcccccagccagtacctgggtgttccccaccttgggcatcatgcaccacaaacaaacaggccacttgagaatgccaaaggaggaagtgaggcgaattctgggtctgctggatacttacttgaagacggaggacttttctggtgggcgaacgagtgacattggctgacatcacagttgtcagcacccgtgttgtggctcaataagcaggttctagagcccttctttccgccaagccttttcccaataccaacccgctggttcctcaccctgcattaacccagccccagttccccggctgttcttggggcgaagtgaaacttgtgttgagaagatggcccagttttgatgcttaaaaagttttgcaggagacccaaccttaaaaagggacacaccacgggaaagaggaagggtttcacggggaaggagaagcagaagccccaggctgatgcggaaggagggagaaaaagggcgggctgccccctgctccctgaaggagggagatggatgaatgtgagcagggcgctggcttgcttgagcccaaaggccaaggaccccctttcggttcaccttgcccaagagttaccttttgtggttgggatgagtgttaagccgccaagtgactccaattgaggacacactctctgttggcactgccataatttctggggagcacctttgattaaggacggctgggtccctgttggtactcagagtatcgcttccctgtagaactcacttcagaccttcatgagctgcaatctcatcacttggaatgttccagcgactggacaactgaaggaagaatgccttcgccagtgtcatcctttttggaaccaacaatagcagctccatttctggagtctgggtcttccgaggccaggagcttgcctttccgctgagtccagattggcaggtggactacgagtcatacacatggcggaaactggatcctggcagcgaggagacccagacgctggttcgagagtacttttcctgggagggggccttccagcatgtgggcaaagccttcaatcagggcaagatcttcaagtgaacatctcttgccatcacctagctgcctgcacctgcccttcagggagatgggggtcattaaaggaaacctgaacattg

SEQ ID NO: 139536 - DNA, 1233 bp, Homo sapiens
atggcgacgttcccggcggcggcgaccaccggcgccccaggctgggggcggagacttccgcgcgggcatttctccacccacagggaagaagagcctgggcctgatggagccccagggaaatcactaccgctgccggtgtttgcaggtagcagggagccaggcctgggcgaggtgtgtctcgatgccagagctggtagtacagaaggtggtgggccatccccggtgctgctcagcgtggtggatcatttcaaccgaatcggcaaggttggaatccagaaatgcgtcattggtctgttttgggggtcatggcaaaagaaagtacttgatgtattgaacagttttgcagttccttttgatgaagatgacaaagacaattctatgtggtttttagaccatgattatttggaaaacatgtatggaatgtttaagaaagtcaatgccagagaaagaatagttggctggtaccacacaggcctgaaaatacacaagaatggcattaccatcaatgaactcatgaaaagatactatcctaactcggtattgatcattattgacgtgaatccaaaggacctagggctgcccacagaagcatacatttcagtggaagaaatccaagatgatggaactccaaccttgaaaacatttgaacatgtgaccagtgaaattggagcagagagctacctggaaaaagtagccacaggcaagctgcgcatcaaccaccagatcatctacgagctgcaggacgtcttcaacctgctgccagatgttagcctgcaggagcctattaaagccttttacctgaggaccaatgaccagatggtggtagtgtacttggcctcactgatccattctgtgggcctcactgatccattctgtggtcgccctgcacaacctcatcaacaacaagattgccaaccaggatggagacaagaaagaagggcaggagaaaaaagagagcaaaaagatagaaaagctgacaaggggaaagataaagataaggaaaagagtgatgtaaagaaagagcagaaaaaccactgtcttaaagagaagtaccggttcaggcaggattcattaccggatgatccaagagtcctcggacttgaattaacaccaccagttgccaggcagtactcaccacaagacttgagtgagatcccgcgccatgccgacttcaggtgtgacccagcacatttccagctgtggtggtcacagggagagactccttctacttga

SEQ ID NO: 139537 - DNA, 1231 bp, Homo sapiens
gtgaccgctactgctgccggtgtttgcgtgtggcagggagccaggcctggcgagcggggtgtgtcgcgatgccggagctggcagtgcagaaggtggtggtccaccccctggtgctgctcagtgtggtggatcatttcaaccgaatcggcaaggttggaaaccagaagcgtgttgttggtgtgcttttggggtcatggcaaaagaaagtacttgatgtatcgaacagttttgcagttccttttgatgaagatgacaaagacgattctgtatggtttttagaccatgattatttggaaaacatgtatggaatgtttaagaaagtcaatgccagggaaagaatagttggctggtaccacacaggccctaaactacacaagaatgacattgccatcaacgaactcatgaaaagatactgtcctaattccgtattggtcatcattgatgtgaagccgaaggacctagggctgcctacagaagcgtacatttcagtggaagaagtccatgatgatggaactccaacctcgaaaacatttgaacacgtgaccagtgaaattggagcagaggaagctgaggaagttggagttgaacacttgttaccagatatcaaagacacgacggtgggcactctgtcccagcggatcacaaaccacgtccatggtttgaagggactgaactccaagcttctggatatcaggagctacctggaaaaagtcgtcacaggcagagctgcccatcaaccaccagatcatctaccagctgcaggacgtcttcaacctgctgccagatgtcagcctgcaggagttcgtcaagggcttttacctgaagaccaatgaccaaatggtggtagtgtacttggcctcgctgatccgttccgtggtcgccctgcacaacctcatcaacaacaagattgccaaccgggatgcagagaagaaagaagggcaggagaaagaagagagcaaaaaggataggaaagaggacaaggagaaagataaagataaggaaaagagtgatgtaaagaaagaggagaaaaaggagaaaaagtaaaacatgtattaaatagcttttttaatttgtaaattaaaatcttacaaactaaatcagtgtgctgctagagggttctttttcacttgacatgcttattagaaagctgacccaaccagaagcttctgcctccggtcactcttgctgtggtgctacgtggaagtgaatggagactgatctcaaatctgaa

SEQ ID NO: 139538 - DNA, 1569 bp, Homo sapiens; identical to SEQ ID NO: 127740

SEQ ID NO: 139539 - DNA, 2043 bp, Homo sapiens
cccagttcctttacagaatcaaccctggggtggctttaggactgggctctttggagctcatccttggacccacagtggagtgctggtccgtgctgatgtcttcagataccaatcaatgggcatttggctccttgcttccactgacctcttgagtactttcaacgatcggtgtcaggagtgccccagctgctgtttctagagcatctctgcaacccacggtggcctctcctctctctgcgggccatggacagcacagtcccttcagccctggagctgccccagcggctggcactgaacccaagggagagcccgaggagtccagaagaggaggagccccacctgctgagcagcttggctgcagtccagaccctggccagtgtcatccggccttgctatggcccccacggccggcagaagttcctggtgaccatgaaaggagaaacagtgtgcacggggtgtgccactgccatcctcagggccctggagctggagcacccagcagcatggctcctccgggaagcaggacaaacccaggcagagaatagtggggacggcacagccttcgtggttctgctgacggaagccttgctggaacaggcagagcagctgctgaaggctggcctgcctcgcccgcagctccgggaggcctacgccacggccactgcagaggtcctggccacactgccctccctggccatccaatctctggggcctttggaagatccatcctgggccctccattctgtgatgaatacccacaccctgtcccccatggaccacttgaccaagctggtggcccacgcctgctgggctatcaaggaactagacggcagcttcaagcctgagcgtgttggggtgtgcgcgctgcccggggggacactggaggattcctgcctcctcccggggttagcaatatctgggaagctctgtgggcaaatggccacagtgttaagtggtgccagggtggctctctttgcttgcccctttggtcctgcccatccaaatgcaccagcaacggcccgtctttctagtcctgctgatctagctcaatttagtaaaggaagcgatcaattactagaaaagcaagtaggccagctagcagctgcaggaattaatgtggcagtggtgttgggggaggtcgacgaggagaccctcacactggcggacaagtatggcatcgtggtgattcaagctaggtcttggatggagatcatttacctgagtgaggtgttggacacacctctgctgcctcgtctgctccctccccagaggccaggcaagtgccagagggtttacaggcaggagctgggagatggtttggctgtggtatttgaatgggaatgtacaggcacacctgccctcactgtggttctcaggggagccaccacccaggggctgcggagtgcagagcaggccgtctaccacggcattgatgcctatttccagctatgtcaagatcccagactgattccaggagctggggccacagaaatggctttggcaaaaatgctttctgataaaggaagcagattggaagggcccagtgggcctgcattcctagcatttgcctgggccctgaagtatcttcctaaaactttggcagagaatgcaggcttagctgtctcagacgtgatggcagaaatgagtggagtgcaccaaggtgggaacctcctaatgggtgtgggaactgaagggataataaatgtggcccaggaaggggtgtgggacaccctaatagtcaaagcccaaggatttcgagcagtggctgaggtggtgctacagctcgtgactgtagatgaaatcgtagtggccaagaaaagtcccacacatcaggagatctggaatcctgactctaagaaagccaaagaaacacccacctcctgtggaaacaaaaaaaatccttggattgaataactagtgataccctcaataaaacagggattgccaagaagggaacaatcaccccaaaaatgaatgtttgcctttattccgtgtttggtacttgattcactttctttaaataaaaacatgaaggaacataaa

SEQ ID NO: 139540 - DNA, 876 bp, Homo sapiens
atgaggcgtggggcgcgccgggcgagtccctgcttgcaggaggcgcccgagaggccgtcgcgtaccctggcaagaggagctgcgccgcccagcgcgggccgccgttataaagcagccgccggcgccgggtgcctcacagcacgctgccacgccgacgcagacccctctctgcacgccagcccggcccgctaccacccatggcacatgttcagcagctgtaaggaagatggcgcttggtgcacagcaaaggcttttgatgaaataccatgaaggagcctaggagtgactaatagctttgcgaaaaatgggccgcaatgcccaagcccagatttgtatcatcactgagtgatgggtaaaacccttcaccattaaaaactgagagcactttgaaaacaaacacagttttcttgtacccctggggagagaagtttgaagaaaccacagcctgatgggcagaaaaacttcaggactgtctgcaaactttacagatgggtgcattgggttcagcatcaggagtgggatggggaaaggaaaagcaccaataaccaagaaaaattgaaaagatggggaaattagttggttggagtgtgtcatgaacaatggtcacctgtactccggattctatgaaaaagtaggaataaaaaattccatcatccactttgggacagggagtttaattaaggggatggcccaaggctcagttcaatgagcaaatctccatactgtttctttctttttttttttcattactgtgttcaattatctttatcataaacattttacatgcagctatttcaaagtgtgttggattaattaggatcatccctttggttaataaataaatgtgtttgtgctaataaaaaaaaaaaaaaaaaa

SEQ ID NO: 139541 - DNA, 395 bp, Homo sapiens
cattcctaccagtcaatttgacacatgattggcaaggttcctctgcccttgccaccttagaacgtcccctgtcccaggtcagactcaaaagattcgtaggcacacttatagcctttatggtctcagccatagtcatcctggcaactgctagtatggctgttgcatctattactgaatcagtacaaacagctgcttttatagataatatggccagaaatgtgtctaataaacttctcttacagcaaggtatagatcaaaagattcttgcactactgcaatccctcgaggctgccttagaatatgtgggggagcaacaagacgcactggcattccaacagcaatgaaactgcaactgggggcataaacatatctgtatcatttctctaccatggaat

SEQ ID NO: 139542 - DNA, 358 bp, Homo sapiens
ggcacgagcccatgtgtggggagacccaccaggccctgcagggggccatggagaagctgtggagccgctttatggagctcatgcaggagagaaggtggacttgaaggagagggttgaggaactggaacattgctgcatctagctgtctggagagagacagacaccatcggggagtgggaagccagggcacggcaaagagagctgcacattggtcagaggggccccagcgtctgagtcctgtcctcctgcaggagagtacatcgcactgtaccagagccagagggcagtgcggaaggaggaggagtgcatcagcaggctggcccaggacaagggagaggtgaaggtgaagctgctggag

SEQ ID NO: 139543 - DNA, 427 bp, Homo sapiens
gtccagtgcggtggaattccgccaggccaaaataacaaagaggaaatggaggttttgcctgagccccctcctccaataaataggaaaaaagacaagagctatgctacagctatgggaccctttcttaggcaagaggcattaagtggggagctcttagcctgcctggtaatacaagattgacagggcaattgggtatataaacccatttcttttaacatttataaaaagttaagaaaaagcattagaggctgaaaccgcgtggccaaatgggtggtaggcagaaggaaatacttggcagcaaaggaagctcgcagacctggagccagcaagtgcttccaggaactcagcctgcacagaggcagcagtgacaaggagccaggcgcagcacaccagagctggcctgatagggaggggcaggaggcgtgca

SEQ ID NO: 139544 - DNA, 705 bp, Homo sapiens
gccgcagccaaaggcaacaatgtggttatcacaagctacatgacaaacagaggcttcttcgaggataaaaaggcaacatttgcgccaagcttcttaatgaacatcaaaggcaataaaacatccgttgtcaaaaacagcatcctggagcaaggacagctgacatggctccaagtagcgaagcgagcaggactgggcggcggccaaagcggtcggacagtgctccgagaacgggtgcgcatagaaattgcatcaacgcatatagcgctagcagcacgccatagtgactggcgatgctgtcggaatggacgatatcccgcaagaggcccggcactgtctggagagagacagacaccatcggggagtgggaagccagggcacggcaaagagagctgcacattggtcagaggggccccagcgtctgagtcctgtcctcctgcaggagagtacatcgcactgtaccagagccagagggcagtgcggaaggaggaggagtgcatcagcaggctggcccaggacaagggagaggtgaagtgccgcaagccaaaggcacaaatgtggttatcaacaagctacatgacaaacagaggcttcttcgaggataaaaaggcaacatttgcgccaagcttcttaatgaacatcaaaggcaataaaacatccgttgtcaaaaacagcatcctggagcaaggacagctgacagtcaactaa

SEQ ID NO: 139545 - DNA, 330 bp, Homo sapiens
aacaatgagaacaagagcgtactacagttggagcagcaagtaaaggagctgcaggagaagctaggcaaggtgaaggagacggtaacctccaccccatccaagaaggtctgggaggtggagctgaagagccaagaggctcagagtctgcagcagcagccagaccattacctgggtcacctgcagcagtacgtggccacctatcagcagcaggtggccgcctatcagcagctgacctccaccttctccatgacttgaaaatgccacctgagggcaggtcgctgccgagatgtgactacaatattttggctccagagcagctttatggaccac

SEQ ID NO: 139546 - DNA, 647 bp, Homo sapiens
ttggctccactggtcacctacttttcatctctaagtctcggtttctttaacttaaaagggaagttagcaccttcctcttggaggtgctgaggattaaatgagataatacgtggaaagcattaggcatgtagcacagttagcagatggtggttggctccctctgcttttccatcagtctgtggcctagtttaaatggtgggaggaagggtgtgagatttaaggctggttgtaagggatcagtcagtgtagttggaaaaattgtaagatgaagttataggatatagacacaaaccttcctggaaggccagaaagtctgcatagcttcaataaaggatttggctgaaagcagcgtaatcccctttaccttgagttgatagcaatagagcaaataacatgggaacgtgggggagtttattgaatagcttgtttactcatgtggtcctaagaccaacctttgattatccacgggtgcatgattgctctctactcggtggtcggcaaatttaattacccacaggtgtgttgactcaaagcctctgtcattaaatctatgctgaataaatgccgtcagggccagctagtcaaggtgcacaactctttttgtgcgtggtgtggccccttagctgctctgtcactgaaaaaaaaaa

SEQ ID NO: 139547 - DNA, 728 bp, Homo sapiens
ggcattcccgggtcgacgatttcgtcaagtgggacagcaggacctctccaactcccggagattttcctaagggtcttgtagccagagataacactgatttaatttacccacacccaaatgcttctgcagaaaaagccagaaatgtcctagctgtggagactgtgcctggagagctggtgggagaacaagctgcatatcagcccaccccagggcatccaaattccattaatttttactctttgaaacagtggggcaatgagctcaagaattcgatgtcttctttccgtcctgggagaggacataatgatagtcggaggactgtgttttataccaatgaagagtgggaacttttagacccaacccctaaggacctagaggagtccatagtacaggaagaaaagaagaagttgacccctgaaggaaacaaagtttcacaaaggctgaaaaatttgcctcatacttccctcaaagccaaacagttgcttcaaacttcatctaccaaataaaggatttgtacctccattgatggaatatttggtaattcttctactccatttgaagatgaaaaataaaggccaaaatcataggcctggcacagaagctggataatgaagacagctccggaggaacacatagatacacacacatatagacacacacatatataaagtacacagacatactatttttaaaaggtttaaatatttttaaagtttttaaaagtttcg

SEQ ID NO: 139548 - DNA, 3565 bp, Homo sapiens
  misc_feature (1)...(3565): n = a,t,c or g
atgagagtaggctttagggatattgttggtagcctttctgagtactctttcggatgccctgtgaattatgaggttttccactctgtctggatcactatcctttgctgcctgatggccaatgaccgaaaaccacagtttctatacttttttcagttctttagttttcacggcggaagaaatttgatgtcttctttccatcctgggaatggacataatgatagtcggaggtctgtgttttatgccaatgaaaagtgggaatttttagacccaacccctaaggacctagaggagtccatagtacaggaagaaaagaaggagccaacccctgaaggaaacaaagtttcacaaaggctgaaaaatttgcctcatacttccctcaaagccaaacagttgcttcaaacttcatctacaaatagaggaactgtcattactgccacgagactggcctttgatcttaggacccagtccactaagtgttctcaccctgcttctggttcctctggtcacagcacagatttccagctggaaggggaatggggactatgggatctaggaacgaaaggtttcaagctgccttactcccttagcatagacattgacaatgtgaaaagcccacactttccccatgagctcaaaacgttgacagtgtctctgggtagcaataggagaatgggtttggaaaagaaagagtgccaccaaaagcagggagccctaagggagcagttacaggttcacattcagaatgtagaaatccttgtatcagagaaagctgagttacagcctggcttacactcagcatgctgccaggcagaaagaaggagtctgaggatctggccagccgcctttagtattccaggcagtgtgtgggagagttggagcaggctctctgctgtctccacacagcagaagaaagcagacaggttcattcctttctctactgcttctggccataaccgaagcaatgaggacctgaagcaggagaaatcagaattggaagagaagcttcaagtcctggtgactgagaaggctggcatgcagcttattttagaagagccgcaaaagaaattacaaatgatggcactcctgcttcaacaggctagggggtgcactgtgtggaacggcccaggctccccaaatctaaacttctcactcttcaccatccagttttcaaggcactgtgaagcccctgatgcgaaacagcagttaccgcaggccatggaggagcgggcacagctgaaagcacatctagggcaggtgaagctttgcaggggagggatgtggaaggaagatgaccccaggtggccaggagcaggagtaggaggagaggctgctggagctggagcaggtggccgagctcttgcgggagcaggcagagtcacgcaggcaaatcctggagaccatgcagaacaaatgcaccaccatcagccacgtgctcacccagaaccacaagctcaaagagcagctgtctccgctgcagaacggattcataaagctgaccaacctttgattatccacgggtgcatgattgctctctactcggtggtcggcaaatttaattacccacaggacagacccctgcaagtggtgtcccgcgtgaggcacactgtgaaggatcacaacggacccctcgaaaacaaaggtgaaaagaactgcacagtcaataagtcattcccagaaaaaggaacgctagacgtagagctctgggaacaagtggggagaaatcttaatcagcatcatgtgcaagggcaatgggtcccagtatcatctttaatgctatgggccttagtcagggcagccctggctccattatacacagaagagcctaaaaaggggaaggaggaggaaccgtcacctgctttaccacctccttttccctcagccccaatatcgccaggccaaaataacaaagaggaaatggaggttttgcctgagccccctcctccaataaataggaaaaaagacaagagctatgctacagctatgggaccctttcttaggcaagaggcattaagtggggagctcttagcctgcctggtcagacccgaaagattcataggcacacttacagccttcatagtctcagccatagtcatcctagcaactgctagtgtggctgtagcatctattactgaatcagtacaaacagctgcttttgtagataatttggccagaaatgtttctaatgaacttctcttacagcaagaccaacctttgattatccgcaggtgcatgattgctctctacctgggggcagggggagttaattacccacaggtggagctgaagagccaggaggctcagagtctgcagcagcagcaggaccagtacctgggtcatctgcagcagtatgtggccacctatcagcagcaggtggtcacctatcagcagctgacctctgaggaggaggagctgcacaaccagttactgctgcagacccagctcgtggaccggctgcagcagcagaaagctcaaagcaaagctgtggccaagatgggctgccaagagttgcgggagacccaggagcacctggaagctatcagccagcagaaccagcagcctcaggccccagttgagcctcatggctctccctggggaaggtaccggagactgctcacaggaagaggagagagccccaggaggaaacgggaactgtgtccacactaagtttggcaccaatatggtgaccttctgggagcaggggaccaccaggttaggttgcctaagggtgggtgaactggcccaggagatggacagtgaggaggaggaggaggtgcctcagcccatgccaagcatcccggaggatctagagagccagaaggccatggtggcatttttcaactcagctgtagctagtgccgaggaggagcaggcacggctatgtgggcagctgaaggagtgcactgccagcgcctggctcatctgttggcctcggcccagaaggaacctgaggcagcagccccagccccaagaactgggggtgatcccatgtgtggggagacccaccaggccctgcagggggccatggagaagctgtgggagagtacatcgcactgtaccagagccagagggcagtgcggaaggaggaggagtgcatcagcaggctggcccaggacaagggagaggtgaagatctttgtgaggtgagccttgccagcagtggggagtctgcacaaggagaggcggggaagcattctccctgtgacaaccccactgagcagcagatcatgcaactgcttcatgagatgcagaacctccaggagcacccaggcttgggcagcagcccttgcattccttttttgtaccaggcttaataagaccaatgaggtgaagatcaccatcatttaaaagccggccactgtcagcaaaacctggggaagtggggctggaggctctgcccctaccatgtccctaccaccccttcccagtcaaccctttaccctcacagtagcaagcataagacccctgtctaatgtggggagacaggtggagatgaggtgaagatccccataatctaaaaggccactaaataaaaaaataaaaaattttaaaaaggtancaaaaacaaa

SEQ ID NO: 139549 - DNA, 1353 bp, Homo sapiens
atggagggcgcaccagttcttgtgtgggaaatctctcagagcccccgtggaggcccccaaagtggctctggcaaagctgtaggggtggagagaattagtaaattggggttccctgttgaaaacagacaaatggaaggtccactgggcggaaagccccagccgctcatcactacaagaggagagaagggaacagttgacagagtgggaccctttaaaagtgtgggaccctttaaaagtgtggggcccaaacttcaaaggcccctcttgcttgtgtctaaggctagtgttgctctgaaccctatggctccaaggagaacaaccttccacgcaggaaatccacgagaaggttctaacgaagccatgggtgccatgatgtaccacaccatcatcctcaccagggaggacctagaaaagtttaaggccccgagagtgatcgtgcagataggcagtggctacgataacgtggacatcaaggctgccagcgagctcggaattgctgtgtgcaatatcccgtctgcagccgtggaagagacaccggactctaccatctgccacatcctcaatctgtaccagaggaacacatggctgtaccaagcactgcgggggcaggcggttgcagttcgagccaaggcctttggattcagcgtcatattttatgacccctacttgcaggatgggatcgagcgatccctgggcgtgcagagggatttgctgtatcagagcgactgcgtctccttgcactgcaatctcaacgaacataaccaccacctcatcaatgactttaccataaagcagatgaggcagggagcattccttgtgaacgcaccccatggtggcctggtggacaagaaagccttagcacaagctctcaaggagggcaggatacgaggggcagccctctatgtgcgtgagtcggagccctttagctttgctcagggtccgttgaaagatgcaccgaatcttatctgcactcctcacactgcctggtacagcaagcaggcgtcactggagatgagggaggcagctgccactgagatccgccgagccatcacaggtcacatcccagaaagcttaagaaactgtgtgaacaaggaattctctgtcacatcagcgccttggtcagtaatagaccagcaagcaattcatcctgagctcaatggtgccacatacagatatccgccaggcatcgtgggcgtggctccaggaggacttcctgcagccgtggaagggatcatccctggaggcatcccagtgactcacaacctcccaacagtggcacatccttcccaggcgccctctcccaaccagcccacaaaacacggggacaatcgagagcactccaacgagcaatag

SEQ ID NO: 139550 - DNA, 1188 bp, Homo sapiens
  misc_feature (1)...(1188): n = a,t,c or g
atggggaaaaaacagaacagaaaaactggaaactctaaaaagcagagcacctctcctcctccaaaagaatgcagttcctcaccagcaacggaacaaagctggacggagaacgactatgacgagctgagagaagaaggcttcagacaaccaaattactctgagctacgggaggatagtcaaaccaaaggcaaagaaattgaaaactttgaaaaaaatttagaagaatgtataactagaataaccaatacagagaagtgcttaaaggagccgatggagctgaaaaccaaggctcgagaactacgtgaagaatgcagaagcctcaggagccgatgtgatcaactggaagaaagggtatcagcaatggaagatgaaatgaatgaaatgaaagcagatgggcgaggtggcctagggagcggcccgcatccgtggggagacgctgggcctcaacggctttggttgcacggggcaggcattgcagttcgagccaaagcctttggattcagcgtcatattttatgacccctacttgcaggatgtggtcgagcggtccctgggcgtgcagagggtctacaccctgcaggatttgctgtatcagagcgactgcgtccccttgcactgcaatgtcaacgaacataacaaccacctcatcaatgactttaccataaagcagatgaggcagggagcattccttncacccaagcccttcaaggagggcacgatacgaggggcagccctcgacatgcatgagtcggagcccttcagctttgctcagggtccgttgaaaaatgccccgaatctcatctgcactcctcacactgcctggtacagcgagcaggcgtcactggagatgagggaggcagctgccacagagatccgccgagccatcacaggttgcatcccagaaagcttaagaaattgtgtgaacaaggaattctttgtcacatcagcgccttggtcagtaatagaccagcaagcaattcatcctgagctcaatggtgccacatacagatatccgccaggcgtcgtgggtgtggctccaggaggactttctgccgccatggaagggatcatccctggaggcatcccagtgactcacaacctcccgacagtggcacatccttcccaagcgccctctcccaaccagcccacaaaacacgtggacaatcgagagcaccccaacgagcaatag

SEQ ID NO: 139551 - DNA, 1254 bp, Homo sapiens
atgaatcttgcaagagaaagtggtcagaaaaggatccagtggcagaattccaggatgaagtctagtcatcagaagggagttgaggccagagaattgatgactatgagagtgaattctgaagaaaagaatccagtcattgaagaggaccaggtttcagaaacaaaatccaggtacctaagagcacgaatcaggaaatacagagttaggatagccaatttaaactcagaaccctctcctcattatcagcaatgtagtggtgcttttcatttcatggatttattgtttgtgaccgtttatgttatatgtgagcatcagcactctatacattgctttctgccacatcctcaatctctaccggaggaacacgtggctgtaccaggcactgtgggaaggcacgcgggttcagagcgtggagcagatgggcgaggtggcctagggagcggcccgcatccgtggggagacgctgggcctcaacggctttggttgcacggggcaggcattgcagttcgagccaaagcctttggattcagcgtcatattttatgacccctacttgcaggatgtggtcgagcggtccctgggcgtgcagagggtctacaccctgcaggatttgctgtatcagagcgactgcgtccccttgcactgcaatgtcaacgaacataacaaccacctcatcaatgactttaccataaagcagatgaggcagggagcattccttgtgaacgcagcccgtggtggcctggtggacgagaaagccttagcacaagccctcaaggagggcacgatacgaggggcagccctcgacatgcatgagtcggagcccttcagctttgctcagggtccgttgaaaaatgccccgaatctcatctgcactcctcacactgcctggtacagcgagcaggcgtcactggagatgagggaggcagctgccacagagatccgccgagccatcacaggttgcatcccagaaagcttaagaaattgtgtgaacaaggaattctttgtcacatcagcgccttggtcagtaatagaccagcaagcaattcatcctgagctcaatggtgccacatacagatatccgccaggcgtcgtgggtgtggctccaggaggactttctgccgccatggaagggatcatccctggaggcatcccagtgactcacaacctcccgacagtggcacatccttcccaagcgccctctcccaaccagcccacaaaacacgtggacaatcgagagcaccccaacgagcaatag

SEQ ID NO: 139552 - DNA, 1540 bp, Homo sapiens
atgttgctccaaaagactcaatttgagtacgcctttaaaaagaaaagaaaattagaagaaagtaaaaaacgtggtgctggaccagccagctcggacccaaggtggcgggggtccagccagacggcccctcatgccagcgaggtctccggtgcccctctggggaggagctgcgagaccacacgggacaccggggtgggacccagcccgcgccagtggctcggagcaggggcagggacctggcagcaccgggccagagctgcctccacccccagcagtcgcggactccgggcgctccagacctggggtggtggtgaggtcatgaacggccccctgcactccaccacccccccgggtggcactgctggactgcgcaactgcaccgtggagatgcccatcccaaaggacctggccaccatggccttctgtgatacgcactccacgcaggagatccacgagaagattttacatgaagccctgggcgccatgaggtatcacaccatcaccctcgccagggcggacctggagaagttcaaggccctgggagtgatcgtgcgcataggcagtggctacgacaatgtgaacatcaaggctgcctgcgagcttgagattgctgtgtgcaacatcccgtccgcagctgtggaagagacagccaactcaaccatctgccacatcctcagtctgtaccggaggaacacgtggctgtgccaggcatgggccagaaagcacgtgtgttacagcatggggcagatccgagaggtggccttgggaggggctcacatcggtggggagacgcaggggcctcatcggctttggtagcacggggcaagcggttccagttcgagccgaggcctttggattcagcgtcatattttatgatccttacttgcaggatgggatagagcggtccctgggcgtgcagaggatgagtcagggagcattccttgtgaacgcagcccgtggtgccctggtggacgagaaagccttagcacaggccctcaataatggcaagataagagggcagctctcgacgtgccccagtcagagctctttagctttgctcagggtgtccctggagatgagggaggcggctgccaccgagatccgacgaaccatcacaggttgcatcccagaaagcttaagaaactgtgtgaacaaggaattctttgtcacatcagctccttggtcagtaatagaccagcaagcaattcatcccgagcttaatggtgccacatacagatatctgccaggcttcgtgtgcgtggctccaggaggacttcccgcagccacagaagggatcatccctggaggcatcccagtgactcacaacctccccacagtggcacatccctcccaagctccctctcccaaccagcccacaaaacacggggacaatccagagcaccccaacgaacaaagcagagaatgccggaaggtaatcattcagatacacttgcggccaagagacagtgaaaaattgatgaactcagagaaaacgaatctgacggtctttttagctgattctggacatatgcattattga

SEQ ID NO: 139553 - DNA, 4442 bp, Homo sapiens
atgccagttcccagcaggcatataaatattggtcgttctcagagctgggatgctgctgggtggtacgagggcccctgggagaacgccgagtccctgcggcctctggggaggagaagctccctgacgtatggcacagcagaggggacttggtttgagccaaaccaccgaccacaggacgctgccctgcccgtggccgccgagccctacctgtaccgggaggccgtttataactcagtggctgcaagaaaggggtctactcctgacttcaccttctacgacagcagacaggcagtgatgtctggtcgcagccccctgctgccacgggagtactacagtgatccgtctggagctgctagggtacccaaagagcctcccctctatcgggacccaggagtcagccggccggtccccagctacggagtgcttggcagcagaacgtcatgggatccaatgcaaggccggtcacctgccctgcaggacgccggtcacctgtaccgggatcctggaggtaaaatgatccctcaggggcggcagacacagagcagggctgcatctcccgggcggtatggacgggagcagcccgacaccaggtatggggcggaggtgcctgcctaccccctcagccaggtcttcagcgacatcagcgaaagacccattgaccctgcccctgccagacaggtggccccgacgtgcctggttgtggaccccagttcagctgctgcccccgaaggcagcacaggggtggccccaggggccctgaatcgtggctacgggcctgcccgggaaagcatcccatccaagatggcttacgagacttacgaagctgacctgtccaccttccagggtcctggtggcaagaggaccgtgctccctgagttcctggcctttctgcgggcggaggggctggcagaggccacgctgggagccctactgcagcagggctttgactccccggccgtcctggctaccctggaggacgcggatatcaagtctgtcgcacccaacctgggccaggcccgtgttctgagccgcctggccaatagctgcaggaccgaaatgcagctgcggaggcaggaccgggggggcccgctgccccgggcgcggtccagcagcttcagccaccgaagcgaactgctccatggtgacttggcttctctgggcgctgcggctcctctgcagacagcatccccccgagctggagacccggctcgccgtccctccagcgcaccatctcagcacctcctggagacggcagccacctattctgcccctggcgtgggcacccatgccccacacttcccctccaactccgggtacagctctcccaccccttgcgccctgacagcgcgtctgagccccacgtaccccctgcaggcaggggtggccttgactaacccgggcccctcaaacccccttcacccaggccccagaacagcctactccacggcatacacggtgcccatggagctgctaaagagggagcgcaacgtggccgcctctccgctgcccagccctcacggcagcccccaggtcttgcggaagccaggtgcacccctggggccatccaccctgccgccggccagccagagcctccacacgcctcactcaccgtaccagaaggtggcccggcgcacaggggcacccatcatcgtgtccaccatgcttgcaccagaaccaatccagtttgctggccaagcagtccagagtgacaacgtgaggaaggcgtatgctgcggggaccccagtgcggcccaccagccccggtgacacagacaaatgggggctccaggcccgcgctcctggacgtgccgtagaccccaggaatatgatttcagcccaggagcataaagtagttgaatgcatggcccgaaggagtgccacctgctttgtgtttgggcaactctgccgccttcacagcacttcctctgaccccgtgggtgtggatttcattctgtccatggaggacgtgggaaggggcaagagtaggaaccctgattcctggtcccccaatgcagttgtgtgggatgccagtggcgttggcggggagcgcgtcctgcaataccagctagatatgaacacggtgcctccgcagggctggaccactcgaaaaacgagagtgtgctgcaagcatgaggcttctccctctcccatctcagccttggctgccatagctaaggaggagggtgttattttgcttttgtggacattcaccctgggaaataagaggcttggaggatcggccacacgagtggggtatgcagaggcacaggcagaggctccctcctgcaaggccactactgtgactctgagcagcggttcttctcatgaatgtgatagctcggtcagctctaagactgcaacctgcagggacttcatggggcaaccctgggggcacgcaagcatcccacccactcccaaccccccacctccagccgtcgtgcccggcatcttttcccagcatgagaacccgttggcttttctcttttcccgccttgccatgaaggacctgctgccaggattcgagcctcagaccttggacaggtctcgggccagcctcagccacgttctgcgtgcccggccatcagggagggtagagggtatccgcccccagatcatgaacggccccctgcacccccgccccctggtggcgctgctggacggccgcgactgcactgtggagatgcccatcctgaaggacctggccactgtggccttctgtgacgcgcagtcgacgcaggaaatccacgagaaggttctaaacgaagccgtgggcgccatgatgtaccacaccatcaccctcaccagggaggacctggagaagttcaaggccctgagagtgatcgtgcggataggcagtggctatgacaacgtggacatcaaggctgccggcgagctcggtgagtgcgaggcagcgctggctgcctggagttgtccggagctctgtgggccctgctcgggtgggcttggagaagcagctggaactgggaccacggagcagccgcttctggctgtagcaaggtggctgcctccaggccgggctgtggagcaccttgcggccctgccttcacatgacacaggaattgccgtgtgcaacatcccgtctgcagccgtggaagagacagcggactctaccatctgccacatcctcaacctgtaccggaggaacacgtggctgtaccaggcactgcgggaaggcacgcgggttcagagcgtggagcagatccgcgaggtggcctcgggagcggcccgcatccgtggggagacgctgggcctcattggctttggtcgcacggggcaggcggttgcagttcgagccaaggcctttggattcagcgtcatattttatgacccctacttgcaggatgggatcgagcggtccctgggcgtgcagagggtctacaccctgcaggatttgctgtatcagagcgactgcgtctccttgcactgcaatcttcaacgaacataaccaccaccttcatcaatgactttaccataaagcagatgagggcagggagcattcctttgtggaacgcagcccgtggcggcctggtggacgagaaagccttagcacaagccctcaaggagggcaggatacgaggggcagccctcgacgtgcatgagtcagagcccttcagctttgctcagggtccgttgaaagatgccccgaatctcatctgcactcctcacactgcctggtacagtgagcaggcgtcactggagatgagggaggcagctgccaccgagatccgccgagccatcacaggtcgcatcccagaaagcttaagaaattgtgtgaacaaggaattctttgtcacatcagcgccttggtcagtaatagaccagcaagcaattcatcctgagctcaatggtgccacatacagatatccgccaggcatcgtgggtgtggctccaggaggacttcctgcagccatggaagggatcatccctggaggcatcccagtgactcacaacctcccgacagttggcacatccttcccaagcgccctctcccaaccagcccacaaaacacggggacaatcgagagcaccccaacgagcaatagcagagaatgccagaaggtaatcactcagatacacttgggaccaagagacagtgaaaaatagatgaactaagagaaaaagaatcggatggtctttgtaactgattctggacatatgcatcattgatgttgcagtgttgaaactacaagagctagaaaactgaagatgtcgtcttgcttacggaaggcgctggaaagactagggtgtggatttatttaacgaccaacttctgttattgtgtgttaagtttttcatctgtgcatcaaatcacaaaaagaataaatagagctttttcctttatcagtcccttggggcacagccgggtcctgaacaccctgctctacaatgttgcatcaagagttcaaacaacaaaataaaaaat

SEQ ID NO: 139554 - DNA, 2598 bp, Homo sapiens
atgggtaaaactgccgaagcctttgccatggatgaaggaaatggcacgaaggggccaggtggtatctccacgcaaatagttttatatttcttaacttcccaaggtaatcaccttgcgattacagtatcgtacctcggtccgtcgccacgatcggaatacgacggttaccagcggcagaatgacatatttgccaatcagatctttgtaacgcggatcttccgggttaacggctacgccagtatcgcccagcagggtttctggacgggtagtcgcgaccaccagataatctttaccgtctgcggttttcgcaccgtcagccagcggatagcggatgtgccacatcgaacctttcgattcgcggttttcgacttccaggtcagagatagcggtgcgcagtttcggatcccagtttaccaggcgtttgccacggtaaatcaggtcttctttatacagacgaacgaaaacttctttcaccgcattggacaggccttcgtccatggtgaagcgttcacgctcccagtcgacggagttgccgagacggcgcatctgacgggtaatggtgccgccagattccgctttccattcccagattttgtcgatgaaagcttcgcggccgtagtcgtgacgggttttaccttcttctgcggcaatcttgcgctcaacgaccatctgggtagcgatcccggcgtggtcagtaccgacctgccacagggtgtttttgccctgcatgcgctgatagcggatcatgatcagctcggtacctgccaaaacttaacgtacgctgaactgctgctggaagttaaccttggtgcaacagcaatcggtactggtctgaacacgccgaaagagtactctccgctggcagtgaaaaaactggctgaagttactggcttcccatgcgtaccggctgaagacctgatcgaagcgacctctgactgcggcgcttatgttatggttcacggcgcgctgaaacgcctggctgtgaagatgtccaaaatctgtaacgacctgcgcttgctctcttcaggcccacgtgccggcctgaacgagatcaacctgccggaactgcaggcgggctcttccatcatgccagctaaagtaaacccggttgttccggaagtggttaaccaggtatgcttcaaagtcatcggtaacgacaccactgttaccatggcagcagaagcaggtcagctgcagttgaacgttatggagccggtcattggccaggccatgttcgaatccgttcacattctgaccaacgcttgctacaacctgctggaaaaatgcattaacggcatcactgctaacaaagaagtgtgcgaaggttacgtttacaactctatcggtatcgttacttacctgaacccgttcatcggtcaccacaacggtgacatcgtgggtaaaatctgtgccgaaaccgatgtcgcgaaaagtcgcctgaagatgagtaatccgtggcatctacttgctgtcggattcggaagtggattaagcccgatcgttcctgggacgatgggctcgctggcagcgattccgttctggtatctgatgacctttttgccctggcagctctactcgctggtggtgatgctggggatctgtatcggcgtctatctttgtcatcaaacggcgaaagacatgggtgtgcacgatcatggcagcattgtctgggacgaatttattggtatgtggatcacgctcatggcgctgccgaccaatgactggcagtgggttgccgccgggtttgtgattttccgtattctggatatgtggaagccgtggccgatccgctggtttgatcgcaatgtgcatggcggcatggggatcatgatcgacgatattgtcgccggggtgatttccgcaggcatcctgtattttatcggtcatcactggccgctgggcctggactcttatttaaatcctacgacaggatgcggtttatacggcgtttccagttgctcggtcctcctgagctgtgcatacgcacagctggcggcgttactggggatcacggtcatgggcgaaattgagccgttggtgccgtggggcgaactgaccatgcctgtgccgggactggagctggcttcctggattgaagcgcgtctgggacgtaagccgttatggtgtggcgataccggacctgaggtggtccagcgcgtcgcctggtgcacgggcggcgggcaaagttttatcgatagcgccgcgcgttttggcgtggatgcttttattactggcgaagtttctgaacagaccattcattcagcccgcgagcagggattgcatttttatgctgcaggtgaaacggcggtagtgctggaactggaaccgccggtgacgctggctagccagaaacggatctggcgactggcgcagcgtctggtggatatgccgaatgtggttgaagccattcccggcatgaacaatatcacggtgattttgcgtaatcctgagtcgctgtgttatatatcgtgtgctacactgctaacctatgcactctgtgctatgataagtaaatttgttgctcctatccatttgtttggagtggtgaagtgccgatcgatgcataatgtgttgaagatcgattgcatcagaccctga

SEQ ID NO: 139555 - DNA, 2547 bp, Homo sapiens; identical to SEQ ID NO: 138667

SEQ ID NO: 139556 - DNA, 1162 bp, Homo sapiens
tttcgtggggagcggcgcggcctgggagacacagagccttcaggcgccggggcgggggcacaggcggaagacaacggaagacagccccgtagcacaggcggagtgcagcggaggcccctgccgctgccgtcatgccgttcccgtttgggaagtctcacaaatctccagcagacattgtgaagaatctgaaggagagcatggctgttctggaaaagcaagacatttctgataaaaaagcagaaaaggctacagaagaagtttccaaaaatctggttgccatgaaagaaattctgtatggcacaaatgaaaaagatcctcagacagaagcaggagctcaacttgctcaagaactctataatagtgggctccttatcaccctggtagctgatttacagctcattgactttgagggcaaaaaagacgtggctcaaattttcaacaatattctcagaagacaaattggtaccgagaactcctactgttgaatacatctgcacccaaacagaatatttttgttcatgttattgaaagggtatgaatctcccagaaatagctctaaatttgtggaataatgttaagagaatgcatcagacatgaaccacttggcaaaatcattttgtggtcggaacagttttatgatttcttcagatatgtcgaaatgtcaacatttgacatagcttcagatgcatttgccacattcaaggatttacttacaagacataaattgctcagtgcagaatttttggaacagcattatgatagatttttcagtgaatatgagaagttacttcattcagaaaattatgtgacaaaaagacagtcactgaagcttctcggtgaactactactagatagacacaacttcacaattatgacaaaatacatcagtaaacctgagaacctcaaattaatgatgaacctgctgcgagacaaaagtcgcaacatccagtttgaggcctttcacgtttttaaggtgtttgtagccaatcctaacaagacgcagcccatcctagacatcctcctcaagaaccaggccaaactcatagagttcctcagcaagtttcagaacgacaggacggaggatgagcagtttaacgacgagaagacctatttagttaaacagatcagggatttgaagagaccagctcagcaagaagcttaa

SEQ ID NO: 139557 - DNA, 554 bp, Homo sapiens
cagaacctcccagtagaacaggaaaatggggagagttggaaacagccttgttgacatggtctcattctctttctcaattcttctgctctatagtttttggacttagaaatcagtaattcacctggtctgtgggtttctttcagagattcccttgaacacttgggtggtataagctgtctgggcaagtggaaaaaaggtctttggggtataatgagcaaagctggcacttcaatgggcattcaaagggaagcacatcagtgaagatggtgcggatcatcccaccacatcaaaaccctggaacgcgatatccgttaccagaattcagggccagggctttcttcccctgaacaggatgtccttccgttaagccccgggagatcgtggtgtcctgcaggaccagctggaccctggaaggccggtgggccctgatgttcatgcggaattctttgatgacaaagtagtagcagaaaacatccaggcagcagttgacattggagaaacacatggacaattgcaagaagaagctgatgctctgcttggctctgcactctacg

SEQ ID NO: 139558 - DNA, 3279 bp, Homo sapiens
  misc_feature (1)...(3279): n = a,t,c or g
atgagtcagcaaaacaccagtggggactgcctgtttgacggtgtcaacgagctgatgaaaaccctacagtttgcagtccacatccccaccttcgtcctgggcctgctcctcaacctgctggccatccatggcttcagcaccttccttaagaacaggtggcccgattatgctgccacctccatctacatgatcaacctggcagtctttgacctgctgctggtgctctccctcccattcaagatggtcctgtcccaggtacagtcccccttcccgtccctgtgcaccctggtggagtgcctttacttcgtcagcatgtacggaagcgtcttcaccatctgcttcatcagcatggaccggttcttggccatccgttacccgctactggtgagccacctccggtcccccaggaagatctttgggatctgcatgcacaatctgggtcctggtgtggaccggaagcatccctatctacagtttccatgggaaagtggaaaaatacatgtgcttccacaacatgtctgatgatacctggagcgccaaggtcttcttcccgctggaggtgtttggcttcctccttcccatgggcatcatgggcttctgctgctccaggagcatccacatcctgctgggccgccgagaccacacccaggactgggtgcagcagaaagcctgcatctacagcatcgcagccagcctggctgtattcgtggtctccttcctcccagtccacctggggttcttcctgcagttcctggtgagaaacagctttatcgtagagtgcagagccaagcagagcatcagcttcttcttgcaattgtccatgtgtttctccaatgtcaactgctgcctggatgttttctgctactactttgtcatcaaagaattccgcatgaacatcagggcccaccggccttccagggctacagaagaagtttccaaaaatctggttgccatgaaagaaattctgtatggcacaaatgaaaaagagcctcagacagaagcagtagctcaacttgctcaagaactctataatagtgggctccttagcaccctggtagctgatttacagctcattgactttgaggccagcttggggctccacggcctggagcaggcagtggacttggcactgcccatcgcacaagcccagggtgaagtcctgaacaacggaaaatgcatggatcagttcccggtagacgtctaccagggcggcgcaggtaccttacgtaaacatgagcaccaacgaagtgctggccaatattggtctgggactgatgggtcaccaaaaaggtgaatatcagtacctgaacccgaacgaccatgttaacaaatgtcagtccactaacgacgcctacccgaccggtttccgtatcgcagtttactcttccctgattaagctggtagatgcgattaaccaactgcgagaaggctttgaacgtaaagctgtcgaattccaggacatcctgaaaatgggtcgtacccagctgcaggacgcagtaccgatgaccctcgggtcaggaattccgcgctttcagcatcctgctgaaagaagaagtgaaaaacatccaacgtaccgctgaactgctgctggaagttaaccttggtgcaacagcaatcggtactggtctgaacacgccgaaagagtactctccgctggcagtgaaaaaactggctgaagttactggcttcccatgcgtaccggctgaagacctgatcgaagcgacctctgactgcggcgcttatgttatggttcagggcgcgctgaaaacgcctggctgtgaagatgtcccaaattctgtaacgacctgcgcttgctctcttcaggcccacncgggctcttccatcatgccagctaaagtaaacccggttgttccggaagtggttaaccaggtatgcttcaaagtcatcggtaacgacaccactgttaccatggcagcagaagcaggtcagctgcagttgaacgttatggagccggtcattggccaggccatgttcgaatccgttcacattctgaccaacgcttgctacaacctgctggaaaaatgcattaacggcatcactgctaacaaagaagtgtgcgaaggttacgtttacaactctatcggtatcgttacttacctgaacccgttcatcggtcaccacaacggtgacatcgtgggtaaaatctgtgccgaaaccggtaagagtgtacgtgaagtcgttctggaacgcggtctgttgactgaagcggaacttgacgatattttctccgtacagaatctgatgcacccggcttacaaagcaaaacgctatactgatgaaagcgaacagtaatcgtacagggtagtacaaataaaaaaggcacgtcagatgacgtgccttttttcttgtgagcagtaacttaaaaataacaatctaatatcaacttgttaaaaaacaaggaaggctaatatgctagttgtagaactcatcatagttttgctggcgatcttcttgggcgccagattggggggaataggtattggttttgcaggcggattgggggtgctggttcttgccgctattggcgttaaacccggtaacatcccgttcgatgtcatctccattatcatggcggttatcgccgctatttctgccatgcaggttgctggcggtctggactatctggttcatcagacagaaaagctgctgcgccgtaacccgaaatacatcacgatcctcgcaccgatcgtgacctatttcctgactatctttgctggtactggcaacatctctctggcgacactgccagttatcgctgaagttgcgaaggaacaaggcgttaaaccttgccgtccgctgtctactgcagtggtatccgcgcagattgcgatcaccgcatcgccaatctcagcggcagtggtttacatgtcttccgtgatggaaggtcatggcatcagctacctccatctgctctccgtggtcatcccgtccaccctgctggcggttctggtgatgtccttcctggtcactatgctgttcaactccaaactctctgacgatccgatttatcgcaagcgtctggaagagggcctggttgaactgcgcggtgaaaagcagattgaaatcaaatccggtgcaaaaacgtccgtctggctgttcctgctgggcgtagttggcgtggttatctatgcaatcatcaacagcccaagcatgggtctggttgacaaaccgctgatgaacaccaacaacggcatcctgatcatcatgctcagcgttgcaactctgtacaccggatcacactatgtcattaaacaatag

SEQ ID NO: 139559 - DNA, 669 bp, Homo sapiens
tcaagccttggaaggactaaaacgcatcttggatgcaatgcagcaaaacgatttaccataccaggtacaaaacaaggtgacaggggacagcctcgctgcccgccccaaatcctccaaaattcggagaactaagagattttcggtgaactggagtccggaagcagtctccgcaccagcgctgtcccactcggcgcccagccgtctcgcgctgagcaaaggccgctccctcctggaaacgccctccctgccgcgcgcatgcgctgtgtcccttctcgccttgcaggactccacccggtccatgccctccggctgaatccgggcggccctatttggaataaaactaaaatcctcttggaatacttcattatcttcatctgatgtgacctgggtaaataactcccctctggacctcagtgccttgcttccactgatggtgttaaatttctccagaatatttctcacaggttcctcttctttggggggtgacgaaaacaagacattgtcttttgttagactttggatccactgaaagttcaatggcctccatctggaaacacaggcaaagctcagggccaatgccttcccctggctcaggcccttctctacgggggctgcagctttcaagatagcaaacgtcaaccctcttggtcttccagtgttgggattcat

SEQ ID NO: 139560 - DNA, 1108 bp, Homo sapiens
atgcgcgcggcagggagggcgtttccaggagggagcggcctttgctcagcgcgagacggctgggcgccgagtgggacagcgctggtgcggagactgcttccggactccaggtaccgcgcttgggcggcagctggccccagacttctgtcttttcagctgcagtgaaggctcggggctgcagaattgcaaccttgccaatggacctgatcggttttggttatgcagccctcgtgacatttggaagcatttttggatataagcggagaggtggtgttccgtctttgattgctggtctttttgttggatgtttggccggctatggagcttaccgtgtcttccaatgacaaacgagaatgtaaaaagtgtcactggtttacagcctttcttcctgggctaccatcaatgggtgtgagatttaagaggtccaagaaaataatggcctgctggtttggttgcaggtttaaagcctcatggatgatcctgagacttgtcttgttgctgctctgagcatctggaggaacagaaaactaagttcatgtcatcctgctgtaatgggcagagcatattttttttgtatttaaaagataaacttcaatatggaatgctagagacacaaatagcactgtcacctctaatatgaacattagtttgaaggtagtttttttctaaagcaaaaattttaactgttttcctaattgtccaagcactattttcattaaaagtgtctaatgaatcatgatatactcttccattttgttgtgtctattttttatatatttggtattttttgaaaattccaaatactcatgtctcaagtaagcttaaactacaacttgtcacataaaggaagtcttaagtggagttcacagaatgataatgtatctatttgtcgatttgtgttatatttgaaattattagaaattatgctttttccattttaattgtattgctgccagtgctatttttttctttaaaaaattttattcttagcacactgttatgttcctaactgaaatgtattcaggtattcaaataaaagacaaatgacaaatagatacattatcattctgtgaactccacttaagacttcctttatgtgacgtcgacg

SEQ ID NO: 139561 - DNA, 2043 bp, Homo sapiens
ctactttctgcttttcagttgccgcaaagtagcctgcttacgctcacgcaatatgcttttcttgctaccgcactggcctgcttcgctcaggcgttttgcggtcatcgtcgcgctattatggaagggccaggtggctatcacccttggtgaagcatcgcgcgggacaccgatcaacgatatcgccaccagcctggcagtggggattgcactctccggcgtgctgacgatgttgattggttttagcggattaggccatcgccgccgttcgcgctctcggtggcggtgatgtgcctggtactggcgatgattatcttcctgccgcaacgttttgcccgttatggcctgctggtcggcaccataaccggctggttgttgtggtacttttgctttccttcttcgcactcgctctccggtgagttgcactggcagtggttcccgctcggcagtggcggtgctttgtccgcgggaatattcgcagcagagccacagcagtacagggaagccagcaagagacaacgaagcagcaatcgaccaaagcgcaaggaaggacggcgcgacggagcgcttgtcgctatcgtcagtcagataatgccgcaacagggtaaagtcttcgcgctccagcaattgcggcagcagagtcatcagtttccagctcatgctctgtttgttaaaggcgctctctttggggatttccggtaacacccggacgaacatatcccagataaagctcgctggcagcggaaaatcaatgtttgccgcaataccaaacttttgcgacagggtcatttgcagccactgtgccataccggtactttgcaccagaatcatctctggttcgaaaggatcgtccagccgttcgcgttcgacaataaactccatcaacgcttccagcacgtccagacgattggaatggtagaccgattcgggcaatgcaggcgggtcatctcgccttctctgcccccgggtgaaactagcgtaacgctgatgctgacacatcccgcctgcgatgtctgcattcggttgacctgccagttggcaggtggcgaaatcgcgcgcagttgcgtttgctgccagccatgccgccagagctgttggtactggtttctgctggcaagactgttcattaatgttcgcgcgcggcgtcatgatcccgcgcagagaacgcgacgccagcgtcagtacgccgttaatcatgtaacgttcttcttcggcaaatgcaccttccgggatcggcatcggcatcgggttatcggcatcgtgctgaacattggcctgacgtttcccgcccatcaaacgcaggatggcatcggcagtacgcgctcgcagcggcaaagtcgactggtggcgaataaagttgcgacgcgcaatctggttaaacacttcgatgatgatcgagaagccaatcgcggcatacaggtaacctttcggaatgtggaaaccgaaaccttctgccaccagactcagaccaatcattaacaggaagctcagacagagcaccaccaccgtggggtgctggttaacgaatcgcgtcagcggtttggatgccagcaacataaccgccatcgcaatcactaccgccgccatcatcaccggcagatggttaaccatccctactgcagtaattaccgcatccaacgagaagacggcgtcaaggatgacaatctgtgtgacgaccacccagaaactggcgtagcctttaccgtggccggaatcatgatcgcggttttccagccgttcatgcagttcggttgttgctttgaacagcaagaatatccccccgaacaacataatcaggtcgcgtccggagaaggagaaatccatgacggtaaatagcggtttggtcagcgtgaccatccatgaaatcagcgacagcagccccagacgcataatcagcgccagtgataaccccagcaaacgcgctttatcgcgttgttttggcggcagtttgtcagcaagaatggcgatgaagaccaggttatcgatacccagcacaatttcgagaacaacaagcgtgagtagccccgcccaaattgaggggtccat

SEQ ID NO: 139562 - DNA, 1444 bp, Homo sapiens
atgggccaactgcatcaagcacaagcatcagcagacatagccacgagtagactgcagcagactagccttacagatgtgactcgccaccagcagttctttagcacgtacaataccgatgatttcatccagttcaccgcgacataccgggaacagactagaacgcgacgccagcgtcagtacgccgttaatcatgtaacgttcttcttcggcaaatgcaccttccgggatcggcatcggcatcgggttatcggcatcgtgctgaacattggcctgacgtttcccgcccatcaaacgcaggatggcatcggcagtacgcgctcgcagcggcaaagtcgactggtggcgaataaagttgcgacgcgcaatctggttaaacacttcgatgatgatcgagaagccaatcgcggcatacaggaagctcagacagagcaccaccaccgtggggtgctggttaacgaatcgcgtcagcggtttggatgccagcaacataaccgccatcgcaatcactaccgccgccatcatcaccggcagatggttaaccatccctactgcagtaattaccgcatccaacgagaagacggcgtcaaggatgacaatctgtgtgacgaccacccagaaactggcattcagctgtatgccagcctgctattacaggtgtttttctttgccgcgaatatttacggttggtatgcgtggtcgcgacaaaccagtcagaacgaggcggagttgaaaattcgctggttgccattgccgaaggcactcagctggttggcggtttgcgttgtttcgattggtctgatgacggtatttatcaatccggtgtttgcatttttgacccgcgtggcagtcatgatcatgcaagcattaggaattacagggtgtgatgcctgaactgcaagcggacgctttcccggtctgggattcatgcatgatggtgttatctatcgtggcaatgattctgatgacgcgtaagtatgtggaaaactggctgttgtgggtgattattaacgtgattagcgtcgttatttttgcacttcagggcgtttacgccatgtctctggagtacatcatcctgacctttattgcgctcaacggcagccggatgtggatcaacagcgcactgatccatcaggtagtgttggatctgatccaacaaggcatcgtgatcgtgtggcgggatcacctgcacatgcaacgtcttcaccggcttctcgcctaccatccatgcatgtacctggtgcacattgcggacttccgggatttcccggcccatacgaggcttcaggttcagcgatttccagcgataccggtgcaccttcaagttattcattcacgctatctttctacagtcgccacgcgctacgcagaatctgaagcgacaccagtgtccggagcattgggtctcctgtgtccgacattgccgattgtattctggcgggaataa

SEQ ID NO: 139563 - DNA, 669 bp, Homo sapiens
tcaagccttggaaggactaaaacgcatcttggatgcaatgcagcaaaacgatttaccataccaggtacaaaacaaggtgacaggggacagcctcgctgcccgccccaaatcctccaaaattcggagaattaagagattttcggtgaactggagtccggaagcagtctccgcaccagcgctgtcccactcggcgcccagccgtctcgcgctgagcaaaggccgctccctcctggaaacgccctccctgccgcgcgcatgcgctgtgtcccttctcgccttgcaggactccacccggtccatgccctccggctgaatccgggcggccctatttggaataaaactaaaatcctcttggaatacttcattatcttcatctgatgtgacctgggtaaataactcccctctggacctcagtgccttgcttccactgatggtgttaaatttctccagaatatttctcacaggttcctcttctttggggggtgacgaaaacaagacattgtcttttgttagactttggatccactgaaagttcaatggcctccatctggaaacacaggcaaagctcagggccaatgccttcccctggctcaggcccttctctacgggggctgcagctttcaagatagcaaacgtcaaccctcttggtcttccagtgttgggattcat

SEQ ID NO: 139564 - DNA, 1033 bp, Homo sapiens
ggcctttgctcagcgcgagacggctgggcgccgagtgggacagcgctggtgcggagactgcttccggactccaggtaccgcgcttggcggcagctggccccagacttctgtcttttcagctgcagtgaaggctcggggctgcagaattgcaaccttgccaatggacctgatcggttttggttatgcagccctcgtgacatttggaagcatttttggatataagcggagaggtggtgttccgtctttgattgctggtctttttgttggatgtttggccggctatggagcttaccgtgtcttccaatgacaaacgagaatgtaaaaagtgtcactggtttacagcctttcttcctgggctaccatcaatgggtgtgagatttaagaggtccaagaaaataatggcctgctggtttggttgcaggtttaaagcctcatggatgatcctgagacttgtcttgttgctgctctgagcatctggaggaacagaaaactaagttcatgtcatcctgctgtaatgggcagagcatattttttttgtatttaaaagataaacttcaatatggaatgctagagacacaaatagcactgtcacctctaatatgaacattagtttgaaggtagtttttttctaaagcaaaaattttaactgttttcctaattgtccaagcactattttcattaaaagtgtctaatgaatcatgatatactcttccattttgttgtgtctattttttatatatttggtattttttgaaaattccaaatactcatgtctcaagtaagcttaaactacaacttgtcacataaaggaagtcttaagtggagttcacagaatgataatgtatctatttgtcgatttgtgttatatttgaaattattagaaattatgctttttccattttaattgtattgctgccagtgctatttttttctttaaaaaattttattcttagcacactgttatgttcctaactgaaatgtattcaggtattcaaataaaagacgattttggttcaaaaaaaaaaaaaaaaaa

SEQ ID NO: 139565 - DNA, 432 bp, Homo sapiens; identical to SEQ ID NO: 118340

SEQ ID NO: 139566 - DNA, 885 bp, Homo sapiens
atgaaagttggtgtggcctactcacccctctctgtagcagggttctttcttcaggtagagtcgtctgaagaacgcttcaatttttgtagcttcaccctcaggaaagaaggccaagggaaagaaggtggctccggccctgctgtcgtgaagaagcaggaggttaagaaagtggtgaatcccctgtttgagaaacggcctaagaattttgacattggacaggacattcagcccaaaagagacctaaccagctttgtgaaatggcccccactatatcagcggcagagagccatcctctgtaagtggctgaaagtgcctcctgagattaaccagttcacccaggccctggaccaccaaacagctgctctgctacttcagctggcccacaagtacagatcagagactaagcaagagaagaaacagaggctgttggccctggccaaaaagaaagctgctggcaaagggggcatccccactaagagaccacctgtccttcgagcaggagttaacaccatcaccaccttgctagagaataagaaagctcagccggtggtgattgcacacgacgtggatcccatcgagctggttgtcttcttgcctgccctgtgtcataaaatgcgggtcccttactgcattatcaagggggaggcaagactgggacgtctagtccacaggaagacctgcaccactgtcgccttcatacaggttaactcagaagacaaaggcgctttggctaagctagtgggagctatcaggactgactacaatgacagatacaatgagatccgccgtcactggggaggcaatgtcctgggtcccaagtctgtggcttgcattggcaagctcgaaaaggcaaaggctcaagaacttgcaactaagctgggttaa

SEQ ID NO: 139567 - DNA, 922 bp, Homo sapiens
ggcacgaggcccaagatgccgaaaggaaagaaggccaagggaaagaaggtggctccggccccagctgtcgtgaagaagcaggaggctaagaaagtggtgaatcccctgtttgagaaaaggcctaagaattttggcattggacaggacatccagcccaaaagagacctcacccgctttgtgaaatggccccgctatatcaggttgcagcggcagagagccatcctctataagcggctgaaagtgcctcctgcgattaaccagttcacccaggccctggaccgccaaacagctactcagctgcttaagctggcccacaagtacagaccagagacaaagcatgagaagaagcagagactgttggcccgggccgagaagaaggctgctggcaaagggtgacgtccccaacgaagagaccacctgtcccttcgagcaggagttaacacgttcaccccccttggtggagaacaagaaagctcagctggtggtaattgcacacgaacgtggatcccatgcgaggctggttgtctttcttgcctgccctggtgtcgtaaaatgggggtcccttactgcattatcaaagggaaaggcaagactgggacgtctagtcccacagaaagacttgcaccactgtacgccttcacacaggtgaactcggaaagccaaaggcggctttgggctaagctggtggaagctatcaggaccaattacaatgatatgatacgatgagatccgccgtcactggggtggcaatgacctgcgtcctaaagtctgtggctcgtattcgccaagctcgaaaaggcaaaggctaaaagaacttgccactaaactgggttaaatgtacactgttgagttttctgtacataaaaataattgaaataatacaaattttcccttcaaaaaaaaaaaaaaaagggcggccgct

SEQ ID NO: 139568 - DNA, 1179 bp, Homo sapiens
atggagaaagaacttgtagatcacactggcctttttctttctgcacatgcctctgaagctctggcgttaaagctgatgatctattccgaggtggcccataaactaagggcagtcagaagccagcacccagacatgggcgtctctctgcccctaacacctgccaattcctgccctaaaactattgaaagaatgcggaggtccagggagcttgagcgggaaaaggaccaaagcatagaaacagaccatcttccctgggcctttgggtctacatttctgaagactcccttgtcatgtaaaactttgatgaaatacatttgttatgcttttatcatcaacctgtcttttgttaaaggggtgtcagctgtgaccctcatgatgagtgaggaaagtaacatgcagatgcagtttagtgtctcaattacttctggatttggtccattcaagagtcatatcatcgctgctataccaaatgctgaaaggaaagaaagccaaggagaaaaaatggctccagctcctgctgtcataaagaagcaggaggccaaggaagtggtgaatcccctgtttgagaaaaggcttaagaattttggcattggacaggatatccagccccaaagagacctcacccgctttgtgaaatggccccactatatcaggttgcagcggcagagagccatcctctctggcccacaagtacaggccagagacaaagcaagagaagaagcagaggctgttggcccaggccaagaagaaagctaccagcaaagggacatccccactaagagaccacctgtccttcgagcaggagttaacatggtcaccaccttggtggagaacaagaaagctcagctggtgatgactgcacacgatgtcgatcccatcgagctggctgtcttctgcctgcctgccccatgttgtaaaaagggggtcccttactgcattatcaaggggaaggcaagactgggacatctagtccacaggaagacctgcaccactgttgtcttcacaaaggttaactcggaagacaaaggagctttggctaagctggtggaagctatcaggaccaactacgacagatacgatgagatccactgtcactggggaggcaatgtcctgggtctcaagtctgtagctcacattatcaagctcgaaaaggcaaaggttaaagaactttgccactga

SEQ ID NO: 139569 - DNA, 524 bp, Homo sapiens; identical to SEQ ID NO: 138195

SEQ ID NO: 139570 - DNA, 981 bp, Homo sapiens
  misc_feature (1)...(981): n = a,t,c or g
gctggctctgactcttcacccatcttcacccaggctggcccctttggtgaaactacaactcccaggggtctgtgcgcgagaaggcaggcgggtttttctaccggaagtccgctctagctctgggccctacaactgcaccctgagccggtagctgcccattcgccgcgggaccggggccgctggggtctggacggtgttttgttttgatccgctttatcctcatccagaaccgggcaggcaagacgcgcctggccaagtggttacatgcagtttgatgatgatgagaaacagaagctgattcgaggaggtgcatgccgtggtcaccgtccgagacgccaaacacaccaactttgtgggagtttccggaacttttaagatcattttaccgccgctatggctggcctctaattnttgcatctgtgtgggatgtcaatgacaacaaacctgggcttacctgggaggccattcacaacttctgtggagggtcttaaacgaatattttccacaatgtctgtggaactgggacctgggtgtttcaactttctacaaaggttttacacggttcgtgggaacgaggatgtttcctgggctgggcgaaaatccgaagagacccagcccagacgaaaggtgcttgaaacagcttgctgatgcttacaagtccctgggagtttaggggcaggcgagcaccccaccgccggccccgggcccctccgtggacttcgcctgctcgcttccccttcccaagcccgtggccaacccagcaagtccttccctcagctgccttaggaggaagggaccccagctgggtctgggccacaagggaggagactgcaccccacttgcctcttgggccctgggctgttggggcagaggccaccgtgtgtgtcccgagtaaactgttgccgttgttcgtgttgatgccataagcgtctgtgcgtggagtccccaataaacctgtggtaactgcctggccttgcaatc

SEQ ID NO: 139571 - DNA, 476 bp, Homo sapiens
gcggtgtctgcgcggtcggtgagacccgcgcgggtgagacgctggccctccttacagcctagaaaaaatgacagatgtcgtagctgtttgggatgttgctttaagtgacggagtccacaagatcgaatttgaacatgggactacatcaggcaaacgagtagtatatgtagatggaaaggaagagataagaaaagagtggatgttcaaattagtgggcaaagaaacattctatgttggagctgcaaagacaaaagcgaccataaatatagacgctatcagtggttttgcttatgaatatactctggaaattaatgggaaaagtctcaagaagtatatggaggacagatcaaaaaccaccaatacttgggtattacacatggatgaaaaagatgctatggacgtatggtgcaatggtaaaaaattggagacagcgggtgagtttgtagatgatgggactgaaactcacttcagtatcg

SEQ ID NO: 139572 - DNA, 893 bp, Homo sapiens
gctgggttggggctgaggaaggcctatgcgcggagggtgcggccttcggctgaggcagaggaccagggttgggtccgtggcggcgggaggggtggcctcctgcgctggtcgccccaggggacctgagaggcgcgacaaacagtcggcgcgtttggtactcgcgcctgcagagctttcaacctgcgcgccggctgcgctagtttctcggccaggggagcaaggccacgcggctagcgcagccgagtcggaaccaaccggttgtttggtgaaacctaccccagagcctcccccggcccacagagcacagccctccttacagcctataaaaaaatgacagatctcgtagctgtttgggatgttgctttaagtgacggagtccacaagatcgaatttgaacatgggactacatcaggcaaaccgaagtagtatatgtagatggaaaggaagagataagaaaagagtggatgttcaaattagtgggcaaagaaacattctatgttggagctgcaaagacaaaaagccgaccataaatatagacgctatcagtggttttgcttatgaatatactcctggaaattaatgggaaaagtctcaagaaagtatatggaggacagattcaaaaacccaccaatactttgggtattacacatgggatggttgagaactttagaattgttttggaaaaagatgctatggacgtatggtgcaatggtaaaaaattggagacagcgcgagatttttgtaaaatgagtgatacaatatcagatgacacgaaggtagacgaacaggaaagggcactctcacgaaccccagaggacaagtggaattttagaccagcagtgccaatgcgaggagaaagaggctcccccagtcactgtggccaggcacactga

SEQ ID NO: 139573 - DNA, 1236 bp, Homo sapiens
atgcagctcaagtttcctggccgccagaagatccacatctcaaagaagtggggcttcaccaagttcaatgctgatgaatttgaagacatggtggctgaaaagcggctcatcccagatggctgtggggtcaagtacatccccaatcgtggccctctggacaaatgccaccatggaaaatgtgtggcaactgggacctcatacatgtgcaagtgtgccgagggctatggaggggacttgtgtgacaacaagaatgactctgccaatgcctgctcagccttcaagtgtcaccatgggcagtgccacatctcagaccaaggggagccctactgcctgtgccagcccggctttagcggcgagcactgccaacaagggttgttgggaggagtacgtgagatgttgagatgtaaagtcagaagcaacattgtcacgatgaaggccaaactgtcatttagaatctgcatgaccttgactatcctggccaacatgtggccccggcccatcttgggcggggtggaccagatccccatcaagcccaagtccaaggtgctgtacttgggcgccgcgtcgggcaccaccgtctcccatgtctccgacatcattggcccagacggcctggtctacgccgtcgagttctcccaccgcgccggccgcgatctggtcaacgtggccaagaagcgcaccaacatcattccggtcctggaggacgcgcggcacccgctcaaccggaccagggcccgctcggtggccctgaacgcccacaccttcctgcgcaatgggggccactttctcatctccatcaaggccaactgcatcgactccaccgcatccgccgaggctgtgtttgcttctgaggtgaggaagttgcagcaggagaacttgaagcctcaagagcagctgaccctggagccctatgagcgggaccacgctgtggtggattacagctcctcgtcagcaacagaacaaagaaggacggagaatgactctgacaagttgacagaagtaggcttcagaaagttggtaataaacttctccaagctaaaggaggatgttcgaacccatcacaaagaagttaaaaaccttgaaaaaagattggatgaatggctaactaggataaacagtgtagagaagaccttaaatgacctgatggaagctgaaaaccatggcacgaagaagtacgtgacacaagcacaagcttcagtagcctatttgatcaagtggaagaaagggtatcagtga

SEQ ID NO: 139574 - DNA, 1111 bp, Homo sapiens
atgggtcagcttccttttggctacccccaacccccaacgcggaggggcttaacatacatctcccacgttaaggataagcggcaggccattcggcaaaaaaaagctgtcttagcttgcttcccgcgtggagttttccgttgggttcgacccgagcccagtggcacgttcgccggcttcaggcaaggatctcaggaggcggtagacatcgatgtggccggcgtggccaagagcaagacccgccgcagaatggggcccatggtggtgtcggtggagccgcaccggcacgagggcgtcttcatctaccgcggggcggaggacgcgctggtcacgctgaacatggtgccgggccagtctgtgtacggcgagaggcgcgtcacggtgaccgagggcggcgtgaagcaggagtaccgcacgtggaacccgttccgctctaagctggccgcggccatcctgggcggggtggaccagatccacatcaagcccaagtccaaggtgctgtacctgggcgccgcgtcgggcaccaccgtctcccatgtctccgacatcattggcccagacggcctggtctacgccgtcgagttctcccaccgcgccggccgcgatctggtcaacgtggccaagaagcgcaccaacatcattccggtcctggaggacgcgcggcacccgctcaagtaccgcatgctcatcgggatggtggacgtgatcttcgccgacgtggcccagccggaccagtcccgcatcgtggccctgaacgcccacaccttcctgcgcaatgggggccactttctcatctccatcaaggccaactgcatcgactccaccgcatccgccggaggctgtgtttgcttctgagggggagaagttgcagcaggagaacttgaagcctcaagagcagctgaccctggagccctatgagcgggaccacgcttgtgtgggtcggggtctaccgacctcttcccaagagcagcagcaaatagcacccagctcaggctcgcctgccatctccccaaggctgcgttgtgtttgctattattttctgtgtgttttctttgtgagtgttttgttttgttgtttttctattaaactgcataaagaaacggcaaaaaaaaaa

SEQ ID NO: 139575 - DNA, 1156 bp, Homo sapiens
tccacgcccaacttggaaggccggaccgcgaatttaaaagaacgcgataatcgtggctattactgtgatggaggtcactggcgcgaccacggctggtggaaacaacattatgaatggcgaggcaatcgctggcacctacacggaccgccgccaccgccgcgccaccataagaaagctcctcatgatcatcacggcggtcatggtccaggcaaacatcaccgctaaatgacaaatgccgggtaacaatccggcattcagcgcctgatgcgacgctggcgcgtcttatcaggcctacgttaattctgcaatatattgaatctgcatgcttttgtaggcaggataaggcgttcacgccgcatccggcattgactgcaaacttaacgctgctcgtagcgtttaaacaccagttcgccattgctggaggaatcttcatcaaagaagtaaccttcgctattaaaaccagtcagttgctctggtttggtcagccgattttcaataatgaaacgactcatcagaccgcgtgctttcttagcgtagaagctgatgatcttaaatttgccgttcttctcatcgaggaacaccggcttgataatctcggcattcaatttcttcggcttcaccgatttaaaatactcatctgacgccagattaatcaccacattatcgccttgtgctgcgagcgcctcgttcagcttgttggtgatgatatctcccgcagaatgtgatacagatctttccctcgggcattctcaagacggatccccatttccagacgataaggctgcattaaatcgagcgggcggagtacgccatacaagccggaaagcattcgcaaatgctgttgggcaaaatcgaaatcgtcttcgctgaaggtttcggcctgcaagccggtgtagacatcacctttaaacgccagaatcgcctggcgggcattcgccggcgtgaaatctggctgccagtcatgaaagcgagcggcgttgatacccgccagtttgtcgctgatgcgcatcagcgtgctaatctgcggaggcgtcagtttccgcgcctcatggatcaactgctgggaattgtctaacagctccggcagcgtatagcgcgtggtggtcaacgggctttggtaatcaagcgttttcgcaggtgaaataagaatcagcat

SEQ ID NO: 139576 - DNA, 2116 bp, Homo sapiens
ttaacgctgctcgtagcgtttaaacaccagttcgccattgctggaggaatcttcatcaaagaagtaaccttcgctattaaaaccagtcagttgctctggtttggtcagccgattttcaataatgaaacgactcatcagaccgcgtgctttcttagcgtagaagctgatgatcttaaatttgccgttcttctcatcgaggaacaccggcttgatgcacttaaaatccctcctttttgggccgatttcccctttttgggtgaaatccccagcccacccaaagggcccctcaaatggggacttactgccttggagcgacgggctcgtacggacccacgagcgtgacaccgacgggtgcttcctgcgctcacattctggtttggttcgtctgtttgcgtctttgtttgttgcaaattgtcgacccttgttgtagtcgtggtggcaatggcatcgcttgtttaacttgttgtcgacccttgttgtcgttgattcctgttgttgcaatcgtggttgccctatcgatgtcgcttgcaccgtcgattgtcgatgcagtgctcgtagttgtgctatcgcatgtcgctgtgatgtgtgtcgttgcgttgccttgtgtcgtgtgcctgatgtcgtgtgcggcgatcgggggaagtctggacctgatttacgtaaaacccgcttcggcggctttttgcttttggaggggcagtaagatgaatgactgtccacgacgctataccctaaagaaagcggcttatcggtcagtttcacctggtttacgtaaaaacccgcttcgtcgggtttttgcttttggaggggcagaaagatgaatgactgtccacgacacctcgggggcgcggaggcgcagaagcgcgggaacccggaagtttccgccttaattccgtagcacataagacccttggggccgtgatgcgacggcttgacgcgtcttatcaggcctacaaccggtgccgcagtccgggcagagttgggctggcaggcaagtggtcgctgaagtgcagatgcattgacgcatcttatcaggcctacaatgggtaccggatcggtaggccggataaggcgtttacgccgcatccaggtctgcgcccaaatcacgccgctggcatattccggcggcagcagcgggattaaggcttccagcgtcgcagtcaacgcgatgtgtcgctgtcggtcaaattcagatgccccacggcttgaaccactgcactcgtggtcgttgtggtcgcccccctgttcctccctacgtgtttggtcttcgattccttgctgtgtgtcacagtagtcgcgcagtgcggcttttcgcgcgccttttcgagaatttgcccggccccattcacccgttgctgaaggttccgggctctggtgccgaaggcttctccctgcgcgaattgttcccagtcgccacggtgctggtcgccagtagcacggctgacgaaaagattcatattcctgctggcggccgattgtgcgcctggcattgcggcgcagcatttacccatccgttcgttcgcaagcaggagctgacggtgtatacgctgaataatgagctggaaaatctgctgaccaacgtggtgaatcaggcgcaacagggcgggaaagtgatgctcgacagcgtgccggtcgatccgaatatgctcaaccagttccagagtacgatgccacaggtgaaagagcagatgaaagcggcggggaaagacccggtgctgctggtgccaccgcagctgcgccctttgctggcgcgttatgcaaggttgtttgcgccggggctgcatgtgctgtcgtataacgaagtgccggatgagctggagttgaagattatgggggcgttgatgtaagtatccagcattggtgcacaactgccggatgcggcgtgaacgccttatccgtcctaccgttcaggcacaagtttgtaggcatgataagacgcgccagcgtcgcatcaggcatctgcgcataactgccggatgcggcataaacgccttatccggcctaccgatccggcacaagtttgtaggcatgataagacgcgctagcgtcgcatcaggcatctgcgcacaattatgaaatgatacgctccccggcactaaaatccgttacgtccccc

SEQ ID NO: 139577 - DNA, 1314 bp, Homo sapiens
gcgcgcggggcagccgcgtggctaggcagacggggccgggagcggcgcgcgcgcgccccgccagcctctggcgcgcccccggcggcatgagccgcagcgtgctcgcccccgccgccagctcgcctcacttatgggtcggaaacgctgcgtgggggagactgttccaagatggcggcgggttgctgcggggtgaagaagcagaaactgtccagttcgcccccctctggctcgggtggcggtggtggcgcctcctcctcctcccactgcagcggagagagccagtgccgagctggggagctgggactaggaggcgccggtacgcggctcaacgggctgggaggtctaaccggaggaggtagcggcagcggctgtaccctctctcccccccagggctgcggcggcggcggcggggggatcgccctgtcgccacctccgagctgcggagtggggaccctaactttctaccccggccgccgccacctcttcctcaccctcctcatcgtcccgcccgcctcgtcctcatcgccgggctcccggaaagatggtggtgtcaacagaagatgtgcttgcttttgcttcgatgtgctctactgtcacctgtatggaatcctagcagcccccggcccccccgattcaccaacgagccctacccactgtttgtaacatggaagattggtcgagacaaaagattacgtggatgcataggtactttttctgccatgaatttgcattcaggactcagggagtacacacttaccagtgcccttaaagatagccgttttcccccgatgacaagggatgagctgccacggcttttctgctcagtgtctctgctcactaactttgaagatgtctgtgattatttggactgggaggtgggtgtacatrggcattagaatagammttcatcamtgtaaaaaggcatcaaaacgcgaccgccacctacctaccggaggtgtgcaaaggagcaaggatgggaccatatacagaccatagactccttattgaggaaaggaggatacaaagctccgattactaatgaattcaggaaaaccataaaactgaccaggtatcgtagtgaaaagatgaccctgagctatgctgaataccttgctcatcgccagcatcatcatttccaaaatggcattggggatccccttccggcatacaaccattattcctgacactgagccgcacaaccagtcactgggcctctctgcagacctcttcccaggagaccctacaccttcttggtctagctatctcttttactgtaccattttatgatgatagtttccgttgccatggtgaagc

SEQ ID NO: 139578 - DNA, 386 bp, Homo sapiens
tgggggacctcccttgggagatcaatcccctgtcctcctgctctttgctctgtgagaacgatccacctatgacctcaggtcctcagactgaccagcccaagaaacatctcacgaatttcaaatctgatctgctcaacttagcgactgaagattaatgctgcctgatcacctcagaagccccctggaccatcacagatgcccaacttcaggtgactctcaagtggagggcctctgaacccaagccaagccatcgcatcccctgtgatttgaaggtatatgcccgggtggcctgaagtaaccgaagaatcgcaaaagaagtgaaaatgcgctgccccgccttaactgatgacattccaccacaaaataagtgcaaatgccagtccttg

SEQ ID NO: 139579 - DNA, 1710 bp, Homo sapiens; identical to SEQ ID NO: 125986

SEQ ID NO: 139580 - DNA, 2664 bp, Homo sapiens; identical to SEQ ID NO: 117147

SEQ ID NO: 139581 - DNA, 466 bp, Homo sapiens
cctgtttggtggtctcttcacacggaggcgcatgaaatttggtgccgtgactcggatcaggggacttcccttgggagatcaatcccctgtcctcctgttctttgctcgtgagaaagatccacgtacgacctcaggtcctcagaccgaccagcccagtaaacatctcaccaatttaaaatccgcctccactcctccaccctataatccttttatcacctcccctcctcacacccggtccggcttacagtttcgttccacctctagccctccggcacctgctcagcaatttactcttaaaaaggtggctgaagctaaaggcatagtcaaggttaatgctcctttttccttatcagacctctcccaaatcagtgtgcgtttaggctctttcatcaaatatgaaaaatccagcccagttcatggctcgtttggcagcaaccctgagacactttacagccctagaccctga

SEQ ID NO: 139582 - DNA, 261 bp, Homo sapiens
tcagtcagtggccgagagatgttcagggacagctgtggctgggacctgatgatccaccagccggatcttagcaaatagcagctctgtgtccagctctgtctgcataacactttccattttgaaaagccatttctcctcccatttttccttaaggctcctaaccctggggtgtccagggctgtccgagcctgtgtctttattcctaaacctttcctctagaccagcaggaaccacgaagcctcttctggcactaagcgatgt

SEQ ID NO: 139583 - DNA, 513 bp, Homo sapiens; identical to SEQ ID NO: 117148

SEQ ID NO: 139584 - DNA, 419 bp, Homo sapiens; identical to SEQ ID NO: 132733
  misc_feature (1)...(419): n = a,t,c or g

SEQ ID NO: 139585 - DNA, 825 bp, Homo sapiens; identical to SEQ ID NO: 133887

SEQ ID NO: 139586 - DNA, 403 bp, Homo sapiens
ctgcaagtcacaggggatgcgatggcttggcttgggctcagaggcctgatattcctgccttcttatattaataagaaaaataacacaaaatagtgttgaagtgttggggcggcgaaaatttttgggcggtggtatggagagagaatgggtgatgtttctcagggctgcttcaagcgggattaggggcagcgtgggaaccaatttcaaatccgagtcacggcaccaaatttcatgtgcgtctgtgtgaagagaccaccaaacaggctttgtgtgagcaataaagctgtttatttcacctgggtgcaggtaggctttcagatttttgaaaagcctgaacccattgaagagatatgcaaggtatgttggaggccgatggcttagagaggattgggcctttgagagg

SEQ ID NO: 139587 - DNA, 1059 bp, Homo sapiens; identical to SEQ ID NO: 114869

SEQ ID NO: 139588 - DNA, 1080 bp, Homo sapiens; identical to SEQ ID NO: 119354

SEQ ID NO: 139589 - DNA, 2394 bp, Homo sapiens
atggctactttgctggcagagcaggtgaaatacaagatgatcctggaactctctcttgtatcagaaaggaagaattcaaagaagggtgatggtcttttaagccgtcctatttttactcaggagccacatgatgtcatttttcctttggatttatcaaaatctgaggtcatcctgaattgtgctgctaatggttacccttcgcctcattataggtggaagcaaaatggcacagacattgattttactatgagttatcactacaggttggatggaggcagtcttgcaatcaatagcccccacacagatcaagatattggcatgtaccagtgcctggccaccaatcttctggggacaattctgagtcggaaggcaaagctccaatttgcatggtgtgcaaatttcgtgtgtagcggtctgtatattcgcgtaaattcagctattaagattggtgtcttggggggagcaggaggaaaatgtcccgctgctttcatctgccaagatgttcagctctctctgctcctgctgtcacaccagaaattgattgatctgtatgggttcaaacagctacaaagtgcatctgagaaaagaaaatggaagcactctaagaaaaaggtagctgtccccatggagcagataaaacctgaacctaagtatgccaagatgaactggagatataggtcttcagggaccccaaggatattaaaaaggaggcccaaggaagaatttcacaagctgcggaggattgggaagtgggttcagatacgggaacattcagagctctatgtagatgaagcccacctgcacccaggtgaaataaacagctttattgctcacacaaagcctgtttggcggtctcttcacacagacacgcatgaaatttggtgctgtgactcggatcgggggacatcccttgggagatcaatccgccgtcctcctgctctttgttcctacctctctacctcttctccactttcctggggcagggccaagtacccctcaaccccttctccttcaccctcagcggcaagtcccgctttcctggggcagggccaagatttaattaacctcgtcttcaaggtgtacaataatagaaaaaagttgcaattccttgcctccactgtgacacaaaccccagccacatctccagcacacaagaacttccaaacacctgaaccgcagcagccaggcgttcccccagaacctccttccccaggagcttgctacaagtgccagaaatctggccaccaggccaaggaatgcccgcagctcaggattcctcatttatcttatgcatggaccttcaatgataaccccttatacgtccaagaggacaataggcgatttgtatctcaagagacgggaaacttgtacattgccaaagtggaaccatcagatgtgggcaactacacttgctttataactaacaaagaggcccagagaagtgttcaaggtccacccactccattagtgcagcgcactgatggtgtgatgggggaatatgaaccaaagattgaagtgcgttttcctgaaactatacaagctgcaaaggattcatctgtaaaactggaatgttttgcccttggaaagattgatgacagtataagagagaaaggagcaattaggattaaaccgtcttctattctaatgaggtgtaactgtttagtccagtccccgatattagttggagaaggttggacgggagcccgttgccagggaaagtcaagtacagcaaatcccaagctatccttgaaatcccgaacttccaacaagaagatgaaggcttttatgagtgcattgcaagcaaccttcgaggaagaaaccttgcaaagggtcaactcattttttatgcataatgtcttggataactgccttttaccaaacagtggcacttgcctttttgaaacagctcctccagaatgggaacagaaaatccaaaatacacacctctctatctatgacaacttgctctgggaatgtaaagctagtggaaagccaaacccttggtatacatggttaaaaaatggtgaacgactcaacccagaggagagaattcaaatagaaaatgggacactcatcataacgatgctgaatgtgtcagattctggtgtgtaccaatgtgctgcagaaaacaaatatcagataatttatgcaaatgctgaattgagagttttaggttctcagctggttcatttcagagaaaatggtacttgtctctctgatgaggttataagagactcagattttatgtccggaatgacagttgtgcatgcttttacctctggcagccaaggaacaaccacggaaaatcaggatgaattacagattaagtttatctctgcaaggcattctcaggcaactgagggaatcaattccacatctgctaagtttgattaa

SEQ ID NO: 139590 - DNA, 759 bp, Homo sapiens; identical to SEQ ID NO: 133959

SEQ ID NO: 139591 - DNA, 2206 bp, Homo sapiens; identical to SEQ ID NO: 129196

SEQ ID NO: 139592 - DNA, 1236 bp, Homo sapiens; identical to SEQ ID NO: 114308

SEQ ID NO: 139593 - DNA, 2604 bp, Homo sapiens
atgcccctccagccactagcgactccgtttacttcccctggaagcccatcagttgctcaagtgacaaccaacaccggagagccagggttcgcccaacaggagtacgcggagacaccccagacgacagcgcgtcccccccacccccaccccgccctccgggcgctccaggccagcgtccaccagaccccacgcctgggggactgcttgggctctagcgagagtgccacggctctgcacggcagcggggagccgaacaagttagccccgccggggcgccctacggaacgcggtgggcttttcaagtgctcagtccctctgcggacagtgcgaggctgccgggccgggctccgggggaccgagactgtaccttccagccttcagcgccagcccgcgggagacgtaggatggatcaacaacaaaagcaccacagccctagacagaacgccgactgacacccagcggaccaggcgaccccggccgccaaaacagaaacaaagaggcagagcgctcaaggagcggcccagagactccgacagcgcgcgcgaaggcccactgaaggcggtcgcgggcctgtttggtggtctcttcacacggacgtgcatgaaatttggtgccgtgactcggatcgggggacctcccttgggagatcaatcccctgtcctcctgttctttgctccacgagaaagatccacctacgacctcaggtcctcagactgaccagcccaagaaacatctcacgaatttcaaatctgatctgctcagcttagcgactgaagattaatgctgcctgatcacctcagaagccccctggaccatcacagatgcccaacttcaggtgactctcaagtggaggatcctataagatggccccacgcttatctccctttgctgactctcttttcggactcagcccgcctgcacccaggtgaaataaacagccatgttgctcacacaaagcctgtttggtggtctcttcacaccgacgcgcatgaaatttggtgccgtgactcggatcggggggacctcccttgggagatcaatcccctgtactcctgtgttctttgctccgtgagaaagatccacctacgacctcaggtcctcagaccgaccagcccaaggaacatctcaccaattttaaatcagacaaaggagacatgttttatccgtggacccaaaactccagtgccggtcacggactgggaaggcagccttcccttggtgtttaataactgcagggacacctctctgattatacacccacgtttcaagggtgtcagaccacgcagggatgcctgccttggtccttcacccttagcggcaagtcccgcttttctggggaaggggcaagctgctcctcgccaggccgagctaggtcccaattcttcctcagcctctgctcctccaccctataatctttttatcacctcccctcctcacacctggtccggcttacagtttcgttctgtgactagccctcccccacctgcccagcaatttactcttaaaaaggtggctggagccaaaggcatagtcaagaccatcacagacgccgagcttcgggtaactctcacagtggaaggccgagacagtttaactaaattatctgcttccctgacgattcctggactacagccacatctcattgccgtccttctccccaacccaaagcctccttcgcgtcttcctctcatatccccctaccttaacccacaagtatgggacatctctactccttccctggcaactgatcacatgcccattaccatcccattaaaacctaatcacccttaccccactcaacgccaatatccaatccctcagcacgctttaaaaggattaaagcctgttatcactcgcctgctacagcatgggcttctaaaacctataaactctccttaccattcccccattttacctgtcctaaaaccagacaaggcttacaagttagttcagaatctgcgccttatcaaccaaattgttttgcctatccactccatgaatgctccttattttctctccgagtcgtggactctatgcctgctcatgtgtcaagacgtagctcaacttccaacttcactaaaattatcaacctcacgaactagctaccaagtgaccactttgacgagccttgaggaaaaggcggagggggctttagcacacactcagctaacgaaagtgtgccggttcatttcccacagctccacacaaactcccagggcctctgcagttctgggagaaccagtacccatcagtgctctagggctcccaagtcctgcagccttctgggaatgcctttcctttcccatctgccatcacactaatgataatagtcggccacctccaggatgccctaggattcccaaggccacatcacctacaccacttcttgacagagccaagagtgatgctggaaggggaagcaggaagcagaagaagaaagggacccagaacagtggaatgcaggagctcaggggccacgcaggagtgtggttctgcgtctggcccaggcacatcacacctgccttgggcatagtatcctcaaacctgctagttgaggggcgggaaaaattcacagaatattttagtgatttcttgctcagataa

SEQ ID NO: 139594 - DNA, 2268 bp, Homo sapiens; identical to SEQ ID NO: 133961

SEQ ID NO: 139595 - DNA, 4345 bp, Homo sapiens
ttaaatcagtaagagtttagtaagcatcttctcttcgttaagccctgcatcaggtgaatataatcttgtcctgatctcacgtagctctgagacagacaggtaaacatagcattcctcaccattacccaataaagctactgtaacagttttaagagtcaggtggaaagaaggtggtgatcgagtttttgaaacttgatggggtcttgggaccaggactggctcttcaccagcagtgaatggccactctgcaaagagatcacctgcaaagggcaggaatggccttccaaaagtcagaatggaattacctgtttgtggatatctgggggctgttgccttggttggactcggagtctgtgtgccatgggtgaatgctcccgaggtagggctggcctgggatgggctgccaggtgtggccattatctcagcagcaggcgccaaaaggcttgtagtgttcatggcttcctcggtccctgcagtagtcggtggggaagaacgagtttcccagagagaccctccaggttttttctcactgatggtctgagcccagggcacggacgatatggaagcccacgtctgtctgtcagctgtcaaccactgagttctggccaccctcctggtagccaaggctgggagagtgtgggaggcactgaaccatgtggctgtggccctggctggaagctcaggaggcctgcctgtgttcagggtctcctctgtttctgaaggagcagctgtctctgtccagggagaggatctcagagcagatgcccagggtgtgctctgggtccagtgtccggggcttgtacttggtagtgttttctggcttttggttgtgggctttgaagtcctggcagttcccctggtagctgcaccttcagggaggcagtcaatggtaacattaacatgcttgacactttgggcataaaaaaactgaaaggtcactggactgcaaatatatgaatgtggagattcaaacctttctctaattaaaagtatcaggcatttgctatgtttcctgaacagattctgacccctgtcagagcctttcttccacctccagccctcagcctctccaggactctggtacatgtctttggaagaggaattagtctcctccatatgccttatggatacaactaaatttcatgtgcgtccgtgtgaagagaccaccaaacaggctttgtgtgagcaataaagctgtttatttcacctggggtgcaggcgggctgagtctgaaaagagagtcagtgaagggagatagaggtggggcattttattaggatttggggtaggtaaaggaaaattacagtcaaagggggtttgttctctggcgggcaggagtgggggtctcaaggtgctcagtgggggtgctttttgagccaggatgagccaggaagaggactttcacaaggtaatgtcatcagttaaggcaaggaccggccatttacacttcttttgtggtggaatgtcatcagttaaggtggggcaaggcatattcacttcttttgtgattcttcagttacttcaggccatctgggcatatacgtgcaagtcacaggggatgcgatggcttggcttgggctcagaggcctgacattcctgccgtcttatattaataagaaaaataaaacaaaatagtgttgaagtgttggggtggcaaaaatttttggggggtgatatggagagagaatgggcgatgtttctcagggctgcttcaagcgggattaggggcgccgtgggaaccttccactgtgagagttacccgaagctcggcatccgtgatggtctagggggcttcaaccgaggcgatcgggcagtgtcagtcttcagccactaagccgagaagatctgggaaggagtcagtcagagagccttgggccagagttccaggggctgtgggagtggctgccaggtgagttgaacagtccgatttccagtggggtcccgatttaaaattggtgagacgtttcttgggctggtcggtctgaggacctgaggtcgtaggtggatctttctcatggagcaaagaacaggaggacaggggattgatctcccaatgggaggtcccccaatccgagtcacggcaccaaatttcatgcgcgtccatatgaagagaccaccaaacaggctttgtgtgagcaacaagactgtttatttcacctgggtgcaggcgggctgagtctttgtcaaaaatcagttgaccataaacatatgaatttatttctggactttcaatgtcattctgttgatcaatgtatctgtccttatgccagtaccacatagttttgattactgcaaatttgtggtaagttttgaaatcaagaagtgtaaattctccaacttcattcttttccaagattgttttggttattctgggtcccttgcatttccacatgaattttggaatcagcttgtcagtttttctctcccgctctcggtttgttattgggaaggtgctgaaggatgctggggctgccaacctggtgcctaattccccaaagcagaggcagctgtggtccagaagccccagggcctgtttccactgtcctccctggggaaatgcgggtattaggcccagagaggcccaggacttatctcgacactctcctttccccggccaagaaaatgcttcctcttcttggaggatggagatgcaaacactccctttctggagcaggtagtaagaatccaggagagcatagcctggggattctgcagtgtggaatactgcaagggcttttatcagggagccagccaaggccttggtgactgatatctcccctagtaacatcatggggtggataggcaaaacaatttggttgataaggcgcagatcctgaactaaccagtaaggcttgtttggttctaggacaggtaaaatgggggaattgtaaggagagtttctaggctttaaaaggccatgctgtaacaggtgagtgataacaggctttaatccttttaaagtgtgctgtgggatgggatattggcattcatcggggtaaggttgattaggttttaatgggatggtaaggggtgcatgatcggtcaccaaggagggagtagaggtatcatacttgtgggttaaggtggggagatacaaggggaggatgtgaaggaggttttgaacctccactgtgatagttacccagagtgtctgtgatggtcctgtaggcttccaaggcgattgggtagggtcagtcttcatcggatttgaaattggtgagatgttccttgggctggtcggtctgaggacccgaggtcgtaggtggatctttctcatggagcaaagagcaggaggacaggggattgatctcccaagggaggtcccccaatccgagtcacggcaccaaatttcatgcgcgtccatgtgaagagaccaccaaacaggctttgtgtgagcaacaagactgtttatttcacctgggtgcaggcgggctgagtcagtatgggttcgtcgatgctgaatcagaattgcgcttcggctgaatgcctttgcacactcgtcacatgcataaggtttctttccactgtggattctctgatgtaaaataagggctgagctctgactaaagattttgccacattcatcacatttctgttgttttttccaagaagggtttccttgtctcttttcaaacctaccatcttgttcataggttcctctatatgtggaactctgggagccattcatatgaaggatattggaaacattgcaatgcagttctatgcctaaagaagtcttttgccttgaagcagatttcacatttgtagttttgatgtcttcatcatgtggtcttaaggactgaagctcccatgatgctccctggagctgcttcttcacgggcatgagctggctacttggcaattcctcagtgatttctgaaggtgctagcttctctgcaatcatgtccttccttcgtccaaaaaagatctgctttggtccatcaagctctctctccacatcctccagcatagtcacagtttcctctccattctctggatgatgcttctgcacccaggcctgaagctcttttgggaggatggccaggaactgctccagcaccagcagctccaggatctgctccttggtgtgcacttccggcctcagccagagatgacaaagttcccagagccggctcagagcctcatggggcccaggtgaatcctggtagccaaactgcctgaattgctggcggaaggtctctgggctgtagctgctgctccagtggaggctagagtctggatcacaggtctgctcttcctcttccatcttctctgtcagaatcccattacactcctctgaagtttgtgttaggagtgatgatgactttcccaattttgcagacat

SEQ ID NO: 139596 - DNA, 5213 bp, Homo sapiens
atgctgttttgggcctttgacaaaattcaacagcccttcatgctaaaaactctcaataaattaggtattgatgggacgtatctcaaaataataagagctgtttatgacaaacccacagccaatatcatactgaatgggcaaaaactggaagcattccctttgaaaactggcacaagacagggatgccctctctcaccactcctattcaacatagtgttggaagttctggccagggcaatcaggcaggagaaggaaataaagggcattcaattaggaaaagaggaagtcaaattgtccctgtttgcagatgacatgattgtatatctagaaaaccccatcatctcaacccaaaatctccataagctgataagcaacttcagcaaagtctcaggatacaaaaacaatgtgcaaaaattacaagctttcttatacaccaataacagacaaacagagagccaaatcatgagtgaactcccattcacaattgcttcaaagagaataaaatacctaggaatccagcttacaagggatgtgaaggacctcttcaaggagaactacaaaccactgctcaaggaaataaaagaggatacaaacaaatggaagaacattccatgctcatggataagaagaatcaatattgtgaaaatggccatactccccaagaggactccattattatcgctgcctagtacattatatgaggagctgtggagacttaggtcctacttcccattgtgccctcaactttacaacatggagcagaataccacagactgggtaatttataaagaacagtgcatttggctcacagctctggagactggggagtccaagagcactgcaccagcatttggcaagggttatcccatggcagaatacatcatatggggcagattgacacctcacatggctggctactcctctgagacaaaacttccagaggaacgatcaggcagcaacatctgctgttcaccaatatccgctgttctgcagcctctgctgctgatacccaggcaaacagggtctggagtggacctccagcaaactccaacagacctgcagctgagggtcctgactgttagaaggaaaactaacaaacagaaaggacatccacaccaaaaccccatctgtacgtcaccatcatcaaagaccaaaggatcaaattcacacataacaatattaaccttaaatgtaaatgggctaaatgctccaattaaaagacacagactggcaaattggataaagagtcaagacccatcagtgtgctgtattcaggagacccatctcacgtgcagagacacacacaggatcaaaataaagggatggagggagatctaccaagcaaatggaaaacaaaaaaaggcaggggttgcaatcctagtctctgataaaacggactttaaaccaacaaagatcaaaagagacaaagaaggccattacatgatggtaaagggatcaattcaacaagaagagctaactaccctaaatatatatgcacccaatacaggagcacccagattcataaagcaagtccttagagacctacaaagagacttagactcccacacattaataatgggagactttaacaccccactgtcaacattagacagatcaacgagacagaaagttaacaaggatatccaggatttgaactcagctctgcaccaagtggacctaatagacatctacagaactctccaccccaaatcaacagaatatacattcttctcagcactacaccacatttattccaaaattgaccacatagttggaagtaaagcactcctcagcaaatataaaacaacagaaattataacaaactgtctctcagaccacagtgcaatcaaactcgaactcaggattaagaaactcactcaaaaccgctcaactacatggaaactgaacaacctgctcctgaatgactactgggtacataacaaaatgaaggcagaaataaatacattatttgaaaccaacgagaacaaagacacaacataccagaatctctgggacacattcaaagcagtgtgtagagggaaattcatagcactaaatgcccacaagagaaagcaggaaagatctaaaattgacaccctaacatcacaattaaaagaactagagaagcaagaacaaacacattcaaaagctagcagaaggcaagaaataactaagatcagagcaaaactgaaggaaatagagacacaaaaaatccttcaaaaaatcaatgaatccaggagctggttttttgaaaagatcaacaaaattgatagaccactagcaagaccaataaagaagaaaagagagaagaatcaaatagatgcaataaaaaatgataaaggggatatcaccactgatcccacagaaatacaaactaccatcagagaatactataaacacctctatgcaaataaactagaaaatctagaagaaatggataaattcctcaacacatacaccctcccaagactaaaccaggaagaagttgaatctctgaataaaccaataacaggctctgaaattgaggcaataattaatagcttaccaatcaaaaaaagtccaggaccagatggattcatagccaaattccaccagaggtacaaggaggagctggaggccagcatcatcctgataccaaagcctggcagagacacaaccaaaaaagagaattttagaccaatacccctgatgaatattgatgcaaaaatcctcaataaaatactggcaaaccgaatccagcagcacatcaagaagcttatccaccatgatcaagtgggcttcatccctgggatgcaaggctcgttcaacatatgcaaatcaataaacgtaatccaggatataaacagaacgaatgacaaaaaccatatgattatctcaatagatgcagaaaaggcctttgacaaaattcaacaacccttcattctaaaaactctcaataaattaggtattgatgggacgtatctcaaaataataagagctatctatgacaaacccacagccaatatcatactgaatgggcaaaaactggaagcattccctttgaaaactggcacaagacaggggtgccctctctcaccactcctattcaacatagtgttggaagttctggccagggcaatcaggcaggagaaggaaataaagggcattcaattaggacaagaggaagtcaaattgtccctgtttgcagatgacatgattgtatatcgagaaaaccccatcgtctcaacccaaaatctccataagctgataagcaacttcagcaaagtctcaggatacaaaatcaatgtgcaaaaatcacaagcatttttatacaccaataacagacaaacagagagccaaatcatgagtgaactcccattcacaattgcttcaaagagaataaaatacctaggaatccaacttacaagggatgtgaaggatctcttcaaggagaactacaaaccactgctcaaggaaataaaagaggatacaaacaaatggaagaacattccatgctcatgggtaggaagaatcaatatcgtgaaaatggccatactgcccaaggtaatttatagatttaatgccatccccatcaagctaccaatgactttcttcacagaattggaaaaaactactttaaagttcatatggaaccaaaaaagagcccgcattgccaagtcaatcctaagccaaaggaacaaagctggaggcatcacactacctgacttcaaactatactacaaggctacagtaaccaaaacagcatggtactggtaccaaaacagagatatagaccaatggaacagaacggagccctcagaaataatgccacatatctacaaccatctgatctttgacaaacctgacaaaaacaagaaatggggaaatgattccctatttaataaatggtgctgggaaaactggctagccatatgtaggagaaagctgaaactggatcccttccttacaccttatacaaaaattaattcaagatggattaaagacttaaatgttagacctaaaaccataaaaaccctagaagaaaacctaggcaataccattcaggacataggcatgggcaaggacttcatgtctacaacaccaaaagcaatggcaacaaaagccaaaattgacaaatgggatctaattaaactaaagagcttctgcacagcaaaagaaactaccatcacagtgaacaggcaacctacagaatgggagaaaatttttacaatctacccatctgacaaagggctaatatccagaatctacaaagaactcaaacaaatttacaagaaaagaacaaacaaccccatcaacaagtgggtgaaggatatgaacagacacttctcaaaagaagacatttatacagccaaaaggcacatgaaaaaatgctcatcatcactggccatcagagaaatgcaaatcaaaaccacattgagataccatctcataccagttagaatggcgatcattaaaaagtcaggaaacaacagaccaagctccaatgtcttctctgtgaaactttctgagatccaatccttggctctcatagagactaggtgcttaatgaatgctgatgaacagggtgtgccactgattcaagaaatgctggaatcttgggcaagtatttgcaaagttcccaagtatccaaatgccgaagcagtgcggccagaagagcaaacaccccacctgcacccaggtgaaataaacagccatgttgctcacacaaagcttgtttggtggtctcttcacacggacacgcatgaaatttggtgccgtgactcggatcgggggaccgacctcccttgggagaatcaatcccctgtcctcctgctctttgctccgtgagaaagatccacctatgacctcaggtcctcagaccgaccagcccaagaaacattctcaccaatttcaaatccggagcttgctacacttgctggaaatctggccactgggccaaggaacgcccgcagcccgggattcctcctaagccgcgtcccatctgtgtgggaccccacttgaaaattcggacttgttcaactcaccttgggcaagccactcccagagcccctggaactctggcccaaggttctctgactgactccttcccagatcttctcggcttagcggctgaagactcacactgcctgattgcctcggaagccccctagaccatcacgcacgccgagcttcgggtaactctcacagtggaagaaggcaggaatgtcaggcca

SEQ ID NO: 139597 - DNA, 434 bp, Homo sapiens
atggcagcattcccagcagccctaaaccgcccgacgcgagcgcgcgcgcggcgcaggcgcatttctgctcattccgcggcgtcggctgcggctgcagtggtggtggcgggtaccgcacggggtatggtccccgggtccgagggcccactgccgcgccgtgagacgaggtggccgactgggagattgtgattgagggtacggccaacctgggaccctacttcgaggggctccgcaagcactacctgctcccggccatcgagtattttaatggtggtcctcctgctgagacggacttcgggggagactatggggggacccagtacagcctcgtggtgttcaacacagtggactgcgctcccgagtcctacgtacaatgtcacgctcccaccagcagcgcctatgagtttgtcacctggctcgatggcattaagtga

SEQ ID NO: 139598 - DNA, 385 bp, Homo sapiens
caaccggtgaatgaaaaggacagcaacgataaaaacgctgccttggcaccaacatcatggcaccaacgaggccaaaacccagggaaaagctacagacttaagcacggcctcacaacgtataaaatcattcctccaaagtcagagatgcgatgttacgacagagataaatgctggagcccagcactcacacttaattatatttatgggcaaagtaaaaagaatcatgccttagactgattttggacctttgagacttttaccacatacagatggatgaaactacttactgatttaagatcttttgaattttagaaaaaacatatgaatcagatggaacaatctgaatgtgatatgctccatgatgctgtgtgttttggtagtaaga

SEQ ID NO: 139599 - DNA, 499 bp, Homo sapiens
ggtccatccctctcgctgggcagcatctcaggggtgtccgtgaagtcggagatgaagaagcgccgagcccctcctcctccaggttcagggccacctgtgcaagacaaggcatcggaaaaggtatctcttgggtcacagattgatttacagaagaagaagcggcgagcgccagctccccctccaccacagccaccaccaccgagtcccctgatccccaaccgcactgaggataaggaggagaacaggaagagcacgatggtttattgctgtgcgtcattccctactcaggccaagcgcttctgatggacgggcctcttcctgacctcggacctttcccagtgtctcttctgccctggctctgattttcctgttggtcttcctcctttcaggataaaagggctcattgtatacccagaatttacttcctttggggtttacatataaatgcattaataacagagatttgtttgattgaggtttatatttttttgaaggaggc

SEQ ID NO: 139600 - DNA, 521 bp, Homo sapiens
gactctcattacgccaagcttggcacgaggaacagacagtatttggccacccagcatttttgggccgaagaaaaaattcaaacctgttgtccagagaccaggcccaaaagacacatccctgcactctgccctgatggaagccatccactctgcgggagggaaggacagactacgcaagacggcagaacacaccggggagggcaggccagcgaaactgtcctacacggaggcagagggcgaacgatctgcactgctggcagctatccgcgggcacagcggcacctgcagcctgaggaaggctctctctgcaccaaggacggcctccaggttcagcacgggcaccctcagcaacaccgcagacgcaaggcaagccttgatggacgccatccgctccggcacaggggctgcgagactgagaaaggtgcccttgctcgtgtgaatgaacagaggccagagaattgcagaaacccacctgtaatatgcccacaggcgtcactcaaggagtctgcatagccaggaac

SEQ ID NO: 139601 - DNA, 1497 bp, Homo sapiens; identical to SEQ ID NO: 137177

SEQ ID NO: 139602 - DNA, 5355 bp, Homo sapiens
  misc_feature (1)...(5355): n = a,t,c or g
agacgattccagccccttccgtccgccgcgctccgccgctgtcctccgccggcccgcgtgggaggacgatgggtcagcgcggaaaaagtgaatgagggcggcagcggtggcggcggtagccagcgcctgactcggcgggcccggagcaccgcccgcgtcccggcccccggcaccatggacgcgccgcgcgcctcggcggccaagcccccgaccgggaggaagatgaaggctcgtgctcccccacctcctggaaaggctgccactctgcatgtgcacagtgaccagaagcccccccacgatggggccctcgggtcgcagcagaacttggttcgcatgaaggaggcgctgagggccagcaccatggacgtcaccgtggtcctgcctagcgggctggagaagaggagcgtgctcaatgggagccatgcgatgatggacctactggttgaactttgccttcagaaccacctgaatccatcccaccatgcccttgaaattcggtcttcagaaacccaacaacctttgagttttaagccaaatactttgattgggaccctgaatgtgcatactgtgtttctgaaagaaaaagttcctgaagagaaggttaagcctggtccccctaaggtgcctgagaaatctgtgcgtttggtcgtgaattacctgcggacacaaaaagctgttgtgcgtgtgagccctgaggttcctctccagaatattctcccagtcatttgtgcaaagtgtgaggtcagcccagagcacgtggttctcctcagggacaacattgccggagaggagctggagctgtccaagtccctgaacgagctcgggataaaggagctctacgcgtgggacaacagaagagaaacctttaggaaatcatcacttggcaatgatgagacagataaagagaagaaaaaatttctgggatttttcaaagttaataaaagaagcaatagtaagggctgtttaacgacccccaactccccatccatgcactcacgttctcttacgctgggtccatccctctcgctgggcagcatctcaggggtgtccgtgaagtcggagatgaagaagcgccgagcccctcctcctccaggttcagggccacctgtgcaagacaaggcatcggaaaaggtatctcttgggtcacagattgatttacagaagaagaagcggcgagcgccagctccccctccaccacagccaccaccaccgagtcccctgatccccaaccgcactgaggataaggaggagaacaggaagagcacgatggtaagcctgcccctggggtctggcagccactgcagcccggatggagccccgcaggtgctgtcagaggcggaggagaccgtgtcagttggcagctgttttgcgtcggaggacacgaccgaggactcaggagtgatgagttccccctcagacatcgtctctctggactcgcagcaggacagcatgaaatacaaagacaagtgggccacagaccaggaagactgcagtgaccaggacctcgctggaaccccagacctgggtccccagaagagccccttgtgggagaagaatggctctgagaactcacatctgagaactgaaaaagctgtcacagcctcaaatgatgaagaagacctattaattgctggagagttccgtaaaacccttgcagaacttgatgaagacctggaagaaatggaagacagctatgaaacagacaccagctccctcaccagctccatccatggtgcatccaaccactgcccacaggatgccatgatccctcacggcgacacagatgcaatcccagtaacattcataggggaagtttcagatgatcctgtggattcggggttgttttccaatagaaacaacaatgctgggtctttcgactcggagggtgttgccagcaggagagactccctggcgccacttcaagctgagcacagccagccccatgaaaaggcaagggaggaagtacctgccctgcaccccgcttcccatgacgtcggaaaaggaatccgtgtggccttatctaacatctctaaagatgggaatctaatggaaacggcgcccaggagaaacataattttgcgttgaatcttcacacagacaacctaaatgcaaaagtgaaagacaaagtgtatggctgtgctgacggggagaggactcaagccacagagagagtgaattcccaaccggtgaatgaaaaggacagcaacgataaaaacgctgccttggcaccaacatcatggcaccaacgaggccaaaacccagggaaaagctacagacttaagcacggcctcacaacgtataaaatcattcctccaaagtcagagatgcgatgttacgacagagatgtgtccctctccaccggagccattaagattgacgagctggggaacttggtgagtcctcacgccaccggcatcaggatcatttccctgtcttcgtctgtgcctgaagcagaatctcagcccattgggaaagtcagagagttctggaggtgcaactctgtggaaaaacacctgggccgaccctcagagagctctgccaggggacccccctccacccctgtgcccacgcagacgcagaatccagagagcagactccaagcagaccccaagccaatatcgccccagcagaagtctgcccaccatgagggccggaaccccctaggggaggggagaaaccagccccccaccatgggcatgggtcacgtgagggtgccagcagctcacaccacagaagtcacatttctcaagcctcagagaagaacgtccagccagtatgtggcctctgccattgccaagcgcataggagccccaaaagtccatgctgatgtggtgaggccacacggttatgccgagaagggttatgcaggcaaggcgccagtgctggctgcaccacctgtcactgtgaaagatgacaggacatccagcccacactcagagacacaaggatggaaggatggtgcccagtggccctgtgtcactcctcccaacaaccacggggaagatttggcagtgggagcccctcctaggggggaggtcattggcccacacaggaagttgtctactcaggacagacctgctgctatccacagaagctcctgtttctcactggttcagtcttcccagagggatcgtgtttctgtgggacagagctgtggtttcagtggaaagcaaagcacaagtagccaggaggccagctcagcatctgagcccagacgcgcacctgatggtacagacccaccccctccacacacatctgacactcaggcctgcagcagggagctggtcaatggctctgtgcgcgccccaggccacggcgagccttcccaccctccaggagggtctggcacagaaagccacattctcctagaaagagaggaaaagcccagtgtgttctctacagatggaaatgaaacagacagtatttggccacccagcatttttgggccgaagaaaaaattcaaacctgttgtccagagaccagtcccaaaagacacatccctgcactctgccctgatggaagccatccactctgcgggagggaaggacagactacgcaagacggcagaacacaccggggagggcaggccagcgaaactgtcctacacggaggcagagggcgaacgatctgcactgctggcagctatccgcgggcacagcggcacctgcagcctgaggaaggtggcatcctctgcttctgaggagctccagagcttccgagatgccgcactctctgctcagggctcggaaagtcctcttgctagaagaccttggtcttcttgttccccaccagccattcccccaccaccccctccaccctcccaggctctctctgcaccaaggacggcctccaggttcagcacgggcaccctcagcaacaccgcagacgcaaggcaagccttgatggacgccatccgctccggcacaggggctgcgagactgagaaaggtgcccttgctcgtgtgaatgaacagaggccagagaatttgcagaaacccacctgtaatatgcccacaggcgtcactcaaggagtatgcatagccaggaacatcaagttttggtgttacttttcttgtctacaggccaaaatgcgcacagttgtttttcggtgtgttcctgtataacggcttgaaaggaaaggagaagatgctgtgtcgctgccgcagcctcgtgtgccccaaggaaatgtgttttgccctctgaatatccttaagttgcctaataaacgattccttgttggcaggttaatggggactattaaatgctgggagcccagcacttcacacttaattatatttatgggggcaaagtaaaaaggaatcatgccttaggactgattttngggacctttgagacttttaccacatacagatggatgaaactacttactgatttaagatcttttgaattttagaaaaaacatatgaatcagatggaacaatctgaatgtgatatgctccatgatgctgtgtgttttggtagtaagaaaaaaaaattgggaggcttttcaaaggtggctttgttaggtagtaaaactgctggattcttcttcctcaaatatttggggctaacacttcacagagggtcacagtccatgatctgaccaactaagcttttaaaaatcaactattaccacccagaaaacagtcctacgtgatcatgtggccagggcatgcccgagtcctgcaagggtggcgggtggctgaggtcacaccaccactggagtggatgggcagtgccccacatggacagccattccccaggctatgaagtgaccataggccctnccccccacggtgccctgtgtacggagccctgatgaccttcactgggagcccttcctggaatcctgcagagggtcaaggagcagggatgttggatgcccacctgtcaagagttcagatccaaagttgcgctgagagcgtcacaattttggttcagcccttgacgcgtttgtcccaacagctcattggctccctttggtnaggatatcgtggtcgttcgtcaacgatggtgcccagtcaccaatattttataatgaggtcctaacctacagcagttagttttttcatatatatcgtctaaaacattttgttatattggaaaaaaagtaataggaaatcaaggatgtgttgatgaaataaaatgtgtatctgagtgggaaaacaagtatggtgagggtcactttaatgtttcacagcgatctcagatctaggcctcaggtagaatggaagctgttctgcattcactgattaacgttgctaaactcttggtgaggcacgagctaccagccaattgctcttcatcacagctatctgtcttttagtgccgacaaataaaagaaaatcaaatctta

SEQ ID NO: 139603 - DNA, 415 bp, Homo sapiens
cttgacctctcgtggtgcccacgcatcaccgacatggcgctggagtacgtggcctgcgacctgcaccgcctagaggagctcgtgctcgacaggtgtgtacgcatcacggacactggcctcagctatctgtccaccatgtcgtccctccgcagcctctacctgcgatggtgctgccaggtgcaagacttcgggctgaagcacctcctggccctggggagtttgcgcctcctgtctctggcaggctgcccgctgctcaccaccaccgggctgtcgggcctggtgcagctgcaggagctggaggagctggagctgaccaactgccccggggccacccccgagctcttcaagtatttctcgcagcacctgccccgctgcctcgtcattgagtagcgcgaggcccccgccccggtcgcgc

SEQ ID NO: 139604 - DNA, 1750 bp, Homo sapiens
atggtgctggcgcgggtggcgcgccggccggcggggtctgcggaggcccaggcgtccctggcggggaaggcggcgcttccggagcgtgccaggaagatgtcgagcccgggcatcgacggcgaccccaagcctccatgcttgcctcgaaacggtctggtgaagctgccgggccagcccaacggcctgggtgcggccagcatcaccaagggcacgccagccaccaagaaccgcccctgccagccaccacccccacccaccctcccaccacccagcctggctgctccactgtcccgggctgccctggctgggggcccgtgcaccccggcaggtggaccagcctcagccttggcacctgggcacccagcggagcggccgccgctggccacggacgagaagatcctcaatgggctcttctggtatttctcggcctgcgagaagatgtgtgctggcccaggtgtgcaaggcctggcggcgcgtgctgtaccagcccaagttctgggcaggcctcacgccggtgctgcatgccaaggagctctacaacgtgctgcctggtggcgagaaggagttcgtgaacctgcagggttttaccgccagaggcttcgagggcttctgcctgggttggcgtctccgacctggacatctgtgagttcattgacaactatgcgctctccaagaagggtgtcaaagccatgagcctcaagcgctccaccatcacggacgcaggcctcgaggttatgcttgaaacagatgcagggcgtggtgcgtctggagctgtcgggctgcaacgactttcaccgaggccgggctgtggtccagcctgagcgcgcgcatcacctcgctgagcgtgagtgactgcatcaacgtggccgacgacgccatcgcggccatctcgcagctgctgcccaacctggcggagctgagcctgcaggcctaccacgtgacggacacggcgctggcctacttcacggcgcgccagggccacagcacgcacacgctgcgcctgctctcctgctgggagatcaccaaccacggcgtggtcaacgtggtgcacagcctgcccaacctcaccgcgctcagcctctcgggctgctccaaggtcaccgacgacggcgtggagctcgtggccgagaacctgcgcaagctgcgcagccttgacctctcgtggtgcccacgcatcaccgacatggcgctggagtacgtggcctgcgacctgcaccgcctagaggagctcgtgctcgacaggtgtgtacgcatcacggacactggcctcagctatctgtccaccatgtcgtccctccgcagcctctacctgcgatggtgctgccaggtgcaagacttcgggctgaagcacctcctggccctggggagtttgcgcctcctgtctctggcaggtgagacccccgtttctgctctgacgctggcagtgaccacccacccccacttagtccacccgcccaacctgcccggtccttgtgcaaactcacacccggcgcggacacacagtcccgggtccgaggcggaggaggagggaggcgcggcccggccgtccccgcccgagccctgggccgcgcgcactgagccgccctctgaccccgccgcaggctgcccgctgctcaccaccaccgggctgtcgggcctggtgcagctgcaggagctggaggagctggagctgaccaactgccccggggccacccccgagctcttcaagtatttctcgcagcacctgccccgctgcctcgtcattgagtag

SEQ ID NO: 139605 - DNA, 738 bp, Homo sapiens
atgcggcgcctgactcgtcggctggttctgccagtcttcggggtgctctggatcacggtgctgctgttcttctgggtaaccaagaggaagttggaggtgccgacgggacctgaagtgcagacccctaaggtaaatgtgtcaaaatctgatgacacactcaaaatcaacggagtggaagatcacaaaacgatttttgacggagacggaaaaacatatcagaacgttcagcagtttatcgatgaaggcaattatacatccggcgacaaccatacgctgagagaccctcactacgttgaagacaaaggccataaataccttgtattcgaagccaacacgggaacagaaaacggataccaaggcgaagaatctttatttaacaaagcgtactacggcggcggcacgaacttcttccgtaaagaaagccagaagcttcagcagagcgctaaaaaacgcgatgctgagttagcgaacggcgccctcggtatcatagagttaaataatgattacacattgaaaaaagtaatgaagccgctgatcacttcaaacacggtaactgatgaaatcgagcgcgcgaatgttttcaaaatgaacggcaaatggtacttgttcactgattcacgcggttcaaaaatgacgatcgatggtattaactcaaacgatatttacatgcttgggcacccaagtttgggaaccactgatctaatcaataccttcaagtccaatcagttccacctgtag

SEQ ID NO: 139606 - DNA, 903 bp, Homo sapiens
atgcggcgcctgactcgtcggctggttctgccagtcttcggggtgctctggatcacggtgctgctgttcttctgggtaaccaagaggaagttggaggtgccgacgggacctgaagtgcagacccctaagaacgttcagcagtttatcgatgaaggcaattatacatccggcgacaaccatacgctgagagaccctcactacgttgaagacaaaggccataaataccttgtattcgaagccaacacgggaacagaaaacggataccaaggcgaagaatctttatttaacaaagcgtactacggcggcggcacgaacttcttccgtaaagaaagccagaagcttcagcagagcgctaaaaaacgcgatgctgagttagcgaacggcgccctcggtatcatagagttaaataatgattacacattgaaaaaagtaatgaagccgctgatcacttcaaacacggtaactgatgaaatcgagcgcgcgaatgttttcaaaatgaacggcaaatggtacttgttcactgattcacgcggttcaaaaatgacgatcgatggtattaactcaaacgatatttacatgcttggttatgtatcaaactctttaaccggcccttacaagccgctgaacaaaacaggggcttgtgctgcaaatggggtcttgatccaaaccgatgtgacattcactttactctcacttcgcagtggccgcagcccaaggcaacaatacctgcaggaagcggcggcggaagtcaggcatacgctggtaactttgaggcagctggtaacgctctatgatccagtcgatgggtaccgagctcgaattcgtaatcatggtcatagctgtttcctgtgggaaattgttatccgctcacaattccacacaacatacaagccggaagcataa

SEQ ID NO: 139607 - DNA, 1083 bp, Homo sapiens
gggccactgtgaggtgaacagggactggctccagcctctgttgcacagggtcaaagaggactacacgcgggtggtgtgccctgtgatcgatatcattaacctggacaccttcacctacatcgagtctgcctcggagctcagaggggggtttgactggagcctccacttccagtgggagcagctctccccagagcaaaaggctcggcgcctggaccccacggagcccatcaggactcctatcatagctggagggctcttcgtgatcgacaaagcttggtttgattacctggggaaatatgatatggacatggacatctggggtggggagaactttgaaatctccttccgagtgtggatgtgcgggggcagcctagagatcgtcccctgcagccgagtggggcacgtcttccggaagaagcacccctacgttttccctgatggaaatgccaacaccgtatataaagaacaccaagcggacagctgaagtgtggatggatgaatacaagcaatactattacgctgcccggccattcgccctggagaggcccttcgggaatgttgagagcagattggacctgaggaagaatctgcgctgccagagcttcaagtggtacctggagaatatctaccctgaactcagcatccccaaggagtcctccatccagaagggcaatatccgacagagacagaagtgcctgggaatctcaaagggcagaacaaccaagaaaccccaaacctaaagttgagcccctgtgccaaggtcaaaggcgaagatgtcaaagtcccagggtatggggcctttcacattacacccaggcagattccttccagggggagcttgttgccttgttcagttcattcacctttgtttccctgggcgccccagtggtttcttgttcctttgcaagaatgggagattgaccgacagcaatgggaccaaaatggtttcccacattcgaggcacataggcttcccacctctgcctcgatacagatatgttcggtgatggcaccgagaacggcaaggaaatcgtcgtcaacccatgtgagtcctcactcatgagccagcactgagacatggtga

SEQ ID NO: 139608 - DNA, 3275 bp, Homo sapiens
gaccatgcggcgcctgactcgtcggctggttctgccagtcttcggggtgctctggatcacggtgctgctgttcttctgggtaaccaagaggaagttggaggtgccgacgggacctgaagtgcagacccctaagccattcggacgctgactgggacgacctgtgggaccagtttgatgagcggcggtatctgaatgccaaaaagtggcgcgttggtgacgacccctataagcctgtatgcttttcaaccagcgggagagtgagcggatctccagcaatccgggccatcccggacactcgccatctgagaaagaaggcaacaagtaattcactgagcaggcagcaattggcatcacctctaccgagaagctcctactgtggggtcactcctggccccatcgccattggcccactctggacttctggttccttgaggacacccaatcatattgatacagtctttgcccctggtctccctcaaccctggttccacctcaactacctacgagcaatgccctccctctcctctgctcctaaatgcacactgctggtgtattgcacggaccttccacccactagcatcatcatcaccttccacaacgaggcccgctccacgctgctcaggaccatccgcaggccaccagcagtatctacctctcagatggcaatgacagcagccgccctcactccagctcctctgcgcacatattctgtgcacctcagctgcagagcacatcagctggtgccgatgccacagagaaaaaaatatgatgaaacatgggtcagagagcacacgaaacacagcaaaatctcattgtttccatcatgcaggctacacttttcctgtctctcccgccgccgcatggctgtgggcagtgggaagttccaggtgatgggagatctaggggagccatttctcagagtaaggtggttaagaatttggactctggggccagattttcatggctctgcccttaacagtgtattaaaccgctacccctacgcatctgatccgggaaatcatattagtggatgacttcagcaatgaccctgatgactgtaaacagctcatcaagttgcccaaggtgaaatgcttgcgcaataatgaacggcaaggtctggtccggtcccggattcggggcgctgacatcgcccagggcaccactctgactttcctcgacagccactgtgaggtgaacagggactggctccagcctctgttgcacagggtcaaagaggactacacgcgggtggtgtgccctgtgatcgatatcattaacctggacaccttcacctacatcgagtctgcctcggagctcagaggggggtttgactggagcctccacttccagtgggagcagctctccccagagcagaaggctcggcgcctggaccccacggagcccatcaggactcctatcatagctggagggctcttcgtgatcgacaaagcttggtttgattacctggggaaatatgatatggacatggacatctggggtggggagaactttgaaatgatgactgtgcaggtgctgcagcctcgaagatcagaggccctaatctgtacctggaaggtccaccacctcacacgtgaatctacagcacttctgatagcacttgtccaagcccccttcacaggacctcaggctaagaagttgcagcagagcccctgccccgccatgctggcccctgaatatgctccagaggccagcgtgttggtttgcactgtttccctgctcacttataccaccctccaaagtgaaatctccttccgagtgtggatgtgcgggggcagcctagagatcgtcccctgcagccgagtggggcacgtcttccggaagaagcacccctacgttttccctgatggaaatgccaacacgtatataaagaacaccaagcggacagctgaagtgtggatggatgaatacaagcaatactattacgctgcccggccattcgccctggagaggcccttcgggaatgttgagagcagattggacctgaggaagaatctgcgctgccagagcttcaagtggtacctggagaatatctaccctgaactcaggtatccgtcctacctgttggagctttggctggctgaaagcagaggccctcagctggcttggtctggagaagagacagacaatgaccaactggatgagggcttttatgtatatcagagcatccccaaggagtcctccatccagaagggcaatatccgacagagacagaagtgcctggaatctcaaaggcagaacaaccaagaaaccccaaacctaaagttgagcccctgtgccaaggtcaaaggcgaagatgcaaagtcccagggatatagtctaccctcagaggacacgctcaaaggcgaagaagcaaagccgcagtgtgtgggctactggctgtggagcatgcaaggttgtcattgggaactggccaagaagaagaatctcttgccactctcccctgtcaaggtggagctgatctttggttttaatgtctacaacctggaagaagaatctcaggggcaggtatgggccttcacatacacccagcagatcctccaggaggagctgtgcctgtcagtcatcaccttgttccctggcgccccagtggttcttgtcctttgcaagaatggagatgaccgacagcaatggaccaaaactggttcccacatcgagcacatagcatcccacctctgcctcgatacagatatgttcggtgatggcaccgagaacggcaaggaaatcgtcgtcaacccatgtgagtcctcactcatgagccagcactgggacatggtgagctcttgaggacccctgccagaagcagccaagggcccatggggtggtgcttcccctggacccagaaccagactggaaactggggcagcaagcaagcctgcaaccaccctcagacatccctggactggggagggtgggaggcagagccccccccaggacaggagcaacttgtctccaggggaggacagaggaaaacatcacaagccaatgggggctcaaagacaaatccccacatgttctcaaggccgttaagttcccagtcctggccagtcattccctgattgggatctggagacagaaacctaatgggaagtgtttattggtccctttcctacaaaggaagcagtctttggaggccagaaagaaaagccttctttttccctaggccagggctacattgagagatgaagaatggaggttgtttcccaaagaaataaagagaaacttagaagttgtctctggaaaaaaaaaaaaaaaaa

SEQ ID NO: 139609 - DNA, 2442 bp, Homo sapiens
atgcctttgaaaaagaaaggtgatgagcctcaaatggaaaaatacattcaagaaaggtcaatgctagctccccccagctgctctgaccaccgagacacccactcccgctgcatccctcacatccaaaggctcttccagtgccctctgggaccttggttccagggtgagcaacgcaaccaagctcgtggggagggcggagcactccatcctcttcctgtgaccgcagggaccgtggctctcccgggtgctgcccagcctaccccagctcggggcaatgtcactgagagccttcaaggggcaacagtgaagctagtttgcaagaaaacgtctttcatcttcatctattgccagcacccagcacagtgcctggcacttgcctgtgaccatgaatgcattgatctgtgcacacatgtggcatccacatcgctctgcctacgtggttaccaaggcatgaagagaacaatagagagagccctgacagcaaccctggctcagggcacagctgtacccccatttccttcagatgtcccctcacagaaggatgccgctgtcagaggaaagggggatgggagtgaatgggagaggactctgaccatgaagcgctctaatctaaactcggagaaaattctcccagccattcttctgctcacagaatttccgcggcaccagtctccctgcagctttgacaaaccacatcacccaaacacccttggctgctggcttccaactgtattagagacgaggggaggcactaatggccagtcaagtgggaagagagaagctacactgtgtccttgtcccctgcttggactccccatctcagaagaagactgtgtccctccagcactcctgcttccaccgagaggctcttcctccagggctccaactatcatgggccccagtccctcagtttcctccccttggcccttcatccttggggataccagctccccactggtgctaaacttggggtgcctcccatctcttgtttgtccacctacctctgcccacacttctgaagtagccccttctttaaagtctccagcagaaccatctccaccagcccgactgcccagatcccaccagcctgctctgtccagagagatgagacattcggactattcagtgtccgttcatgccatctgctgggatcatgatttctatactctggtcacacattacatgaataatacttcccccatttcctcaaaaagatcctcagacaagctcaacccccatgtgctagtagttcaggattctatgaccatcctaagtttacacaaccacttggccttggctggccaagacatgatggtgtgggagcctaggaagacccttcagagacggcagcaaccagactcctcttctcacagtccccctccagctctggtggagtgtcacccactagagccagagccccttgtggcaggaatcatgtactcattttcaggtctccagggagttgggttaagggacagggctgtggacgaaacaaacaaaagaaatgaaaaacgaacattagaaatgtcaagagtagaagcactttcttcctttgagaattcagaatttgggtgcccaccatcaattaataccagggaaataacaggaaattctctggaggggaatgtgaaaaaaggagtcagtgttcctaattgcactgcccctggaaaacgcacggagaagaaatacagcaaaatacatgagatggtgaaacactctggcaactgcaagcggacagatgggatctgggaggaatatggatggagctggaggctacatatgaaaaaggtttttcccggttttatgttagttaaaggaggggaagatgcagcaccagggacaaaagagataaagagtgtaagcggtatttttcaaagagggaaaaagaagcccagagggagaaaagaaaagaaccggaaaaaaagaggctttgcatttagcaaggaaaccaattttgtttatctcctcattttggtctgcctcattggcaaagttgtagtatggttgaccagtgcctgtgctgagaagcccaagccacatggggaggccacctgcagacattctgggccatcagccccgttgaacttccagccaacgagggtgatgcctatggcatcatttgtccagaacactctggctatctgtgctcccatgtggcaactgaaggctgcaaacatttccctggtcaattcccgcaccagctggcttccagttagcttctgccaatgtcagcactgtcaggagactggaaacagggatgaagatcccagggtccctgcaatgtcaatgagagcacaggcttctggcttccctaaggtggcagcagcaggagcaacagcagcagcagcagtactctccggtgcaatgcttctttgtgccatcccacttatgaccagaaatgggctccttcttcctgtcatactggtgaatggtccatcttga

SEQ ID NO: 139610 - DNA, 1272 bp, Homo sapiens
agccaaatgtgtggaggtctgtgggaagagagagccacctagcatgtccccactgaaccagtcagcagaaggccttccccaggaggcctccaacagatccctgaatgccacagaaacctcagaggcttgggatcccaggaccctccaggcgctcaagatctcccttgccgtggtcctttccgtcatcacactggccacagtcctctccaatgcctttgtactcaccaccatcttactcaccaggaagctccacacccctgccaactacctgattggctccctggccaccaccgacctcttggtttccatcttggtaatgcccatcagcatcgcctataccatcacccacacctggaactttggccaaatcttgtgtgacatctggctgtcctctgacatcacgtgctgcacagcctccatcctgcatctctgtgtcattgctctggacaggtactgggcaatcacagatgccctggaatacagtaaacgcaggacggctggccacgcggccaccatgatcgccattgtctgggccatctccatctgcatctccatccccccgctcttctggcggcaggccaaggcccaggaggagatgtcggactgtctggtgaacacctctcagatctcctacaccatctactccacctgtggggccttctacattccctcggtgttgctcatcatcctatatggccggatctaccgggctgcccggaaccgcatcctgaatccaccctcactctatgggaagcgcttcaccacggcccacctcatcacaggctctgccgggtcctcgctctgctcgctcaactccagcctccatgaggggcactcgcactcggctggctcccctctctttttcaaccacggtaaaaataaagcttgtgacagtggccctgaaacgcaaagaggattctgctgctcgagaaaggaaagccactaaaatcctgggcatcattctgggggcctttatcatttgctggctgcccttcttcgtggtgtctctggtcctccccatctgccgggactcctggtggatccacccggcgctctttgactttttcacctgggtaggctatttaaactccctcatcaatccaataatctacactgtgtttaacgaagagtttcggcaagcttttcagaaaattgtccctttccggaaggcctcctagttttattcggtgatgactcttgttattttttgtgtcctgtaacctcatcgggattgtctttttttttttttaattattttctgagacttggatt

SEQ ID NO: 139611 - DNA, 441 bp, Homo sapiens
ttctgaaaaacaaaaaaaacatttatttctgtaaactgtctgagtgcagagatgttctttacaatcccaatacagtacagatttcttccccaaaacgaaatgagcaaggaaaaacagaaaaagagctatatcaaatgtgctcatgaagaaccaagccaatctcacctttctttaaaaacaaaacaaaacgatccttttgattgtgtggtgcagacgcaggactgaagccacaggcttttggggtgctgtgagcccagggctttgctcagctcacagctagcgcggcgggcagagcaacccttcggcccaagccatcctcgcagcttgcacagaagcttcctgaacctaagggatccgtgcagcaaagccactgccaggtaagttttaaggcaaattttatctcttcttattcagtctgagccggacctaaccttctcacca

SEQ ID NO: 139612 - DNA, 1918 bp, Homo sapiens
agtggaagccgccgccgcgctgggagctcgcaggcgccgcgtagccgtcgccaccgccgccagcccgtgcgccctcggcgcgtacccgccgcgctcccatccccgccgccggccaggggcgcgctcggccgccccggacagtgtcccgctgcggctccgcggcgatggccaccaagatcgacaaagaggcttgccgggcggcgtacaacctggtgcgcgacgacggctcggccgtcatctgggtgactattaaatatgacggctccaccatcgtccccggcgagcagggagcggagtaccagcacttcatccagcagtgcacagatgacgtccggttgtttgccttcgtgcgcttcaccaccggggatgccatgagcaagaggtccaagtttgccctcatcacgtggatcggtgagaacgtcagcgagctgcagcgcgccaaaaccgggacggacgagaccctggtgaaggaggtcgtacagaatttcgctaatgagtatgtgatcagtgatcggaaggagctggaggaagaattcatcaagagccgagctgaagaaggcggtgggagccaattacgacgcccagacggagtaaccccagcccccgccacaccaccccttgccaaagtcatctgcctgctccccgggggagaggaccggccggcctcagctactagcccaccagcccaccagggagaagagaagccatgagaggcagcgcccgccaccctgtgtccacagcccccaccttcccgcttcccttagaaccctgccgtgtcctatctcatgacgctcatgggaacctctttctttgatcttctttttcttttctcccccctcttttttgttctaaagaaaatgtcattttgatgcaaggtcctgcctgccatcagatccgaggtgcctcctgcaagtgaccccttttcctggcatttctcttccacgcgacgaggtctgcctagtgagatctgcatgacctcacgttgctttccagagcccgggcctattttgccatctcagttttcctgggaccctgctttcctggtgtaaccactgagggggcagctggggccagggagctgtgcccggttgcctggcagccttcataagcacacacgtccattccctactaagggcccagacctcctgggtatctgtgccccgggcttccctcatcccacctccatccggagttgcctaagatggcatggtccagcatagggcagggatttgttcgggtggtgagaaggttagttcccggctcagacttgaataagaaggagataaaattttgccttaaaacttacctgggcagtgggtttgctggcacgggtttgaaaaccacctgtttcccaccctctttgaccgaaattttccttgttgacacagaggaaggggcaaaggtctgagcccagagtttgacgggagggagtattttcagggtttcatttcagggggttcccaaagcgaccaagatcgtttagggagagaggcccaaggggtggggcctgggaaattaaaggaaagctggggaacggatccccttaggttcaggaagcttcctgtgcaagcctgccgaggatgggtttgggccgaaggtttgctctgccccgccgcgcctagctgtgagctgagcaaagccctgggctcacagcaccccaaaagcctggtggcttcagtcctgcgtttgcacccacacaatcaaaaggatcgttttgttttgtttttaaagaaaggtgagattggcttggttcttcatgagcacatttgatatagctctttttctgtttttccttgctcatttcgttttggggaagaaatccgttccgtaatggggattgaaaggaacatctctgcactcagacagtttacagaaataaatgttttttttgtttttcagaaaaaaaaaaaaaaaaaaa

SEQ ID NO: 139613 - DNA, 3944 bp, Homo sapiens; identical to SEQ ID NO: 131827
  misc_feature (1)...(3944): n = a,t,c or g

SEQ ID NO: 139614 - DNA, 567 bp, Homo sapiens
atgctggtgattctcaacgacatgaaatgtcgatttccgaaaatgtcggcgcgctcaacaaccatctggccagctgctttccggcgggaaaaagttttctctggcgtgccgccaattaaagagctgctcaaacgcaccgaaaacatattaaaggcattggtagtgcctggcacgttgtttgaagagctggctttaactacatcggcccggtggacggtcacgatgtgctggggcttatcccacgttaaagaacatgcgcgacctgtaaggcccgcagttcctgcatatatgaccaaacaaggtcgtggttatgaaccggcagaaaaagacccgatcatcttccacgccgtgcctaaattcgatccctccagcggttgtttgccgaaagtagcggcggtttgccgagctagtcgaaaatctttggcgactggttgtcgatacggcagcgaaagacaacaagctgatggcgattactccggcgatggtgaaggttccggcatggtcgagttttcacgtaaattcccggatcgctattcgacgtggcaattgccgagcaacacgcgctga

SEQ ID NO: 139615 - DNA, 744 bp, Homo sapiens
atgctgattcttatttcacctgcgaaaacgcttgattaccaaagcccgttgaccaccacgcgctatacgctgccggagctgttagacaattcccagcagttgatccatgaggcgcggaaactgacgcctccgcagattagcacgctgatgcgcatcagcgacaaactggcgggtatcaacgccgctcgctttcatgactggcagccagatttcacgccggcgaatgcccgccaggcgattctggcgtttaaaggtgatgtctacaccggcttgcaggccgaaaccttcagcgaagacgatttcgattttgcccaacagcatttgcgaatgctttccggcttccttatcgtctggaaatggggatccgtcttgagaatgccccgagggaaagatctgtatcaattctggggagatatcatcaccaacaagctgaacgaggcgctcgcagcacaaggcgataatgtggtgattaatctggcgtcagatgagtattttaaatcggtgaagccgaagaaattgaatgccgagattatcaagccggtgttcctcgatgagaagaacggcaaatttaagatcatcagcttctacgctaagaaagcacgcggtctgatgagtcgtttcattattgaaaatcggctgaccaaaccagagcaactgactggttttaatagcgaaggttacttctttgatgaagattcctccagcaatggcgaactggtgtttaaacgctacgagcagcgttaa

SEQ ID NO: 139616 - DNA, 756 bp, Homo sapiens
ctataggattggttctcccgatttcggtgcgcaaacgtcacgcagcatcagctcgttgtctggtaaaccgacgaccgatgcccagactgcacggcctgccaggaatcccgatgcgcccgccgtcattgccacgcgtacggcacgcgggaacagtttttcgtcgacaccggaagagaggatcacccatggcatattgatatggtcattcagacgttgtgaagcacagagaagctcttgttgcggacctttgccataaagcggcatttcaactttgtagaggtcagcgccactgtcgcccagctctttggcggcatcgatgatcgcttgttcgcgatcgaatttatcgccacgacgcggtgggcggacgactggctcaatgatgcttaccagaccgtgtgagtggcacagttcgttgaactctttcaccatatccagacgttgctgcgcatcttcatcactacgccacagcaccagcagttttaaggctttgccaccgtcttgtttgatctgtagcggattgattttgcggtcaataaccacgctatcgaccggaataccgttgccaggaatgaactcatcggcggcgacaatcatggcgcaacttttggcaatcgcgttttgctcaaccacctggcggtagcagaattgttgatctaccagaattcgccggaggcataaggcgagagggccggagcgggtgccccagccggcgggaaagatcatgcgcatggcttcgcgctgatcgagcgccagcat

SEQ ID NO: 139617 - DNA, 1908 bp, Homo sapiens
ttagcggcgtttagccatcatttcgtcgacgatatcgccaagttgttgtaatttcggtgcgcaaacgtcacgcagcatcagctcgttgtctggtaaaccgacgaccgatgcccagactgcacggcctgccaggaatcccgatgcgcccgccgtcattgccacgcgtacggcacgcgggaacagtttttcgtcgacaccggaagagaggatcacccatggcatattgatatggtcattcagacgttgtgaagcacagagaagctcttgttgcggacctttgccataaagcggcatttcaactttgtagaggtcagcgccactgtcgcccagctctttggcggcatcgatgatcgcttgttcgcgatcgaatttatcgccacgacgcggtgggcggacgactggctcaatgatgcttaccagaccgtgtgagtggcacagttcgttgaactctttcaccatatccagacgttgctgcgcatcttcatcactacgccacagcaccagcagttttaaggctttgcaccgtcttgtttgatcccagcctgcgacttgcctggcactgtttcggcgctggtaattacagcgtttgtcgacggcagctttctgcgcattcgtactatgctgcatgcaggtggtgcgggttaattgtgctaatggccggttttctccgggcctaaatcgtggcggtttagattgttcgggctgttctccgttgcgggtggtgtttagtttcttggtgggaactcggacagtacgcgttttactggttgggggcacttcgcttgtgttgggcttgaatttcatgttcgcattgacgtttgctctcgtgttacacctggcggtctgggactcgtgttggttcttgcgcaaggaggtttggagttcttgaagcgcgtggttctttggttcaatgtgactgtgcttctctactgtgcatttaggcggttcttttcctttgctgaaggcgtcaactcgctgatgttcatgaaaaacctgacaatttctggcggattcctgctgctggcaattaccggtccgggcgcgtatagcatcgaccgcctgctgaataaaaagtggtaagcacgcgctatacttaacgataaaaaacgaggaggaagctcctcgtttttgcgcacgctgatcatgcgcaaactcaaaggactggaaccgtttatttccgtttccgtagtgaacccgctgatgctggaaaacggttggacctttgatgacagttttccgggagcaaccggagacacgctctatcaaaatgaatttctgtatcagctttatctccacgccgatccacactacagcggacgaggtactgttcccgtgcgcacgtaatgtcagccccagctcatcgctgcgattcatatgctcaacactattacgttctccggtcgccaccttctttgcctgatgggcaacattttctatcgggcgcacaatctgccattcaaaacaggcgcttgccaacaataccactaatgcacagaggatatacgtcaccaccggggcagcaacaaaccaaagcatggccgccagcaagataaacatcagggtcatcactccacgcgcccgccagcgaacgggtaatgaaggcagtttacccagccagcctttacgcaccaccaggcctttatgaatacgcttactggtacgtccggcgttcaacgctttgtacagctgttccaccgccgcgatctcttcatccgttgtccgggtacgaatcgacatatagccactgatttttccctcgcgcaccatcggtaccgcattggcccgcacccaataatggtcaccatttttgcggcgatttttcacgatgccgctccagggctccccttttttcagggtgaaccacatatccgcaaacgtcgcttttggcatatccgggtgacgcaccat

SEQ ID NO: 139618 - DNA, 473 bp, Homo sapiens
gcttgttagcggcatatcgtttcctgattgatagccgtgataccgagactgacagccgcctcgacggtttgagtgatgcattcagcgtattccgctgtcacagcatcatgaactgcgtcagtgtatgtccgaaggggctgaacccgacgcgcgccatcggccatatcaagtcgatgttgttgcaactcccaccaaacgtcgaaaagttcgctggtgcgtacctcatccagtttgcgctcttccagccacttacgcacaatcgcctgatgttcttcggtgcatttgccgatttcctgcatgcagatcagaccttcccaggccagataaccgctgccgtcaaaggccagtttgttcgacgacggctacggttctttgccattatttcaccctctcgaacattaagttccatactccgtgaccaagacgatgaccacgttgatcaaatttcgtcaccggacgtgatgccggacgcg

SEQ ID NO: 139619 - DNA, 1602 bp, Homo sapiens
atgagttttgatattgccaaatacccgaccctggcactggtcgactccacccaggagttacgactgttgccgaaagagagtttaccgaaactctgcgacgaactgcgccgactatttactcgaccagctctttggaaccgggaaacggcacaggcgggacaccaagacacattccgcgggggcaacgccacaaatccccgggtacacagaaaagggcgggtctgcacccgttcccgtggcgcggcgaaaggcgaatatgacgtattaagcgtcgggcattcatcaacctccatcagtgccggaattggtattgcggttgctgccgaaaaagaaggcaaaaatcgccgcaccgtctgtgtcattggcgatggcgcgattaccgcaggcatggcgtttgaagcgatgaatcacgcgggcgatatccgtcgtgatatgctggtgattgtcaacgacaatgaaatgtcgatttccgaaaatgtcggcgcgctcaacaaccatctggcacagctgctttccggtaagctttactcttcactgcgcgaaggcgggaaaaaagttttctctggcgtgccgccaattaaagagctgctcaaacgcaccgaagaacatattaaaggcatggtagtgcctggcacgttgtttgaagagctgggctttaactacatcggcccggtggacggtcacgatgtgctggggcttatcaccacgctaaagaacatgcgcgacctgaaaggcccgcagttcctgcatatcatgaccaaaaaagtcgtggttatgaaccggcagaaaaagacccgatcacattccacgccggttctcttcgctgtagttcaactggctgcgatagtggcccgacatcaggaagtaacgcacggtttccgcggtcataaccacggccggttgtaccccccggggaaaagcttcccccatcggatggcgggcgccctccccgggtggccccggagacccccggggcagcggcgtaaccgggggaatacccggatcggactagctcctacaggcccccaccagccccccaccccccccccccactcgccccccccaccaaccaccccctccaccccccacccaaaccccagaaagacaggccagatcgtactggtaagcacacattacatgcggcgtgccttcacgggcaaccacggtgagggtttcttcaaactgcagcaggcgagctgccagttgcgcttcacgatcttcacggatgataaccccggcgcctgcacgccagttgtgcctccttcgctcacatttctcgctttacgcgaacacggacaatacacgcgtgtatgcatactgcatgtatggcgcggtattaccctcaaacgccagcatgttgtcccagtcgaaagatgtagataccgtggatgcgcgtttttggagagatccgcatatttcaccgcaccaataccaaccgcgttagccagtttttccagctcgtcggctggcatatccgggttcttttctgccaccagacggccgtgcacgttccagggcttcatccagcagatcggccagtttcactgtaccacccgcgcgggttttgaacggtttgccgtctttacccgagctattcaatga

SEQ ID NO: 139620 - DNA, 1305 bp, Homo sapiens
tcaaactaagaaagtcggaccgctgatctcccgcagattcggcagatcgacaacaggcggcagggcgtgattgatttcagcgatccccagccagtcggtgaggcacgggtcatattccccaagactcatgttgtagaggttggactcggaaatattgctctcttcacagcctttgacgccagttaaacaccagcgcaggtagtcgtgcgtcatcatcacgcagccaatttgcgcgtagcgttctggttcgtgctctttcagccagcgtaacagcgacaccggatgcccggtccacaaggtttgtcgggtcagcgggtagagtttttccgggatgccatcttcctgccagcgacgaacgatttccatcgcccggcggtccgaggacaaaatagcattcccgagcggtttgtcgtttttatccagcaaaaacaagccctttccctgtgcggagatgccgataccgacaatttgttccccgctaacaccagaatgagtaagcagggcgcgaatgacagccatgcagcattgccacagttctgccatatcgcgctctgcccagcctggctcatccacggctttcagcagatcagctccctgcggcacatctttaacaaacatgtcgcgaacctgattccccagtgcgtcgctaaaggctttgcggtcgagatcggtgatgacttccacgcccgcttctttcatgccgtcgatgattttttgctgatcttcagcaaccagtttgcgctgatagttacccgcttcttgtgcagatgaaactagcgcctgctggaactccggacttaagccatcaaacttcgctttgttgatcaccaccagaagcggggaataggcgtggtgcgtcagagaaaggacttctgcacttcgaaaaattttcctgtcttgtcgataagtacaaacgcgccatctattacatcgatcttgctgtacaagatctatgaacgctggcgcgtcgttgatggtgagcacaccttcaaagcaaaccgtttggatctttccacttttaccatcaccagaaaaatactgtggccgttccgatatgggatgcacatcttcaacgcgcgccgcattgcccaatttacgttgcaaccacgcgatttgttctgcttcttttattaacggaacccgacagcgtttaatattccctttactgtccaggcgcttttgattgtcgagaatagttttgatcggatttgcccgaagccgaaaatagagtggaacaccaacctgaagttgaaattcaacctgtttagttttaatgactgtcgcaacggcagttgaaacaggcat

SEQ ID NO: 139621 - DNA, 2974 bp, Homo sapiens
ttagtcctgggttgtttttctctgcgtcttgggggggagttgttctgtgggggggttgttcacggtgtgtggcgcggtgtagtggtctgtggtcttgtggtggcccttttggtggttgttttgtgttcgtcttggtgttgggtgtcgttgtgttgtggggtggagctttggttctgcgcggggccggcgcgtgggcctggggctctggcgcagtagcgctctttttatggtattgtggcccatgttggatgtgtgcagtgcggggccgtgcgtgccaggtgctttgggggagttgttgcttggtttggggggtctttcttgttgctttgtgatttcgggttgcccgtgattatttcgggccggtattttgcctggatctgtttgcactgtgggtatgtggacgggtaagtcgtcagctgtagtaggtcggcgtagcccgtgttgtgggcccaggtagtgagtcagtagatcgcggatagtcagacggtatacgtcatgtcgtgggtcgtgctccggggtgtttcgtagtacatatacgatatagtggtatatccacactgccagatagcacaatgtgaccgtgcgtatatcgtccagctgctttctggatgaccggtgaagcctgctctgcttatccgctggtatctgagtctgcctactttttatggcggcggtactggtgattatgctgatgaccccaggaatggcgatttcggtatacccgtacagggtgagggcaataatctttacaccaacgccccgtaaatcgtcagtagtgcaatcaccaccacgaccacgaacgaggttttcttcgccattgaaaccgctgccttcggcgtctccaccatgaccgatcaaggcatataccacacccgcaagacgaaccggcacccaatccagtacatgaagcacggcatcaatgccggactgcatttccgggtctttgcgatccagatagtggatggactgaatgcggcgaatggtgcgtgacttgccgcggatcagcagcgtttcggtagtcgcgatattgcctttgcggctaatgccttccagcagatcgcctttggtaataccggtggcagagaagatgacgttatcgctgcgcgccatatcgcccaggcgcaatactttaccggcttcgatgcccatcgctttgcagcgtgccagctccgccgcagaaactacgccttccggcgcgccaccaataccgtacagcacgtcaacttcgctgtctggcatacaggtgagaattgaggccgcaacgtcgccgtccggaatagcaaatacgcgtacgccgagttgctgcatttcagcgataacggcatcgtggcgtggtttagccagaatcgttaccgtcagttcgctcaacggtttgccgagcgccgccgctacattgcgcaggttatccgccagcggcaggttcagatcaatggtgcctttggctcccggcccgacaatcagcttctccatatacatatccggcgcattgaggaagcagcctttatcgcctactgccagcaccgccagcgcgttagcctggcccatcgccgtcatgcgcgtgccttcaatcggatcaacagcaatatctaccgcgtcgccgcgaccagtaccgactttttcaccaatgtagagcatcggtgcttcgtcgatttcaccttcaccaatgacgatggtgccgtcaatgttgacctggttgagcataatacgcatggcgtttaccgccgcgccgtccgcggtgtttttatcgccgcgtcctaaccatttgtagccagccagcgccgctgattcgtgacgcgggttggcgcgggtggtggcgcgtccgtgtggtacgtgcgcggtggtttcgtggttatccgtgttggttattgtctgttggtttcgttgtggtattggcgtggcgattttcttgtcgctgggcgtcgcctgtctgtttgttggtggtgcgggtggtgtctggtagcccatggctcttgggtggataccactggggttgaatacgccgcgatgctgctgaccgtgaaataatgagctaaatattttgacgcacagggctgacattgtaatgatgatgatgagttgattataatgatgatgattgatgatgatgtggatgatgatgatgatgatgattgtgtactcatccagtttgcgctcttccagccacttacgcacaatcgcctgatgttcttcggtgcatttgccgatttcctgcatgcagatcagaccttcccaggccagataaccgctgccgtcaaaggccagtttgttcgggtcgataacctcgttaataaaatcatcaacgggtttatcaatctgttcttccgatgtaccttccgggaatcgccatgccaccgaaaatcctaattcctggaattcgtcgatgtgcatttttttacgcagacgacggctacggttctttgccattatttcaccctctcgaacattaagtcccatactccgtgaccaagacgatgaccacgttgttcaaatttcgtcaccggacgtgatgccggacgcggtacgtaatcattgctctctgacaggtttttataaccgtcaatagaagacatcacttcaagcatatgttccgcataaggttcccagtcggtcgccatatggaatacgccccccagctgcagtttgctttttaccagttcggcaaacggcacctgaacgatacggcgtttattatggcgcgctttgtgccacgggtcagggaaaaagagctgcaccatgcgcaatgaattgtcaggaatcattttatgcagcacttcaaccgcatcgtgacacatcacgcgcaggttgcttaaaccttcttcatgcgcagaagccaggcacgcaccaacgcccggtgaatgcacttcaatgccgaggaagtcctgctcagggcgatctttagccattgccaccagcgacgcccccatgccaaaaccaatctcaagcgtcaccggcgcttcacgggcaaaaagcgcgg

SEQ ID NO: 139622 - DNA, 2229 bp, Homo sapiens
gacggataaggcgttcacgccgcatccggcagttgtgcaccaatgctggatacttacatcaacgcccccataatcttcaactccagctcatccggcacttcgttatacgacagcacatgcagccccggcgcaaacaaccttgcataacgcgccagcaaagggcgcagctgcggtggcaccagcagcaccgggtctttccccgccgctttcatctgctctttcacctgtggcatcgtactctggaactggttgagcatattcggatcgaccggcacgctgtcgagcatcactttcccgccctgttgcgcctgattcaccacgttggtcagcagattttccagctcattattcagcgtatacaccgtcagctcctgcttgcgaacgaacggatgggtaatgctgcgccgcaatgccaggcgcacaatcggccgccagcagaatttgatctttcgtcaccgtgctactggcgaccagcaccgtggcgactgggaacaattcgcgcagggagaagccttcggcaccagagcccggaaccttcagcaacgggtgaatggggccgggcaaattctcgaaaaggcgcgcgaaaagccgcactgcgcgactactgtgacacacagcaaggaatcgaagaccaaacacgtagggaggaacaggggggcgaccacaacgaccacgagtgcagtggttcaagccgtggggcatctgaatttgaccgacagcgacacatcgcgttgactgcgacgctggaagccttaatcccgctgctgccgccggaatatgccagcggcgtgatttgggcgcagacctggatgcggcgtaaacgccttatccggcctaccgatccggtacccattgtaggcctgataagatgcgtcaatgcatctgcacttcagcgaccacttgcctgccagcccaactctgcccggactgcggcaccggttgtaggcctgataagacgcgtcaagccgtcgcatcacggccccaagggtcttatgtgctacggaattaaggcggaaacttccgggttcccgcgcttctgcgcctccgcgcccccgaggtgtcgtggacagtcattcatctttctgcccctccaaaagcaaaaacccgacgaagcgggtttttacgtaaaccaggtgaaactgaccgataagccgctttctttagggtatagcgtcgtggacagtcattcatcttactgcccctccaaaagcaaaaagccgccgaagcgggttttacgtaaatcaggtccagacttcccccgatcgccgcacacgacatcaggcacacgacacaaggcaacgcaacgacacacatcacagcgacatgcgatagcacaactacgagcactgcatcgacaatcgacggtgcaagcgacatcgatagggcaaccacgattgcaacaacaggaatcaacgacaacaagggtcgacaacaagttaaacaagcgatgccattgccaccacgactacaacaagggtcgacaatttgcaacaaacaaagacgcaaacagacgaaccaaaccagaatgtgagcgcaggaagcacccgtcggtgtcacgctcgtgggtccgtacgagcccgtcgctccaaggcagtaagtccccatttgaggggccctttgggtgggctggggatttcacccaaaaaggggaaatcggcccaaaaaggagggattttaagtgcatcaagccggtgttcctcgatgagaagaacggcaaatttaagatcatcagcttctacgctaagaaagcacgcggtctgatgagtcgtttcattattgaaaatcggctgaccaaaccagagcaactgactggttttaatagcgaaggttacttctttgatgaagattcctccagcaatggcgaactggtgtttaaacgctacgagcagcgttaagtttgcagtcaatgccggatgcggcgtgaacgccttatcctgcctacaaaagcatgcagattcaatatattgcagaattaacgtaggcctgataagacgcgccagcgtcgcatcaggcgctgaatgccggattgttacccggcatttgtcatttagcggtgatgtttgcctggaccatgaccgccgtgatgatcatgaggagctttcttatggtggcgcggcggtggcggcggtccgtgtaggtgccagcgattgcctcgccattcataatgttgtttccaccagccgtggtcgcgccagtgacctccatcacagtaatagccacgattatcac

SEQ ID NO: 139623 - DNA, 2505 bp, Homo sapiens; identical to SEQ ID NO: 139219

SEQ ID NO: 139624 - DNA, 3348 bp, Homo sapiens
atggctgacactcgccctgaacgtcgctttacgcgcattgatcgtctcccgccctacgtttttaacatcaccgctgaactgaaaatggctgcgcgtcggcgcggcgaagatattatcgatttcagcatgggtaacccggacggtgcgactccgccgcatatcgtcgaaaaattatgtactgtggcccagcgcccggacacgcatggttactccacttcacgcggcattccgcggttacgtcgcgccatttcccgctggtatcaggatcgctacgacgttgaaatcgacccggaatcagaagccatcgtcactattggttcgaaagagggcctggcgcatctgatgctggcgacgctggatcatggtgacacggtgctggtgccgaatccaagttacccgatccatatttatggcgcggtgattgccggggcgcaagtacgctcagtgccgctagtggaaggtgtcaatttcttcaacgaactggagcgaagccttcgtgaaagtttccgagacggaaatgatatcatgggttcccgtggaaccaacgggcaagcgtggaactgggagttctccaacagtagggggctcgggaaagtacaagtgcggtggtcataccggcaatcgcgtccggcaatgcccgtgccgcagcagttctcactcagccagaacggcctggttaacgcagcagataactatcagaacgcgggctggcgcaccttttttgttgatcatcaggtgaagacgctgattagcgaggcgctggtgaataatcgggatttgcgcatggcgacgctgaaagtgcaggaggcacgggcgcaatatcgtctgaccgatgccgaacgctacccacagctcaatggcgagggcagtggcagctggagccgcgatttaccaccagcggttcaacgcaacaatcagaccctgaaagtcgttgagcaaatcgagaaatactacttcacccatgaaaaagacaacatcatgtcggtgtttgccaccgttggttctggccctgggggtaacgggcaaaacgtggcgcgaatgtttatccgcctgaaagactggagcgaacgcgacagtaagaccggcacctcgtttgccattatcgagcgtgcaacgaaggcgtttaaccaaattaaagaagctcgcgttatcgccagcagcccgccagcaattagcggtcttggtagttctgcaggttttgatatggagttgcaggaccacgctggagcgggtcacgatgcgctgatggcagcacgtaatcagttgctggcgctggcggcggaaaacccggagctaacccgtgtgcgccataacggcctcgacgacagtccgcagttgcagattgatatcgaccagcgtaaagctcaggcgctgggcgttgctatcgacgatattaacgacacactgcaaaccgcctggggttcgagctatgtgaatgactttatggatcgcggtcgcgtgaagaaagtctatgtgcaggcagctgcgccgtatcgcatgctgccagatgacatcaatctctggtatgtccgaaataaagatggcggcatggctcgccgcgtctggaacgctataacggttattctgcggttgagattgttggggaacccccccgggggttcgtaccgggacgggaaaggtatatgggacctttttgagaagttccccagcggtgtgctgagtgagggcatttttatgagaggttcggggcaggccgcgagagtggacgacgccaaacaaaggatgttacaaaagggaacatcggcccccagtcacgtaccaaagtcacggcgtgaacttcactgtggaacgacgcgactgcaacagtttttacgcctgaacaaccctaaagcgatctggtgtttgcggatctgcaccttcgcaacggtcatcggcggcaccttgctaagccttccgctgatgtggcaactggcagatatcataatggcctgcatggctattaccaatttgaccgccattttactgctctcgcctgtggttcataccattgccagtgattatctacgccagcgtaaactcggcgtgcgcccggtgtttgatccattgcgttatccggatatcggtcgccagctttctccggacgccccgttgaccaccacgcgctatacgctgccggagctgttagacaattcccagcagttgatccatgaggcgcggaaactgacgcctccgcagattagcacgctgatgcgcatcagcgacaaactggcgggtatcaacgccgctcgctttcatgactggcagccagatttcacgccggcgaatgacggaatagctccgagaataatccgactatacgcggtgaggctaaaagggtaccgattgttcctttcggactaccgcgtttcccggggtaaattcgagccgggggttagcgacgtcccggacacccgggtctcagcggacgaatcacgacccactggcgctaatctacgcattatcagcgcattcgtgggaaacaccgatgccaaacttaggccggagtcgtcgcgaggacccgtctgtatgagtcgaagagaggagtatcccaacttgaaagagccaattttccggacgcgtataacgccagaaaaatcggacgttaacggcgagaagactaccttatgcccaagcccggaagcgggttccgatgcgggcgcgattccggacaccgggattgtctgcatgggcgaatggcagggccaggaggtgctggggatgcgtctgacctggaacaaacgctacattacgctggcaccgattgcgaccgtgcttgggctggcgtttaaactctccgacccggaaaaattactcggcggtgcagaagatttaggcattacctgtgcgctgatcccaaccaccacgccgggcgtggaaattggtcgtcgccacttcccgctgaacgtaccgttccagaacggaccgacgcgcggtaaagatgtcttcgtgccgatcgattacatcatcggcgggccgaaaatggccgggcaaggctggcggatgctggtggagtgcctctcggtaggccgcggcatcaccctgccttccaactcaaccggcggcgtgaaatcggtagcgctggcaaccggcgcgtatgctcacattcgccgtcagttcaaaatctctattggtaagatggaagggattgaagagccgctggcgcgtattgccggtaatgcctacgtgatggatgctgcggcatcgctgattacctacggcattatgctcggcgaaaaacctgccgtgctgtcggctatcgttaagtatcactgtacccaccgcgggcagcagtcgattattgatgcgatggatattaccggcgggcgcaccgattgccatcaccgttga

SEQ ID NO: 139625 - DNA, 2548 bp, Homo sapiens
tcagatgttttcagccagctcttcatcatccaccatgttatgttgatcgtggtcgtaattgttatccattttatacttaacacgcttccaggggcgacacgcagtcatatgtcgcgcgcagattgtcttgcattcatcattgctcgccaagtcgtgcactaagtccagaatgtgctcatcgctctgttttgcaaactccaggctccggtcgcgcacgggacgaactgcggggagtgagccgcgcgggccgccgtagtcagctggagcggtgatccacagatgggtgcccatctcttctttgatttgccctttattgcctaaccagccaaaaccagtcggcactacggaatttttaccaaaatcaaagatgcggtcggtttcctgttccagccaacggttgtggcttagggtgttaaaccatttcattccttttatcctcatcttagcggcgtttagccatcatttcgtcgacgatatcgccaagttgttgtaatttcggtgcgcaaacgtcacgcagcatcagctcgttgtctggtaaaccgacgaccgatgcccagactgcacggcctgccaggaatcccgatgcgcccgccgtcattgccacgcgtacggcacgcgggaacagtttttcgtcgacaccggaagagaggatcacccatggcatattgatatggtcattcagacgttgtgaagcacagagaagctcttgttgcggacctttgccataaagcggcatttcaactttgtagaggtcagcgccactgtcgcccagctctttggcggcatcgatgatcgcttgttcgcgatcgaatttatcgccacgacgcggtgggcggacgactggctcaatgatgcttacaagaccgtgtgagtggcacagttcgttgaactctttcaccatatccagacgtttgcgcatcttcatcactgccatagcctcggatagagatgatattacaggcatgagccgttccagccagacgccaaccaacggcaatcgtttgattttgtcgccgtcttcgccggagagcagccccagatagcgccgctcggtttgccagtgttgttgcagcgatttcaccaggtcggtggtcagtgtggatttaccggtgccatcacacccgaccaccgcaatcagccccggaatgtagttgggcgctgatgtaatcgcttctggcagctgtgcctgcgcctgctggcgaatgtgcaacatcattgcgcagaccagatcctcaaacagcgctacctgctgcggttttaagccgctggcaccgaggaacgattttggtgatttcacaaaccacacttcttctggatcatcaatgtactgtgccagtgaggaaagaccgaactgcacgcttttcgccgtaacatcgatatcttcttcgcggttataacgaatcgcccgacgtaacagcgcctgcgtttcatcgtcgtctgccggaacatcatgatggcggtacagccattcgcttaccgcttcacgcgttggcgcgcaaagcattgaaggcagcagcgtgctgtcgttttccatttttagcaaatgcggtttaccgtcacgcatgaccgccactgaacagtttgctgtaccgtaatcaaaaccaataaacacgaaataatccccatgccggtgaagaaggggcgtgactttagcgaaatgttgccgtcgcgacaaccggaatatgaaagttaagcgcagcgtctgaataacgtttatgctgaaagcggatgaataaggagatgcgatgtataccctgaactggcagccgccgtatgagtgaagaagatcccggaggttctccaggtcgttggatatttggatcacgtttctggaaggcatactggtgaggacctgttggtagactgccagtgtctggtccatcttggataaggtcaggatggggtggagcccaggaatgaagtccaaaccggtgactttctgtttggaggagactgactggatcgtaccgttacggaaatcaacatgtgcagccgtgttatggttagcggcaccggtcacactgcaagatcctgtcgattgatactgaaggtctgaccgctgagcaaatccgccgcggaaaaaccgtagttgttgaaggttgtgaagagaaagtggcaccactggacgtgattcgtctcggcatgaagtttccgtcactcttgcagtaaacaaactattgtctggcaaatcatcaccaaagatcgccttaatcgccagcaatgactggacgcgcgctttcccttcggcactactttgtacagccttctgaataacaggtaacagtgggtcactgatttctatcggatttccctgttcatcaacaccaccgacataacgcatccaacccgcgacgcccagcgccagcagatcgaacttgctgtcatgcgccagatgccagcgaacagaatccaacatccgctgtggcaatttctggctaccatccatcgcaatctgccaggttcgatgacgtaacgccgggttgctatagcgtgcaattaatcggttagcgtaatcttgcaacattcctaaaagtgtagcgaatgccat

SEQ ID NO: 139626 - DNA, 2257 bp, Homo sapiens
atggcaatgaatcaggcgaaaattattgcctccaatgacagtgtcatctctgcggtgaaaacgcgtgactacaaacggctggcgaccatcgctaacaaattacaaagagataccgattttgattatgtggtgattggggaccggcactcgatccgcctttaccatcctaatccggagaaaatgttcaccaaacagggcgcgctggagaaaggggagagctacttcattaccgggaaagggtcaatggggatggcgatgcgcgccaaaacgccaatctttgatgacgatggaaaagtcatcggcgtggtgtcgattggctacctggtgagtaaaatcgatagctggcgggctgagtttttattaccgatggcaggtgtgtttgtcgtgctgttagggattctgatgttgctgtcgtggttcctggccgcgcatatccgtcggcagatgatgggcatggagccaaagcaaatcgcacgcgtggtccgtcagcaagaggcgctgtttagttcggtttatgaagggctgattgcggtggatccgcatggttacattaccgccatcaatcgtaacgcaagaaagatgctggggctgagttcccccggacggcaatggttgggtaaacccattgttgaagtggtcaggcccgccgatttctttaccgaacagattgatgaaaaacgtcaggatgtggtggcgaactttaacggtctgagcgttattgccaaccgggaagctattcgttcaggtgatgatttgctgggggccattatcagctttcgtagtaaagacgaaatttccaccctcaatgcgcaactgacgcaaataaaacaatacgttggagagccttcgtacattgcgacacgagcatctcaattgatgtcgacgctcaattttccccacaactcgcggccgccgaaaagtcctggccctggcgtgggcggtcactgcattgctgttgatccgtggtttatcgtggcacagaacccccagcaggcgcggcttatccgtaccgcgcgcgaagtgaacgatcacaaaccgttctgggttatcgatcaggtgaaagcggcggtggctgattgcctggcggctaccgataaacgcgccagtgaactgaaaatcgcctgctttggtctggcgtttaaaccgaatattgatgacctgcgcgaaagcccggcgatggaaatcgctgaactgatcgcccagtggcatagcggcgaaactctggttgttgagcctaacatccaccagttgccgaaaaaactgaccgggctttgtactctggcgcagcttgacgaggcgctggcaacggcagacgtgctggtgatgctggtcgatcatagtcagttcaaagttatcaatggcgacaatgtccatcagcagagtctggcgctgatgagaaaaattctgataacaggtggtgccgggtttattggctcggcgctggtgcgttatatcatcaacgaaacgagcgacgcggtggtagtggtcgataagctgacctacgccgaacctgatggtaccgatttcaagtacttactggaaaacagcctgcgctacactgacatcgtcggcagctgcaaatctctgccgggcagcgcgacaaaacggttcccgcaaccgtgccagcggcggttccgggctggggctggcgatttgcctgaacattgttgaagcacataatggtcgcattattgctgcccattcgccttttggcgggcattacagtagagttaccgctggaacgggatttacagagagaagtatgaccgagttaccaatcgacgaaaacacaccgcgtattttgatcgtggaagatgaaccgaagctggggcagttgctcattgattatctgcgtgctgcgagctatgcgccgacgcttatcagccacggcgatcaggtactgccgtatgtgcgccagacaccaccggatctgatcctgttagatctgatgctccctggcaccgatggcctgacgctgtgccgggaaattcgtcgtttttctgacattccgatcgtgatggtgacggcaaaaatcgaagagatcgatcgcctgctggggctggagattggcgcagatgattatatctgtaagccgtacagcccacgggaagtggtagcgcgcgtcaaaccattttgcgccgttgcaaccgcagcgcgagtacacctgattaaagactttaaagcagcaaacccgaacggtttcctggtttatttctctgaccacggtgaagaggtttacgacacgccgccgcactaa

SEQ ID NO: 139627 - DNA, 2169 bp, Homo sapiens
  misc_feature (1)...(2169): n = a,t,c or g
agcgacttcggtcgctcttttttttacctgataaaatgaagttaaaggactgcgtcatgattaagaaaatttttgcccttccggtcatcgaacaaatctcccctgtcctctcccgtcgtaaactggatgaactggacctcattgtggtcgatcatccccagcccccctctggagattacaccctacatccgttaccccccataattcgcgcaaaccgaccgaaccgtttccgaattaacgccggctgcacccgcactttcactctcagcaccccgatcaacgtctttcgccacaaaattcttcgaacgcaagagttcccttctctgacgcaccacgcttattccccgcttctggtggtgatcaacaaagcgaagtttgatggcttaagtccggagttccagcaggcgctagtttcatctgcacaagaagcgggtaactatcagcgcaaactggttgctgaagatcagcaaaaaatcatcgacggcatgaaagaagcgggcgtggaagtcatcaccgatctcgaccgcaaagcctttagcgacgcactggggaatcaggttcgcgacatgtttgttaaagatgtgccgcagggagctgatctgctgaaagccgtggatgagccaggctgggcagagcgcgatatggcagaactgtggcaatgctgcatggctgtcattcgcgccctgcttactcattctggtgttagcggggaacaaattgtcggtatcggcatctccgcacagggaaagggcttgttttttgctggataaaaacgacaaaccgatcgggaatgctattttgtcctcggaccgccgggcgatggaaatcgttcgtcgctggcaggaagatggcatcccggaaaaactctacccgctgacccgaccaaccttgtggaccgggcatccggtgtcgctgttacgctggctgaaagagcacgaaccagaacgctacgcgcaaattggctgcgtgatgatgacgcacgactacctgcgctggtgtttaactggcgtcaaaggctgtgaagagagcaatatttccgagtccaacctctacaacatgagtcttggggaatatgacccgtgcctcaccgactggctggggatcgctgaaatcaatcacgccctgccgcctgttgtcggatctgccgaaatctgcggggagatcaccgctcagacagccgccctgaccggtctgaaagcgggtacgcccgttgttggcggcctgtttgatgtggtttccaccgcactctgcgccgggatcgaagacgaatttaccctcaatgcggtgatggggacctgggcggtgaccagcggcataacccgcggtttacgtgacggtgaagcgcatccgtatgtctatggtcgctacgttaacgatggtgaatttatcgttcacgaagccagccctacctcttccggcaacctcgaatggtttaccgcacagtggggagaaatctcgtttgatgagatccatcaggccgttggcagcttgccgaagctgggggcgatctcttttcctgccgttcctgtacggcagcaacgccggaatccagataccangggttctaaggatgcaggctcagagggctggaaaattacaggggccgaagcggaggattttaaccacccaccgggccttaaataccccagcgggaacagatgtaacgaaaacagggcccaccagcgaagttcagaagacctctacgccgcttacaacggggtcccgcgcgcacaaaccgagattaccgccacgtggcgttcaagtgacacggccgggcatcagacaacgattgtttcgacagataaaggctactgtcagttactttcaccgacattacgtattcgtgattacttccagaaacgttggctggatgcgccatttatcgataaagaatttggcgttcaaccgcagcagttgcccgattactggggacttgcggggatcagcagttcaaaggtaccgggtgttgcgggaatcggaccaaaaagcgccacgcagctgctggtcgagtttcagagtctggaagggatatatgagaatctggatgcggttgccgaaaagtggcgcaaaaaattagaaacccataaagagatggcgtttctgtgccgcgatattgcccgcttacaaaccgatttgcatatcgacggcaatttacagcaattgcggttg

SEQ ID NO: 139628 - DNA, 3077 bp, Homo sapiens
ctatagggctctaaagtgatcgccgtggctgataagcgtcggcgcatagctcgcagcacgcagataatcaatgagcaactgccccaggttcggttcatcttccacgatcaaaatacgcggtgtgttttcgtcgattggtaactcggtcatacttctctctgtaaatcccgttccagcggtaactctactgtaatgcttaccccgccaaaaggcgaatgggcagcaataatgcgaccattatgtgcttcaacaatgttcaggcaaatcgccagccccagcccggaaccgccgctggcacggttgcgggaaccttcggtgcgataaaaacgttcaaacaatttttgtagctgatcgtcactgacacctggcgcactgtcggcaaaggtcaggcgcaccgttttgtcgcgctgcccggcagagatttgcaggctgccgccgctgtcagtgtagcgcaggctgttttccagtaagttattgaataactgcattaaacggtcggcgatcgccaaatacggtaatactgtcggtgctttttgataggcgagagcgccttcatcagacatcgacaactgatggagatcgtcaaccagtttggtcagtgtaccgacctccgcctgtaaagacgccaccgtctccggcgtgaatttacgcacgccatcctgaatggcttccagttcaccgcgcagcaccgcggcagtcagttgcgtattgcggcgtatggcccgcatgccgccaatgttgttggactgaccgaccagaccgatctcttctacaccatgaaagccgctctggggctgaaataaaaccgcgcccggcagtgaattttcgctgccgggtggtttttttgctttccattcatcaggagccagccaggttgggtgtgccgggcaatccttatagccaaatttttccaacgtttttgaatagatttcaattttgccgcttggcgtacccagcgcatttttcaccggatcggcgcggaaatcaccataacgaacgtactgttcgttcttctcgctgtggcgcatttcgatcagtttattttgctgccagaaggcattaaacattggcatagtgacgcgttgcgcacgggcacctttctgagcggcatcatagaaaaatttcagccacgccatttcatctttaccttcggtatagatctcttttccgccaggtttgagtaattccgcaagatcggcaaacacgtcaaaatcgttacgcgcttcaaattgcggagcaacagcctgcttcatcggcacaatatgctggttgctgtaatcaccggtcatcgtcaagtcattgcgctcaaacgatgtggtgatcgggaatacgatatctgcgtgtttggctgctgcggtccagtagcattcagaaacgacgatcatcttcggtttctgctctagatgcctgtggccgaggcaggggtcccgggcctcctgatcgcagagtgggccggtccagcctgggcggcactcgcacaccacgctgtccttctccacggagcggcacaggccgtgcttgcacacggtgcaggacttgcagcctggtgacacccccagggactgtggtgggagggccttgaagtcctgcagctcgttgttgatgcgcacctcatggatgcatccgtggaagccgcctagaggccggtccgtgccctggcgcaaggcagagaggccggtggaggtggggatgccatcaatattcacaaaggctttaccgcgtttaaccgacgcttcattttgccggaacttcgcgacgccgtgcgtaccgtcagcgccgatattgtttgcctgcaggaagtgatgggcgcgcacgaagttcatccgctgcatgtggaaaactggcccgatacctcgcactacgagtttctcgccgacactatgtggagcgattttgcctacggtcgcaatgccgtatacccggaagggcatcacggcaacgccgtactgtcgcgttatcccattgaacattatgagaatcgcgatgtttcggtcgatggtgcggaaaagcgcggcgtgctctactgccgcattgtgccgccgatgaccggaaaagcgattcatgtgatgtgcgtacatctgggcctgcgtgaggcgcaccgtcaggcgcagcttgcgatgctcgccgaatgggtgaatgagctgtgaagagtccccaataagcgcctctgcgtggcgactcttcccgctccgtgcgccccccgtcaccaaaatcatcataccgactcgtatcatttggtccgcccgaaacaggttggccagcgtgaataacatcgccagttggttatcgtttttcagcaaccccttgtatctggctttcacgaagccgaactgtcgcttgatgatgcgaaatgggtgctccaccctggcccggatgctggctttcatgtattcgatgttgatggccgttttgttcttgcgtggatgctgtttcaaggttcttaccttgccggggcgctcggcgatcagccagtccacatccacctcggccagctcctcgcgctgtggcgccccttggtagccggcatcggctgagacaaattgctcctctccatgcagcagattacccagctgattgaggtcatgctcgttggccgcggtggtgaccaggctgtgggtcaggccactcttggcatcgacaccaatgtgggccttcatgccaaagtgccactgattgcctttcttggtctgatgcatctccggatcgcgttgctgctctttgttcttggtcgagctgggtgcctcaatgatggtggcatcgaccaaggtgccttgagtcatcatgacgcctgcttcggccagccagcgattgatggtcttgaacaattggcgggccagttgatgctgctccagcaggtggcggaaattcatgatggtggtgcggtccggcaaggcgctatccagggataaccgggcaaacagacgcatggaggcgatttcgtacagagcatcttccatcgcgccatcgctcaggttgtaccaatgctgcatgcagtgaatgcgtagcatggtttccagcggataaggtcgccggccattaccagccttggggtaaaacggctcgatgacttccaccat

SEQ ID NO: 139629 - DNA, 2872 bp, Homo sapiens
  misc_feature (1)...(2872): n = a,t,c or g
tcatcgagtaatctccggatatcgacccataacgggcaatgataaaaggagtaacctgtgaaaaagatgcaatctatcgtactcgcactttccctggttctggtcgctcccatggcagcacagggttagtcccgtcagtaaaattacagataggcgatcgtgataatcgtggctattactgggatggaggtcactggcgcgaccacggctggtggaaacaacattatgaatggcgaggcaatcgctggcacctacacggaccgccgccaccgccgcgccaccataagaaagctcctcatgatcatcacggcggtcatggtccaggcaaacatcaccgctaaatgacaaatgccgggtaacaatccggcattcagcgcctgatgcgacgcttgcgcgtcttatcaggcctacaaattcccgcaccatccgtagtacggataaggcgtttacgcgcatccggcaacggtgccgactgcctgatgcgacgcttgcgcgtcttatcagggctacaaattcgcgnacctggcgctccaatcgcctcgatgggcttctcctccagatacagctgcagatcctgggcgggcacaccgttgagcgtcacctcgtagtgcagattgcactcgttgtcaatggacatccaggccatgccgacggcatgtggattctgtgcatccgtgtgctcctgtcgcttcagcagaatgggttccgccgagtcccgagcatcggccactggacggggcactaggcggccacggatcaggctcgtctcatgctcggtggccacattaacgcccagttcgccggcatacagcgactcgaggaccttgggacccaacttctccacactaccaatggcctggttgaagttgaagctcggcgtcagatcctccagcttggccttccgcttgccctgctcctcaatcaaactgatgttgggcctatcccgggtgttcacgtgctccgtttcgatgttgtaggccagagatccatcggtgttcaagtagacccacgccaaaccgctgctcttggtcgaggattcggcactgtgcggcgccagcagggtctggaagatttcgcagctggctcgggtcacgatgtgtccctggatgcgcagatgtgggtacttcttggactccacggtcagcaggagtttgccacgcgacatcagtcgaagattctgtatggaaatgggcgacgacagctccaggacattgatctcggcaaagggtttgcgcacacgtggaatctcatcgaagatcaactccttccgttcatgactcataaaggtgataccccgatgaccattactccggcaactcatgcaatttcgataaatcctgccacgggtgaacaactttctgtgctgccgtgggctggcgctgaccatatccaaaacgcacttcatctggcggcagcaggctctcgcgaccgtggcgtagatgtcggcgcgaaaaaagagatctatcaactgattaaccagttcaaagccgatggcttgagcatcattctcatccacggctttcagcagatcagctccctgcggcacatctttaacaaacatgtcgcgaacctgattccccagtgcgtcgctaaaggctttgcggtcgagatcggtgatgacttccacgcccgcttctttcatgccgtcgatgattttttgctgatcttcagcaaccagtttgcgctgatagttacccgcttcttgtgcagatgaaactagcgcctgctggaactccggacttaagccatcaaacttcgctttgttgatcaccaccagaagcggggaataggcgtggtgcgtcagagaaaggaacttctgcacttcgaaaaattttgctgaccagacgacgttgatcgggtgttcctgagcgtcgatagtgcgggtttccagcccggtatagacttcggcaaacggcatcgggatcgggttagcgccaaagactttgaatgcggcgatattcatcgggctattgttggtgcggattttcagccctttcaggtcggcgggggttttaaccggtgcgcgcgagttggtgacatcgcgccagccgttttcccagtaggccagtactttcagtcctttaccttcaagtgaggctttcagatcatcaccgactttgccgtcgagcgttttatgcgcgtgagcggtatcgcggaacaggaaagggacatcaagcaagttcatcactggtgataacccggcaaagttattcgagccggacatttccatatcgatggtgccgccacgtacgccgctgatcatcgcctgcgcgttaccgagagtgctgtccgggaacagttttaatttcagctcgcctttggttctctcctgcaataaatcattgaattttttcgccgcaatatgttgcgagtcggtttgtgatgtttcataaccgaaacgtaaagattgtgccgccagagaagatgtgctgaatgcagccaggccagcaatgaataatgcgtaggttacagagcgtaatttcataatattttcctttaagctgctgggctgcgagctactgttctgcaccaatgcggcaggctcgctgcgtccggaagtgggggcaggcagcgatgcggaataccgcgcactgcgttcagttgttgccccataccgcccggtatcgcgcaacgtgttgttcagttcatccagcagtcgctcaagacgaaaagccagctgttgccctgcatctgtaagcaccacttcacgcgtggttctgtccagaaggcgaacaccagtatgattttccagttccttcacactgtgactcactgccgactggctcaggccgatacgctctcctgcacgactaaaacttttctcctgcgctactgtgacgaaaacctttaattgttttaaagaataattcat

SEQ ID NO: 139630 - DNA, 2768 bp, Homo sapiens
atgatcgccattctaagtggcctgagatgctccatcgttgccaactacatttatgccgaaaacaatctcttctggttacgcctgaacaaccctaaagcgatctggtgtttgcggatctgcaccttcgcaacggtcatcggcggcaccttgctaagccttccgctgatgtggcaactggcagatatcataatggcctgcatggctattaccaatttgaccgccattttactgctctcgcctgtggttcataccattgccagtgattatctacgccagcgtaaactcggcgtgcgcccggtgtttgatccattgcgttatccggatatcggtcgccagctttctccggacgccccgttgaccaccacgcgctatacgctgccggagctgttagacaattcccagcagttgatccatgaggcgcggaaactgacgcctccgcagattagcacgctgatgcgcatcagcgacaaactggcgggtatcaacgccgctcgctttcatgactggcagccagatttcacgccggcgaatgcccgccaggcgattctggcgtttaaaggtgatgtctacaccggcttgcaggccgaaaccttcagcgaagacgatttcgattttgcccaacagcatttgcgaatgctttccggcttgtatggcgtactccgcccgctcgatttaatgcagccttatcgtctggaaatggggatccgtcttgagaatgcccgagggaaagatctgtatcacattctgcgggagatatcatcaccaacaagctgaacgaggcgctcgcagcacaaggcgataatgtggtgattaatctggcgtcagatgagtattttaaatcggtgaagccgaagaaattgaatgccgagattatcaagccggtgttcctcgatgagaagaacggcaaatttaagatcatcagcttctacgctaagaaagcacgcggtctgatgagtcgtttcattattgaaaatcggctgaccaaaccagagcaactgactggttttaatagcgaaggttacttctttgatgaagattcctccagcaatggcgaactggtgtttaaacgctacgagcagcgcgctgaatgccggattgttacccggcatttgtcatttagcggtgatgtttgcctggaccatgaccgccgtgatgatcatgaggagctttcttatggtggcgcggcggtggcggcggtccttgttatcgaaccgaacaaactggcctttgacggcagcggttatctggcctgggaaggtctgatctgcatgcaggaaatcggcaaatgcaccgaagaacatcaggcgattgtgcgtaagtggctggaagagcgcaaactggatgagtttccggttgggccctttcccggggaaaaaaccaaccgggggttggttgcgaagcaggcgcccgtcgacacgcccgagaagcgcgcatcggtgatgagcgacaccgtcttgccccacgagatatgctttagcgcggagcgcgacaaaacggtgcgcctgacctttgccgacagtgcgccaggtgtcagtgacgatcagctacaaaaattgtttgaacgtttttatcgcaccgaaggttcccgcaaccgtgccagcggcggttccgggctggggctggcgatttgcctgaacattgttgaagcacataatggtcgcattattgctgcccattcgccttttggcgggcgtggtgataagccccagcacatcgtgaccgtccaccgggccgatgtagttaaagcccagctcttcaaacaacgtgccaggcactaccatgcctttaatatgttcttcggcataccagccgccatattttttatcacgcagtgcgccgttcatggctttgataccgtgatcaaccaacgagtaagcgccaggtcgacccatcgccgcagcaacggaataaaccggcgtttagccatcatttcgtcgacgatatcgccaagttgttgtaatttcggtgcgcaaacgtcacgcagcatcagctcgttgtctggtaaaccgacgaccgatgcccagactgcacggcctgccaggaatcccgatgcgcccgccgtcattgccacgcgtacggcacgcgggaacagtttttcgtcgacaccggaagagaggatcacccatggcatattgatatggtcattcagaccttgtgaagcacagagaagctctttgttgcggacctttgccataaaacggcatttcaacttttgtgaggcgctagtttcatctgcacaagaagcgggtaactatcagcgcaaactggttgctgaagatcagcaaaaaatcatcgacggcatgaaagaagcgggcgtggaagtcatcaccgatctcgaccgcaaagcctttagcgacgcactggggaatcaggttcgcgacatgtttgttaaagatgtgccgcagggagctgatctgctgaaagccgtggatgagccaggctgggcagagcgcgatatggcagaactgtggcaatgctgcatggctgtcattcgcgccctgcttactcattctggtgttagcggggaacaaattgtcggtatcggcatctccgcacagggaaagggcttgtttttgctggataaaaacgacaaaccgctcgggaatgctattttgtcctcggaccgccgggcgatggaaatcgttcgtcgctggcaggaagatggcatcccggaaaaactctacccgctgaccccgacaaaccttgtgggacccgggcatccgggggttgctgttacacctggcctgaaaagaggcacgaacccataa

SEQ ID NO: 139631 - DNA, 523 bp, Homo sapiens
atgaaaatgaagaccgcttaatcaggagtgataacggcattctatattaacaatgggttaattttacacattactatactacagaaaatctaattattgcaaaattgtaaaacagcgatggcttatagtttttttccccgccgtatagtttttttccctgccggttagtcctaattctaaaaataactatggtgaagcccaattcaatatgcatataaaagaatttcatccatcttaaatttttttttaatgttttaatattgaaatcactaacattacttcctcttttggctgcaggaagtaagtacagcctggaattcccctcctactggaaaactggacaacaagcaatacatgattatgatccctaggaaaagagaaacaaatacggtaagccatacctagcccaggagtaagaaatcttaattctaaacctttgcgcttgaaagtaattatcatactgcagtgaagggaaagggaacccagggtctagcaatcttgctgggttgaggagaaagagatt

SEQ ID NO: 139632 - DNA, 2655 bp, Homo sapiens
tcaaaaatactttcgaaaccacgccagatcacgttctctctgcttataagagataacgccgccgtaatggaaggttctgaagtgggccgctactttgctgaccacgaaacgggccgctacgatttccatcaggaaccggcgcatattctgatgaaagtcgaaactcacaaccacccgacggcgatttctccgtggccgggcgcggcgaccggttccggcggtgaaatccgcgatgaaggtgccaccgggcgcggcgcaaagccgaaagcgggtctggttggtttctccgtttccaacctgcgaattcctggcttcgaacagccgtgggaagaagatttcggtaagcctgagcgcattgtcaccgatcccatcgacattgtgttttgttgtctcggcaccacgcggcgagaagcggggagcaaagaggcgtttattcatgccgattacacgctggtaggcttttgccccttctttggtggaaaaatccacgttcaacggctgattaaaccagcttgctgtcagtggttcactttgcagatcgctattgataaagctgaatttaccgctcaaatttttcagggtgctgtcgagtggtttgataaacagactgttattacgcagcgtcacttcacctttcgcggttaccagttcgccgttcagcgggatatcaagatgtaagcgagcattcacatcgccgtcgagctggagttcttgcagggtcgcacgcagagaatctttcagcggtgtctcatcaaagtaagggccaacggctttacccggacctttaatgtcagcgtcaatcagcagtttttcttttgagtagtcagggatcactgcggtaagattactcgcgcgcacgccgcccagattaacgccatcggttttcatccataaaccgtcgttaataaagtccagttcaatatcaaggttagttaatgcaggccagtccgggggcgtccggaagagggcgttaagaaaaccggtttctctctggtaacgctgaaaaagccgcgggagttcaaccacgatgacaacgatccggtggatatcctcatcaccatggcggcggtcgatgccaatactcaccaggaagtgggcatcatgcagatcgtcaaccggctgtccttcaatttccagccagctcattggccatggattgaaagcgcgaatgcagcgttcaagctgtgctgccgaaagtgaccagtcaatacgcgcttcttctttactcaacttctcggcgtaagtgacaagagtttcgtcctgaacttctggtttcgccgtgccgtctgccagttgtttcaacgtggtgataagcccttgtgggccaagctctgccagcttgtcgtacagcgtaccactggtatcttctgcagtaatcgggcaggagagcttatagagcatatcaccggtgtctaaaccgacatccatttgcataatggtcacaccagtttctgcatcacccgcccatagtgagcgttggattggtgcagcaccgcgccagcgtggcagcagtgaaccatgaacgttgatacagccaagacgcggcatctccagcactgctttcggcagaattaaaccataggcgacgacgaccataacatcagcctgcagttcggcgaccagttgctggttttcttgtggacgcagggaaacaggttgaaaaacgggcagacctttttcctcagccagaactttaaccgggctgggcatcagttttttaccgcgtcctgccggtcgctctggtctaagatcctgctgtctattggccagtctggtttgtgactgccactggactgaactctgtccccaagagtggtgtgccatcaactcagctccaatgggttgctgctctgtggagctggtgcttttggtcccaagagggtaggtgctgcatggttctggcataggtcgtgacggcttaccctgggctgaagctccagttcccgtggggtttaggcaggggctggttctggcacaggggttggtagtagcagctgctctgcaggtacgaggctttgagtaggctcctctttgctgtttctttgcttctgttgctcttgctgtgcgctgtcgtgccttgctggttggctcctctgtctgcttcttcggaatgaagggcgagcaggactcaacacgtatcttgtccactgtgtggggtccaactcttttcgcgcttttcgcgctttgtcccctcacggtatagctctctgacctctgggcgctttcggtttcctgtggtcctgtgggaccctgggcccctgtgttcgctctgtcttccccgctttggttgccttccggtgccattcgcctaacggtataggtcgcccggatagtgtgaactcctattctccttgtgccacatattgagcccactccatgaaagcgaataagtgagatactttcagactgagcacggagacagctctctgtggatagtgatgcttcttgtattctggcaagactcttttcacagaacttctcatactcctccatcttcccacagtcacacttattattttcactgacagcagatgcctgaacatcggcctgtttactgcgtttattatcgtggtaccacacataaccagataaccctaaatagcaaatcgcgacgccagccaggccgatcgcggtaatacgtgagaccattttcat

SEQ ID NO: 139633 - DNA, 4017 bp, Homo sapiens
atgaccaaaaaactccatattaaaacctggggctgtcagatgaacgagtacgattcatcgaagatggccgatctgctggatgccacccacggctatcaactgaccgacgtggcggaagaagcggatgtgctgctgctgaacacctgctcaatccgcgagaaggctcaggaaaaagtcttccatcagttgggtcgctggaaactgttaaaagagaagaatccagacctgattatcggcgtcggtggctgcgtggcatcgcaagaaggcgagcacattcgccagcgcgcccactatgtcgatattatttttgggccgcaaacgctgcaccgtctgccggagatgatcaactccgtgcgtggcgaccgcagcccggttgtagatatcagcttcccggaaatcgagaagtttgaccgtctaccggaaccgcgcgccgaagggccgaccgcgtttgtctccatcatggaaggctgcaataaatattgcacctactgcgtggtgccttacacccgtggtgaaaagttgaaccagtttattacttttaccggtcggattcagcgcactgttatgatgtttcccatagtcaacaatgccgccgcccgtaacaactgggcaacgttcggtgttacagtacccactttcgggttgggcatcaggccgcgcggacccagaaacctggcccagctggccaacaacgcgcattgcatccggagaagcaataacaacgtcaaagttcatttcgcctttcttgatctgccctttagcagcttcagcgtttgcaccttgggtaaatacggctacgcgaacggaacggccagtaccgtgcggcagtacagttgcaccacgtacgttctggtcagatttacgagcgtcgatgccgaggttaacagctacgtccacgctttctacgaatttagcagtcgccagctctttcagcagtgcgatagcttcgttgatgtcgtactgtttggttgcatcaactttctcgcggataacacgcatgcgcttggtcagtttagccatttcttagtcctccactaccaggcccatggaacgtgcagtaccttcgatggagcgagtcatcgcttcaatgtcggcaccagtcatgtcggcagctttggtctgcgcgatttcctgcagctgagcgcgggaaattttacccactttgtctttgttcggcttaccggaaccagacttgataccagccgcttttttcagcagaactgctgccggcggggtcttggtaacgaaagtgaaagaacggtcagcgtaaacggtgattactaccggaatcggcagacctttttcgatggaatcagtttttgcgttgaacgctttgcagaattccatgatgtttacgccctgctgacccagagccggacctactggcggactcggttgcacgtccttctcagacgaaccgatactggatggatggccgccgcagtcgtcacaactgatgatacggatgtgcttctccgtatacaccatgttatcggagagctgccaaggtatggttatcgtcgggtatgggcgctgcttcgcagacaggcagaacttgatggtatgcctgcgatcaatgccaaacgtgtttaccggatcatgcgccagaatgcgctgttgcttgagcgaaaacctgctgtaccgccatcgaaacgggcacatacaggcagagtggccgtgaaagaaagcaatcagcgatggtgctctgacgggttcgagttctgctgtgataacggagagagactgcgtgtcacgttcgcgctggactgctgtgatcgtgaggcactgcactgggcggtcactaccggcggcttcaacagtgaaacagtacaggacgtcatgctgggagcggtggaacgccgcttcggcaacgatcttccgtcgtctccagtggagtggctgacggataatggttcatgctaccgggctaatgaaacacgccagttcgcccggatgttgggacttgaaccgaagaacacggcggtgcggagtccggagagtaacggaatagcagagagcttcgtgaaaacgataaagcgtgactacatcagtatcatgcccaaaccagacgggttaacggcagcaaagaaccttgcagaggcgttagagcattgtaacgaatggcgggaccgacacgaaagctatgacatgattacaattcttgctcgaagggagcttcctgaggacaaagatgctatggggacaaggatccccgatattcgttacagcctgtcggatcgtattcgttattactggccgcatagtcggattaaaaatagcgtcgaaacgatgatggtgaatcttgaaggcgtggacatcccactgggcatgattagtcagtatcttcccaaacaatttgaacgcattcagtccggggaattatcagcaataccgcatcagctgattatggataaaatttatgatgttttgcgcgcctatcgctacggctatcaggtggatcaactgcaagccaacggcgtggcggcggcgtgccttaactcgacgcaaacccgcgaacagcaacttgaagtgatgacaggctgccgcaccgggcaaattcgtctgctttatatcgccccggaacgcctgatgctggataactttcttgagcatctggcgcactggaatccggtgttattagccgttgatgaagcgcactgtatctcccaatggggccacgatttccgcccggaatatgccgcgctcgttgcgccagcggttcccgacgctgccgtttatggcgctgaccgccacagccgacgacaccacgcgccaggatatcgtggggatcccaaagaggcgtttattcatgccgattacacgctggtagtggataccgcattaaccgggcggcgactgggcgcgcagcatatgttggtagtcagtgcgatgggtgccaataaagctatccagctgcacccgctggtttgtgcggcatataacgccgacttcgatggtgaccagatggctgttcacgtaccgctgacgctggaagcccagctggaagcgcgtgcgctgatgatgtctaccaacaacatcctgtccccggcgaacggcgaaccaatcatcgttccgtctcaggacgttgtactgggtctgtactacatgacccgtgactgtgttaacgccaaaggcgaaggcatggtgctgactggcccgaaagaagcagaacgtctgtatcgctctggtctggcttctctgcatgcgcgcgttaaagtgcgtatcaccgagtatgaaaaagatgctaacggtgaattagtagcgaaaaccagcctgaaagacacgactgttggccgtgccattctgtggatgattgtaccgaaaggtctgccttactccatcgtcaaccaggcgctgggtaaaaaagcaatctccaaaatgctgaacacctgctaccgcattctcgatttcatgtacaccgggcgttttcgccctatgcagcggcgttttctggtgcattctgttggtatcgatgacatggtcatcccggagaagaaacacgaaatcatctccgaggcagaagcagaagttgctgaaattcaggagcagttccagtctggtctggtgctcagggatcatttgtttgatgagatgttcttgcatagttctgaggaatcaccagcatcaggctcaaacatcacagacattgtgtatcgcttatcatctggcacctgcctctgctccacaatgcctcaaggcttattgacagtagtttatggagtatatcatgacaaaggcaaaggtaagaacgacaacaaacctctctctccggaaacctggcagcatctgaaaggcctggtgaccaggcagctttccggcaaacgtctgttcgttgtcgacgctttctgtggtgcgaacccggatactcgtctttccgtccgtttcatcaccgaagtggcctggcaggcgcattttgtcaaaaacatgtttattcgcccgagcgatgaagaactggcaggtttcaaaccagactcccgggagatgtaccgcgaggaaaccaatagaaaggagaagtga

SEQ ID NO: 139634 - DNA, 2388 bp, Homo sapiens
atgcgcatcatggacattatgctgtcgattccttcgttggtactgacaatggcactggctgccgctctcgggccgagtttgtttaacgccatgctggctattgctattgtgcgaattcccttttatgtgcgcctggcgcgggggcaagcattagttgggggatcttcatccggcacgcagcccgatgctgggcagatcctcaactcgctgattaacagtattttgttaatcgatgacaacctggcgatccattacgccaaccctgccgcgcaacaactgctcgcccaaagctcccgcaaattgtttggtacaccgttaccggaactgttgagctacttctcattaaatatcgagctgatgcaagaaagtctggaggcggggcaaggttttaccgataacgaagtgacgctggtcatcgacgggcgctcgcatatcctttctgtgacggcccagctccccttccagacgtttcagttccacggcattctgaaaaagaacgtcaaaccggtgcaccagatgctgcactcggtcggtcttgatgcgctggcgacagctaacgacatgaaccgtaacgtactctgcacctcgaacccttacgagtcgcagctgcacgcggaagcgtacgagtgggcgaagaagatttctgagcatctgttgcctcgtacccgcgcgtatgcggagatctggctcgaccaggaaaaagtcgccactactgatgaagaaccgatcctcggccagacctacctgccgcgtaaattcaaaaccacggtagtgatcccgccacagaacgatatcgatctgcacgccaacgacatgaacttcgtggcgatcgccgaaaacggcaaactggtgggctttaacctgttggtgggcggtgggctttccatcgaacacggcaacaagaaaacctacgcccgcaccgcgagtgagtttggctatctgccgttggagcatacgctggcggtggccgaagccgtcgtgacaactcagcgtgactgggtggagcgtcgcgcggggatcaaatttgaaccgatccgtccatatgagttcaccggacgaggcgatcgtattggctgggttaagggcattgatgataactggcacctgacgctgtttatcgaaaatggtcgcatccttgattatccggcgcgtccgctgaaaaccggcctgctggagatcgcgaagatccacaaaggcgatttccgcattacggcgaaccagaatctgatcatcgccggtgtaccggaaagcgagaaagcgaagatcgagaagatcgccaaagagagcggcgacaaagcgcacctggttccggtgcgtctggaagaatatgccggattcgtcttcatcaacatggaccccaacgccaccagcgtagaagatcaattacccggcctgggcgcgaaagtgctggaagcctgcccggaagtccacgatctgaaactggcggcccgctttaccacccgcacgcctgccaactggaagaacattgtcgataactatctcgagtgctatcactgtggtccggcgcatccaggtttctccgactccgtacaggttgatcgttactggcacaccatgcacggtaactggacgctgcaatacggtttcgccaaaccgtccgaacagtcgtttaaatttgaagagggtacggatgcggcattccacggtttctggctgtggccgtgcacgatgctgaacgtcaccccgatcaaagggatgatgacggtcatttatgaattcccggtggattctgaaactaccctgcaaaactacgatatttacttcaccaatgaagagttaacggaagatttccgcgcccgcattgataaaatcaaggactggttaggagatggcgtcattgccgacttcgacgacaaacagatcgagcaagcgctggctgatgtcgacgtccccattgttggggttggcggctcgtatcaccttgcagaaagttacccacccgttcattacattgccaccgataactatgcgctggttgaaagcgcatttttgcatttaaaagagaaaggcgttaaccgctttgctttttatggtcttccggaatcaagcggcaaacgttgggccactgagcgcgaatatgcatttcgtcagcttgtcgccgaagaaaagtatcgcggagtggtttatcaggggttagaaaccgcgccagagaactggcaacacgcgcaaaatcggctggcagactggctacaaacgctaccaccgcaaaccgggattattgccgttactgacgcccgagcgcggcatattctgcaagtatgtgaacatctacatattcccgtaccggaaaaattatgcgtgattggagttatgaacagaagaacagtccgctctccgttcagagagtccctaaaaatatcaccctga

SEQ ID NO: 139635 - DNA, 1723 bp, Homo sapiens
  misc_feature (1)...(1723): n = a,t,c or g
atggtaaagcagctaaagctggtgtccttcttattacgacctggtgattctaaacaaggttatgataaacactcctccctgcaggttggactgatgatcccggtctgttcttgcatacggtttcgcaaaccgtccgaacagtcgtttaaatttgaagagggtacggatgcggcattccacggtttctggctgtggccgtgcacgatgctgaacgtcaccccgatcaaagggatgatgacggtcatttatgaattcccggtggattctgaaactaccctgcaaaactacgatatttacttcaccaatgaagagttaaccgacgagcaaaaatcgctgattgagtggtatcgcgatgtgttccgtccggaagatttacgtctggttgaaagcgtacagaaagggctgaaatcgcgtggctatcgtggtcaggggcgcatcatggccgacagtagcggtagtggcatttccgaacatgcctggtgcatgagccgtggagcgcaaggcagacaattctgtaaaggagcgaagatgagtcaggtactgattacaggcgcaacggggctggtgggcggtcacctgctgcggatgttgattaacgaaccgaaagttaacgccattgctgcgccgacgcgacgtccgttgggcgatatgcccggggtgtttaatccccatgatccgcaactgagtgacgcgttggcgcaggtcaccgatcccatcgacattgtgttttgttgtctcggcaccacgcggcgagaagcggggagcaaagaggcgtttattcatgccgattacacgctggtagtggataccgcattaaccgggcggcgactgggcgcgcagcatatgttggtagtcagtgcgatgggtgccaatgcccactcgccgtttttctataaccgcgtcaaaggggagatggaagaagcattaatcgcccagaactggccgaaattgaccattgctcgcccgtcgatgttactgggcgatcgtagcaaacagcggatgaacgaaacgctttttgcgccgcctgttccgtttgttaccaggaattatcctgcttgaggagctcaactggaaaacgtgggctgaaagatggaattcaatgttaggccccagagctgtgaaagtttttttcagtttggccttcttgccaggcacacttgagcctgcacaaattctgttccccacgcagagacagggaaagaaagctgccttgctgttaggactatggaagctagagatttacagcgacaataggcgctctccggaagtaagtacagcctggaattcccctcctactggaaaactggacaacaagcaatacatgattatgatccctaggaaaagagaaacaaatacgactacgaggggggcaagcaacgcgcgattagatccgccaagccgcaagggatataaggggcactacgaaacgatcgggcacgcgcttgagcacgacaaacagagccaggggtcatataacgtagagcacacgatcaagcggcaaacgccccgagtaaggcgatgcaccagtatcattgcgggtatttaccaagaactaggtgaaggagctncggatgaggtttcccgccgtaactggcgggctttttttgccccagaattttccctttcaacatcctgtaaacgaacaactgcgcccgaagcgcagtttacatcgttgactggtgaattctgggtaacaaggacaatggagagactaaccccatga

SEQ ID NO: 139636 - DNA, 1560 bp, Homo sapiens; identical to SEQ ID NO: 125174

SEQ ID NO: 139637 - DNA, 2118 bp, Homo sapiens; identical to SEQ ID NO: 139131

SEQ ID NO: 139638 - DNA, 3960 bp, Homo sapiens
atgattggttcgctactcggagactctagggatccccgataccgagctggaactcaacatattattgaaaaagcgcgcgtacactatgccatcacaaatagcggcgggatctcgcccaacgtggtccaggcgcaggcagaagtgctttatcttatccgcgcccccgaaatgaccgacgtgcagcatatttatgatcgggtcgccaaaatcgccgaaggtgcggcattgatgaccgaaaccacggttgaatgccgcttcgacaaagcctgttccagttatctcccgaatcgcaccttagaaaatgccatgtaccaggccctatcccattttggtaccccggaatggaactccgaagaactggcttttgcgaaacaaattcagcgtacgctcacctccaacgatcggcaaaacagtctgaataatatcgccgcaaccggtggcgaaaacggcaaggtttttgcactacgtcatcgtgaaacggtactggcgaatgaagtcgctccatatgccgccaccgataacgtgcttgcggcatcgactgatgtcggcgacgtcagttggaaactgcctgttgcccagtgtttcagcccctgttttgccgtcggtacaccgctacatacgtggcaactggttagccaggggcgaacatctattgctcataaaggaatgctgctggcggcgaaaaaatgccctgcgcaccagacgttacttggcgtgactggctcagggaaaaccttcaccattgccaatgtcattgctgaccttcagcgcccaaccatgccggaagcctatgtaccgagttccgacactttcattgagaaagatgcctcggttaacgaacatattgagcagatgcgtttgtccgccaccaaagcgatgctggagcggcgtgatgtggttgtggtggcgtctgtttccgcgatttatggtctgggcgatcctgatttatatctcaagatgatgctccatctcacggtcggtatgattatcgatcagcgcgcgattctgcgccgactggcggagctgcaatacgctcgtaatgatcaagcattccagcgtggtactttccgcgttcgtggcgaggtgatagatatcttcccggcagaatcggatgacattgcacttcgcgtggaactgtttgacgaggaagtggaacgattgtcgttatttgacccgctgaccgggcagattgtttccactattccactgaacgccgaccgacgtattcaggccactctgacagcccgtgaccgccaaagacatatcgattctctgaccgaagaagaacagaactggcgtcggcagctggtcaatggcaccgttgacgggcgtattcctgaaggcgagtcaatgcaggagctcagcgatcgcgtcaatgcggcactggaatcttgccgggacttaccgcagggaagccgaccgctgctgaagctattgcgcagtgccacaggagacgcgcaaccagctgattgtctcgatgccaagcggaaacttcggcgattaaacggcgactctactggagaagtcactcggtctaccggtgaaacgtattattgctgcgaccatcgtgaacgataccgtgccacgtttcctgcacgacgttcagtgatcacccaaagcgactcaggcgacgttatccaactcgatgtacaagctatcacggataccgtatatcgtgtccgcatcgtgccagacgcggccttttcttttcgtgctggtcagtatttgatggtagtgatggatgagcgcgacaaacgtccgttctcaatggcttcgacgccggatgaaaaagggtttatcgagctgcatattggcgcttctgaaatcaacctttacgcgaaagcagtcatggaccgcatcctcaaagatcatcaaatcgtggtcgacattccccacggagaagcgtgtgtcagcaccagagaactgaacaccgccttgtcgaagaactccggcgcgttgatgccgtgcagcacggagagacgttgcgcgacggtgcggctctctttctccagcgtaccgcggttgatcgacgggttggcactcaacaaccagaagagactgctcacattagcgattaatggcaggatcagtcccccaacatgcagtatggctatggtcaatggtcaacctcaacagcattgtgatcagttaacgtataacgttgacacccgtcatctgttatcttcgaccgtcaaaggtgtaacgacagaagtggttgcagcagagaaaaaggcatacaccgcaaaggccatcactaccagccagatccccatatccgggattagccccaaaaccgccagcgccagtgcatatcgccggattcggtcgttttgggcagattaccggacgtttactgctctccagcggggtgaaaatggtgattattgccgcgcccgcgatgtcgaccactacattcgtttgcgtcaggcaggcgttgaaaagccggagcgtgaaaccttcgaaggtgcgctgaaaaccgggcgtctggcactggaaagtttaggtctggggccatggtggcggaagttgagcaaaattgcgccgctcataccatctttgcttcgaatacgtcatctgtaccgattggtgatatcgccgcgtcacgccacgcgacctgagcaagttatcggcctgcatttcttcagtccggtggaaaaaatgccgctggtggagattattcctcatgcggggacatcggcgcaaaccatcgctaccacagtaaaactggcgaaaaaacagggtaaaacgccaattgtcgtgcgtgacaaagccggtttttacgtcaatcgcatcttagcgccttacattaatgaagctatccgcatgttgacccaaggtgaacgggtagagcacattgatgccgcgctagtgaaatttggttttccgacaccggtacttccactgaccgcacaacgcacggtaaaacgcgccttaacgctgcttgaccgacacctgcgcgaaacaggcgtggcattcacctccactcaggctgctcgtgactggctgaagctgaaaatggcggggctggagcgtgaagaatttatgatgctgtatctgaaccagcagaaccagttgattgcccacgaaaccctgtttgccggttctattagcagtaccgagatcatcggggtaaaacggtttatgacgtggcttccggcgacgcgttatttatttctgaactcggtcgttaccggaaaatgttacctggttatcgccggaaggggagtttcagaagtggaacgcacagcctgggtgaaggatacggaagcagaaaaactgttccggatccgggaggcggaagaaacaaaaaacaacctgatgcaggtagccagtgagcatattgcgccgcttcaggatgctgcagatctggaaattgcaacggaggaagaaatctcgttgctggaagcatggaaaaagtatcgggttttgaattcccgggcaatggcacttatacttacacctgacttaattcgttcgaataccgcctgtttctgttcttcattcgttctggcgggtcaaacggcgaaagccgctgccgatgacggactgttcccaccgatttttgcccgtgtaaataaagcgggtagcccagtggcggggctgattatcgtcggtattttgatgaccatcttccagctcagcagcatttcaccaaacgcgaccaaagagttcggtctggtttcttccgtctcggtcatctttacactggtgccatatctttacacctgtgcggcgttactgctgctcggacacggtcactttggtaaagcacgcccggcatatctggcagttactaccattgccttcctctactgcatctgggccgtggtggggtccggagcgaaagaggttatgtggtcatttgtcaccctgatggtcatcaccgccatgtatgcgctgaattacaaccggctacataaaaacccgtatcccttagatgcaccaataagcaaagattaa

SEQ ID NO: 139639 - DNA, 2493 bp, Homo sapiens; identical to SEQ ID NO: 132361

SEQ ID NO: 139640 - DNA, 761 bp, Homo sapiens
ggggggtttcttattattttgggggcccgcaaaatggcgcgggtgggccccaacacaagagttccggtgcatttggtggcacgaacacgagcattttccctaatggttataccgcgatttcaaatctaagcgcggggattatgagcacaacaagcggtagtggccagactcgtaatgcagggaagacatcatcagatggtgctcatacccactcgctgtccggcactgctgcaagcgcaggcgcgcatgcacatactgtcggtattggtgctcatacgcactccgttgcgattggttcacatggacacaccatcaccgttaacgctgctggtaacgcggaaaacaccgtcaaaaacatcgcatttaactatattgtgaggcttgcataatggcattcagaatgagtgaacaaccacggaccataaaaatttataatctgctggccggaactaatgaatttattggtgaaggtgatgcatatattccgcctcatacaggtctgccagcaaacagtaccgatattgcaccgccagatattccggctggcttcgtggctgttttcaacagtgatgagtcatcgtggcatctcgttgaagatcatcggggtaaaacggtttatgacgtggcttccggcgacgcgttatttatttctgaactcggtccgttaccggaaaatgttacctggttatcgccggaaggggagtttcagaagtgcagcggcacaactagggtgaagaatgcgaaagcataaacactgttcc

SEQ ID NO: 139641 - DNA, 1282 bp, Homo sapiens
atgccggtatcttcttatgaaagaggacatgcggagaagcgtgtggttcaggagtgctgtggtatcaacttgacatcatctgcgaataccatactgtcggattgtgagcgagtcaacggatactgcgtattgtgccatacgacccgtgcgttggtcactggcaaccatcaccgtaacgctgtgtacgcggaaacaccgtcaaacagtcgcattaactatattgtgagctcgcataatgcattcagaatgagtgaacaaccacggaccataaaagtttataatctgctggccggaactaatgaatttattggtgaaggtgatgcatatattccgcctcatacaggtctgccagcaaacagtaccgatattgcaccgccagatattccggctggcttcgtggctgttttcaacagtgatgagtcatcgtggcatctcgttgaagatcatcggggtaaaacggtttatgacgtggcttccggcaacgcgttatttatttctgaactcggatcgttaccggaaaatgttacctggttatcgccggaaggggagtttcagaagtggaacggcacagcctgggtgaaggatacggaagcagaaaaactgttccggatccgggaggcggaagaaacaaaaaacaacctgatgcaggtagccagtgagcatattgcgccgcttgcaggatgctgcagatctggaaattgcaacggaggaagaaatctcgttgctggaagcatggaaaaagtatcgggtattgctgaaccgtgttgatacctcaactgcacaggatattgaatggccagcactgccgtagggtaaaacatataacttctataattagatgtatctttccatttacggcaaggaagggggcttggaagacgtaaagcatctcacaccgagattattttttatatgtcaggagtctgaagttttgctttggctcttaaaatggtttgccgcgaggttttgaattcccgggcaatggcacttatacttacacctgacttaatttggtcgaataccgcctgtttctgaacttcatttaacacaggtgggcgaccaaaacgtttccctgcgccgcgggctcttactatcccggaatgagtgcgttcaagtaaaaggcctcgttcaaattcaccgactgctgaaattacttgcatcatcatttttcctgttggactggtcaggtcaatgccccccaatgctaagcaatgccctctgatacctgtttcgggcaagtgatccactggtttcctgatatccattggattacaacccaggc

SEQ ID NO: 139642 - DNA, 2304 bp, Homo sapiens
atggtttccccggcacgtccgcaccgctatgtttcccagcgcgcacattcgctgctgaatctgacggaagatgactccggcctggttgtggcgcatcttggcaatggcgcgtcaatctgcgcggttcgcaacggtcagagtgttgatacctcaatgggaatgacgccgctggaaggcttgatgatgggtacccgcagtggcgatgtcgactttggtgcgatgtcctgggtcgccagccaaaccaaccagagcctgggtgacctggaacgcgtagtgaataaagagtcgggattattaggtatttccggtctttcttcggatttacgtgttctggaaaaagcctggcatgaaggtcacgaacgcgcgcaactggcaattaaaacctttgttcaccgaattgcccgtcatattgccggacacgcagcttcattacgtcgcctggatggaattatattcaccggcggaataggagagaattcaagcttaattcgtcgtctggtcatggaacatttggctgtattaggcttagagattgatacagaaatgaataatcgctctaactcctgtggtacggactggaaaaacgaaattaatgtccgcgattttattcaacataactatacaccgtatgaaggcgatgaatctttcctcgccgaagcgacgcctgccaccacggaattgtgggaaaaagtaatggaaggcatccgtatcgaaaatgcaacccacgcgccggttgatttcgataccaatattgccaccacaattaccgctcatgatgcgggatatattaaccagccgctggaaaaaattgttggcctggcaacggatgcgccgttgaaacgtgcgctacacccgttcggtggcattaatatgattaaaagttcattccacgcctatggccgagaaatggacagtgaatttgaatatctgtttaccgatctgcccttccaacgcctgccgccggatcgctattttactgaaatcaccgtcagccatcggatggaggttgtgaaagagcagattgatttgctggcgcaaaaagccgacttctttatagagcacggcctgctggcatcggtcaatattgatggccctacgctcatcgccctgcgtcagcaaccaaaaatcctgcgccagattgagcgtcttccctggctgcgtttcgaactggtggagcatatccgtctgccgaaagattcaacctttgcctcgatgtgtgaatttggcccgctgtggctggatgattttggtaccgggatggcaaatttctctgcgctaagtgaagtgcgttatgactacatcaaaatcgcgcgagaactgtttgtgatgctgcgtcagtcgccggaaggacgcacactcttttctcagcttttacatctaatgaatcgctattgtcgcggggtgattgtcgagggcgtagaaacgccggaagagtggcgtgatgttcagaactcgcccgcattcgccgcacaaggctggtttctttcacgcccgggcaccgatagaaacgctgaatacggcggttctggcgctataagctgcctcattttccgcctggctggactatctttaagactggcacaggaagaatatgaagaagcgaacgatgagcaaagcaagcaaaataaccgctgcgatttcacgggctttcttggtgttgaatcgttcgttcgctatccgtggcgatctgggcgtggtgtggggacggccaacacaggaactggctggcgcagctgggtgccgtggccccatgtcacgccgaagacatcattcttggcaatccaccggatatttccgcaaacactgatgtgcaatttcctacgcgtagaagcaacacctgctctcgcttgcgctgctggaccaaacgggctggctgccggccggcagcagcggtttcacttcattcactaccacgctttcaccacggaacagaatgttaccctgagcgatacctttcgctgcctgcaacaggtctttgtcgtcacgaccaaacaccaccagcagtttgacgtaaggattctgcggatggttaatcatctcaatcaccggggcttttaccgccggatgatcgcgcaggaagtccggccgtttgtcgttggttgcaaagacaatggcattgcgatccggcagttggttatagagtaccgggaagttctgcccacgccagccagaacgcgaaccaaaccacgaggcgacaatggcagaggcttgttgcagcccaacatccggcgcacccgcaaagaccatcggcaaggtgttggtgcggttatcgctcgggtcaaagaatggcaccgggaagtgtga

SEQ ID NO: 139643 - DNA, 2652 bp, Homo sapiens
ttacgccgcgtcttccgcgctgccgcctgtcagacgtaccgccagataaccggcactgaaagagtcgccagctgcggtggtatcgatcactttttctttcggcagtttcaccgccggaacatccactaacccttcgccagcaatggacaccaggcaagaatccgccccgcgtttcaccaccacttctttcacgcccgcgttatgggtgcgcgcaatgacgtcttccaccggctgttgaccccacagcgcgtcttcgtcgtccagcgtcaggaaggcgatatccgtgcattccagcatttgttggtacacctgctgtgtctcttctttgctggcccacaggcgcggacgatagttattgtcgaaaatcacttttccgccgttggcgcggcattcgcgcagcagggaaagcagcttttcgcggctggtcgggcttaagatcgccaggctaatcccgctcaggtagagataagtcgaaattcgccagctcttcgcaaatcgccgcagactgctcactctccagccagaatttggcggcggcttcgttccgccagtagtagaacgtacgctcgccggtggggcgatatagacggaagtgttcagggtatcgccgccgaaaccgcgcttaacgtccgcgcctttctcggaaagctcaatcatgcattcgccaatcacggcaatctttttggacatagtcgtgaacctgatggcgcgcgataatctttgtcgagtccgggcagcatcacttttaaacacaggacatctttgatgataaggcaggttatccagcgaataagcaaccctgaagcaagcatcgagagcttgcaggaacggcgtttttggttgcagtgtgagcgtgcttacacctggcagccgatcgtcagccatcggatggaggttgtgaaagagcagattgatttgctggcgcaaaaagccgacttctttatagagcacggcctgctggcatcggtcaatattgatggccctacgctcatcgccctgcgtcagcaaccaaaaatcctgcgccagattgagcgtcttcgctggctgcgtttcgaactggtggagcatatccgtctgccgaaagatacaacctttgcctcgatgtgtgatttggtaagtaatctctaccgttaaaatacgcgtggtattagtagaacccacggtactcatcacgtcgccctgggtgacaatcaccaggtcaccagacatcaagtaacctttatcgcgcagcagattaaccgcttcgctggcagctgctacgccgtcattagcgctatcaaagtgcaccggcgtaacgccacgatagagagcagtcaggttcagcgtacgttcatggcgcgacatggcgaaaattggcagaccagagctgatacgggaggtcatcagcgcggtacgacccgattcggtcatggtgatgatcgccgtaacgcctttcaagtggttagctgcgttcattgctgacatggcaataggttcttccccttgtcgacctgacggcccacgggtttgaacgtgttgtcggattttccgaccagcaagcgcccggtgacgtttgaggatgcccgggttgtgagacccggggccccaggtggtgccactagcgcgcgggtggataccccgggccggcggcatctgtttcgcccgttcaaccgcctgatgcccgctatcgcaaagttccacatgttgcaccatatcttccagcaatgcgccgataagtttcaggttagcggggttgtcatcaaccgccatgactgtcattgccagcttactttcatcggttacaggcaaaagcgtgttttgtttgtgatgacaaaattccgtcagggcaggcaacaggcgtgtaggtgttaatggtttcagcagacacgcgccgataccatcttgcttgagtttttcagcattgacttgtgcatggcaaggaagtgccagcatcaggaaatcggtcatcgataccgctttcgctaatcgctcatgttgcattgttagcggctcgcggaaggtcaccgcgatgcctaacaacatcatgtcgtaatgcgcgggaggcagcgcggagaacgttgggctataaaccacttccagcggcgtttcacttaaaatatccagcgtgcattgcgctgctgcggagtttggttcgacataggccaggcgcttacctgcgaggcactgggtggatggcccttcgataataatgttcgggttcagatcgagattaatgtggaaccagaaagttgaaccgcgattcggctggctatggaacgaaatatcgccgcccatttcattaaccagtttttgtgtaatcaccagccccagcccggtgccaccatgacggcgggaaatactggcatcagcctgtcggaaggcctggaataagcgcgattgatcgcgttcaggaataccaatgccggtatcccgaatctgcacttcaatctgcactttggtattactcagcgcacgtttttctaccagaatatcaatgttgccattcaggttagtgatgatttgctgtaatcgcagcgggtcgccgatcacgttatcaggcacgtcgcttttaatattgagcgtcagttctaaccctttatcgtgagaagaatgtgccagcagagtaacgacttcatccagcgtgctgcttccagtttcgagaagtcgagacat

SEQ ID NO: 139644 - DNA, 905 bp, Homo sapiens
ttatcttttctgtctttttccaggttcttttctcttgtcgttactttgtctttcccttgtgattttttcctctcttttatttcgtgtttgttcttcctccttttgtcgtgttttttcccacgtttgtctaccttgccggtctgtcgtgttcactgtagatggcccgtccgccttttccatcccttggtcaggaagtatcaacgttctcgccgtgccaggcgccagcatctgctggctaaaactgtccgttcccagcgccgttacgtaatgacggttaatgccgcaggatcgacacctggcagccgatctatcaaacatgcgggcggttaatggccgtggagctattaacggtggtcacgcatcccttgaacccttcgcaacgcctgccgccggatcgctattttactgaaatcaccgtcagcatcggatggaggttgtgaaagagcagattgatttgctggcgcaaaaagccttctctcttgcttatctctcaccatgcgaatccggcctttgatctgggaaaaacctggccgatggtaaaggtccgtctgatggcaccaacttgtgttgtaatgaggggcgtcgaatggtcctgaggcgcaatgttgttgtgcgttgcgaattgatacacctttgtgaatctggggggcgccccctgggcgggttggttgtttgccagctgtgcgcacggcgccctggggggaataccgatttgtgaacaccgtgtgcagcgtgggtggcacaagtggggaacgtggcccttcgggccggattgtctggagaaaatgggtcggctgctgtgtaggcgtgggcgaatgaatgtatgcgaacctgcctgctaaatgtgcgtgcatgggcgtgatacgtgtgcaacgccatcctgcaggatttcgcctccttgccat

SEQ ID NO: 139645 - DNA, 652 bp, Homo sapiens
ccgcaagataatgcgaagaagctccgcccccaccaattatcctcggatgaaggacacacgggcatggggggcacggccaaagatgttgggtttgtaagcatgagaacgtacagctggatatcctctgccttgccaaagcggctcggcggcggcgtaatgccgattggcgcgaccatcgccactgaagaggtgttttcagttctgttgggcaacccattcctgcataccaccacctttggcggcaacccgctggcctgtgcggcggcgctggcgaccatcaatgtgttgctggagcagaacttaccggctcaggctgagcaaaaaggcgatatgttgctggacggtttccgtcaactggcgcgggaatatcccgatctggtacaggaagcgcgtggtaaagggatgttgatggcgattgagtttgttgataacgaaatcggctataactttgccagcgagatgttccgccagcgcgtactggtggccggaacgctcaataacgccaaaacgatccgcattgaaccgccactgacactgaccattgaacagtgtgaactggtgatcaaagcggcgcgtaaggcgctggcggccatgcgagtaagtgtcgaagaagcgtaatatcaaatcggatggcgatacgacgtcgccatcc

SEQ ID NO: 139646 - DNA, 2082 bp, Homo sapiens
atgacttctcccgtcaatgtggacgtcaaactgggcgtcaataaattcaatgtcgatgaagagcatccgcacattgttgtgaaggccgatgctgataaacaggcgctggagctgatggtgaaagcgtgcccagcaggtctgtacaagaagcagaatgacggcagtgtgcgcttcgattacgccggatgtttggagtgcggcaccagtcgcattctggggctggggtcggcgctggaacagtgggaatacccgcgcggcacctttggtgtggagttccgtaacggcagatgttggtttgatacctccgccgccataacccagttcggagaacagacgcttttcaaagacgtgcgggttattggcgatcaggatgttccccgctttcagaatacgcccggaagagcgatagttctgctcaagtttaatcaccttcagcgccggaaaatcctgactcagcagcaccaggttttgcggacgtgcaccgcgccaggagtagatcgactggtcatcgtcacccaccacgcagtttcaccagctcatactggctggtgttggtgtcctgatactcatccaccagcagatagcgaattttgttctgccagcgcttgcggacttcttcattgcgttgcagcagcaacgtcggcaataaaatcagatcatcgaagtcgagaacgttacaggctttcaggcatggatgatcctgccataccattcacaacattaagttcgagatttaccccaagtttaagaactcacaccactatgaatcttaccgaattaaagaatacgccggtttctgagctgatcactctcggcgaaaatatggggctggaaaacctggctcgtatgcgtaagcaggacattatttttgccatcctgaagcagcacgcaaagagtggcgaagatatctttggtgatggcgtactggagatattgcaggatggatttggtttcctccgttccgcagacagctcctacctcgccggtcctgatgacatctacgtttcccctagccaaatccgccgtttcaacctccgcactggtgataccatctctggtaagattcgcccgccgaaagaaggtgaacgctattttgcgctgctgaaagttaacgaagttaacttcgacaaacctgaaaacgcccgcaacaaaatcctctttgagaacttaaccccgctgcacgcaaactctcgtctgcgtatggaacgtggtaacggttctactgaagatttaactgctcgcgtactggatctggcatcacctatcggtcgtggggaaagcgagttgttgcagggcacgctggagccgactaacgagccttatgctattgccaaaatcgccgggatcaaactgtgcgaatcatacaaccgccagtacggacgcgattaccgctcagtcatgccgaccaacctgtacgggccacacgacaacttccacccgagtaattcgcatgtgatcccagcattgctgcgtcgcttccacgaggcgacggcacagaatgcgccggacgtggtggtatggggcagcggtacaccgatgcgcgaatttctgcacgtcgatgatatggcggcggcgagcattcatgtcatggagctggcgcatgaagtctggctggagaacacccagccgatgttgtcgcacattaacgtcggcacgggcgttgactgcactatccgcgagctggcgcaaaccatcgccaaagtggtgggttacaaaggccgggtggtttttgatgccagcaaaccggatggcacgccgcgcaaactgctggatgtgacgcgcctgcatcagcttggctggtatcacgaaatctcagtggaagcggagcgtgccatcacttaccaggtcagagatctggatgcagcgaatgtcgttattaatgctgtattcagttacgtcaccaatgtatggggatgggcatttgaatggtatatggtggtgatgcttttcggttggttctggctggtgtttggcccgtatgccaaaaagcgtttaggtaacgaaccgccagaatgtagctccgcaaggtggatcaatatgatggggtaccgagcaagagttcgtctaaatggtctgcactag

SEQ ID NO: 139647 - DNA, 747 bp, Homo sapiens
atgaagaatgaaaagagaaaaacgggaatagaaccgaaggttttctttccgccgttaataatcgtcggcatactttgttggcttacagtcagagatctggatgcagcgaatgtcgttattaatgctgtattcagttacgtcaccaatgtatggggatgggcatttgaatggtatatggtggtgatgcttttcggttggttctggctggtgtttggcccgtatgccaaaaagcgtttaggtaacgaaccgccagaatttagcaccgccagttggatctttatgatgttcgcctcctgtacgtctgctgccgtactgttctggggatcgattgagatctactactacatctccaccccgccgtttggcttagaaccgaactcgacaggggcgaaagagttggggctggcttacagcttgttccactggggacctctgccgtgggccacttacagcttcctttcagtcgccttcgctacttcttctttgtccgcaaaggtaccagctcgagtctatcatgcttatactaaacgggcactgctggtttgcattgggcaaattatcgccccggcaaaagatgacgttgaatttcgacatcgcataatgaatccgctcactgaagatgagtttcaacaactcatcgcgccgtggatagatatgttctaccttaatcacgcagaacatccctttatgcagaccaaaggtgtcaaagcaaatgatgtgactccaatggaaaaactgttggctggg

SEQ ID NO: 139648 - DNA, 1845 bp, Homo sapiens
tcaattactttctaattgttgctcttctgcacattgtttaatgctgcacgttaagcagtcgttgccgcagttgacgcgcttggcctgctggaagaaattaaaccgcacgacctgaccgttccttacggcgaccgtggcggcgtagttatcgaaccaatgctgaccgaccagtggtacgtgcgtgccgatgtcctggcgaaaccggcggttgaagcggttgagaacggcgacattcagttcgtaccgaagcagtacgaaaacatgtacttctcctggatgcgcgatattcaggactggtgtatctctcgtcagttgtggtggggtcaccgtatcccggcatggtatgacgaagcgggtaacgtttatgttggccgcaacgaagacgaagtgcgtaaagaaaataacctcggtgctgatgttgtcctgcgtcaggacgaagacgttctcgatacctggttctcttctgcgctgtggaccttctctacccttggctggccggaaaataccgacgccctgcgtcagttccacccaaccagcgtgatggtatctggtttcgacatcattttcttctggattgcccgcatgatcatgatgaccatgcacttcatcaaagatgaaaatggcaaaccgcaggtgccgttccacaccgtttacatgaccggcgtcgtcgcgcagctgcgcccacatctcacgggtaggtaacgtaataccgctacgggtaaacagttcgccaactttcgccgttttcggctgccagttcccttgcagatattggctaaaatattcaccactggcatagcgtgactgtttgaacccggcgaaggtttcaccgcgttcgcgtgccagcaacatcgaggtacgcagtgcatgccaggtgatggcatagaaatagagattggtgaaatccagtgcttccggcgaaccataagcgatgccttctcgcgccagatagccgtgtaaattcatctgccccagtccgatggcgtgcgaggcggcatttccggcttcgatggacggcacgctgcggatatgactcatatctgatactgccgttaaaccgcgcacggcagtctctaccgtgcgggcaaaatcgggggaatccatggtgtgcgcaatattcaacgaacctaaattgcaggaaatatcatggcctgtgcgggtatagtcgagattctcgtcatactctgaggcgctgttaaccgtgtcttcatacatgatgttcgctccaacgcctaaacagaacggtggcatcacgtcatagaaaaagccgttgtagtgatctggcgcaaacagcaccaccagttcaggggagaatgccgcaatacgctcgcgggcgctggcaatcacgccattgacctcatcgagcacctcttgcgccgggtcgacataccccaccagcggcgagtgggaaagacagtgaagataagcgtgcatatcaggcttttcgacagaaacgtcggcatcagggcgggtcagcgtcatcaccgacgccagtttattcagggtcttgcccagggtttgcggaatggcggtggcggcaacaaagcgatccgggcgcatcaccaccagcgaagcattgtgttgcgcgaaccagctacgcaggcgaccttgcgtatcgcccacgcgtagtacgccgtcgtggttatcctgtgcggtatgaatttgcacttccggcaccacctgaatgaagcgtgtgcccaacgcgcgccactgctggatttgctcgtcgctcatcccccacagtggattgcatccccagccaattaccgcgaagttcgcgccgatcgcgttatcgagcagcgtcacgtcgccgttttccagcgtgactttcggctgaataaacat

SEQ ID NO: 139649 - DNA, 705 bp, Homo sapiens
tcagccaagctcctctgtgctcagggcactgacttcctctaggcagctgacaatcgcagacggaacgcttttggaggcctctctccgccaagcttccaggatcttggaaatttctgctggattgctgggactcaagtcacaaagagcatacacggctgctaactgtataccccatggtatatctcccacggcgtccctcccacgacacatgggaattttttttcctgttccagcgcctttatcgaacgcgtggcagatatcagccagcatatcattgaacagtgtgaactggtgatcaaaagcggcgcgtaagggctggcggcatgcgagtaagtgtcgaagaggcgtaatatcaaatcggatggcgatacgacgtcgccatccgatgcccgcaggcatcatccgctccggcgttaacagcacgctttcactgccgtcatcggtttccgcacacaacagcatgcattccgacgtttcaccacgcattttcgctttttgcagattgcataagaccaccaccgttttccccatcagctcttcttcgctgtagtacggcaccaggctggtcacggtttgcagcgttttttgccccacatcaacctgtacgatgtacagcttgtcggcgttttcatggcgtttcacttccacaatctttccgacgcgcatttccagacgtgcaaaatcagcgtaagccacggtttccat

SEQ ID NO: 139650 - DNA, 900 bp, Homo sapiens
atgtgccatgttggtgtgctgcacccactaactcgtcatttacattggtacccgatatcgactgtatactgtctacgcacaccaagaagaacaaagatgggtgactgccacgctgccctggcctttatcggtcgacctctacgacgccaaggatcaacgccggcgcattatccaccctttaataagaaaagagacaagtactttattacacttgacgcaaatattacacttttcgtggccacgatattcgtgttctctattccaccgccagatatagaaagacaaagcacaaacgctactgataccttcgtttcggtaccggtttcgtccactggcttagaatatcccgatctggtacaggaagcgcgtggtaaagggatgttgatggcgattgagtttgttgataacgaaatcggctataactttgccagcgagatgttccgccagcgcgtactggtggccggaacgctcaataacgccaaaacgatccgcattgaaccgccactgacactgaccattgaacagtgtgaactggtgatcaaagcggcgcgtaaggcgctggcggccatgcgagcatcatccgctccggcgttaacagcacgctttcactgccgtcatcggtttccgcacacaacagcatgcattccgacgtatcaccacgcattttcgctttttgcagattgcataagaccaccaccgttaaccccatcagatcttcttcgctgtagtacggcagccaggctggtcacggtttgcagagtaattagccccaaatcaaactgtacgatgtacagcttgtcggagtttacatcggcgatatcagcatatcccaacaacatcttatccagacagacgcaattatcccaagaccgtgacacacactccgccgtacagccagcg

SEQ ID NO: 139651 - DNA, 1425 bp, Homo sapiens; identical to SEQ ID NO: 131751

SEQ ID NO: 139652 - DNA, 5148 bp, Homo sapiens
ctatggaaaccgtgaacaaagggctgtctccagccacacaaacacctgggtgaatcgggcactggccagaggctggagcagcctgggatacaggtggtgggtgagtgcctggaccccttccagacgtttcatatcccagttgatgtcacgaccggtagacgccagcgccgccaaggtgaagcgcagcgcgtcagtaccgtgcggctcaataccgttcggaaactgcttctcggtgcgcttacggattttgtccgccagctgcggctgcatcatattgccggtacgtttttccagcagttctggcagcgaaataccgtcaaccatatccagtgggtcgataacgttacccttggatttggacatcttctggccttcgtcatcacgaatcaggccggtcatgtaaacggtgtggaacggcacctgcggtttgccattttcatctttgatgaagtgcatggtcatcatgatcatgcgggcaatccagaagaaaatgatgtcgaaaccagataccatcacgctggttgggtggaactgacgcagggcgtcggtattttccggccagccaagggtagagaaggtccacagcgcagaagagaaccaggtatcgagaacgtcttcgtcctgacgcaggacaacatcagcaccgaggttattttctttacgcacttcgtcttcgttgcggccaacataaacgttacccgcttcgtcataccatgccgggatacggtgaccccaccacaactgacgagagatacaccagtcctgaatatcgcgcatccaggagaagtacatgttttcgtactgcttcggtacgaactgaatgtcgccgttctcaaccgcttcaaccgccggtttcgccaggacatcggcacgcacgtaccactggtcggtcagcattggttcgataactacgccgccacggtcgccgtaagatacggtcaggtcgtgcaggttaatttcttccagcaggccaagcgcgtcaactgcggcgacgactgctttacgtgcagctaaacgctccagtttctggaactctgcagggatttcgctgcagtaaacgtcagattcgttacctttggtatcgaacacctgggcgctttcacggatatcgtcatcaaaggtcaggatgttgatcatcggcaggggttgacgtttacccacttcatagtcgttaaagtcgtgcgtcggagcgattttcacgcagccgtgtcctgtttccatgtcgacgccttcgtcgccaaccatcggcatacgacggtcaatcagccgtagcgagacatatttgccaatccgatctttgtaacactgatcttccgggttaacggctaccagtatcgcccggcaaggttcctggcagcgcagcggcatcccccgttcgttcttaacccctgacagggtcagagtacgcacgttcggcagtgatttgatttcatcgctcagcggaatggtatcgcagacaacgacttcatcaattacagagttacgcaggttgttcgccgcgttgccagagaagatcgggtgagtcgcgtacgcaaatacacgtttagcaccacgttctttcagagcttcagcagctttacacagcgtaccgccagtgtcgatcatatcatcgaccagtacgcagtcacgacttgcaacgtcaccgatgatatgcatcacctgtgaaacgttcgcacgcggacgacgtttgtcgatgattgccatatcggtatcgttcagcagcttagcgatagcgcgggcacgcacaacgccgccgatgtccggagaaaccacaattgggttatccagattcagctgcagcatgtcttccagcaggatcgggctaccaaatacgttatcaaccggaacgtcgaagaaaccctgaatctgttcagcgtgcagatccactgtcagcacacggtcaacaccgacgctggagaggaagtctgcaaccactttcgcagtgattggtacacgagcggaacggacgcgacggtcctggcgcgcatagccaaagtaggggataacagcggtgatacgacctgcggaagcacgacgcagggcatcaaccataacgactaattccatcaggttgtcgttagtaggggcacaagtggactggatgatgaaaatatcaccaccgcgtacattttcattaatttgtacgctgacttcgccatcgctaaagcgacctacagcggcgtcgccgagtgaagtgtacaggcggttggcaatacgttgtgctagttccggggtggcgtgaccagcaaaaagcatgtcgatttcgtcgtagttcagggtccacgggaagaatgcgttctcccactgcataaaaccggcgcccatgctgctgccgtcgtctccggtcacaagatcagtcaagcccacgcaatgcgcttctgcgccgtcgaaacgaccaaacttgacgctactgccatcaatcactttgatgccgcctttgccggtcaccgatttgaagctcggctgcattgcgccctgctccagcgactgtttttccttcatcactttttccatcagctgtgcgaccaggctttcggtaaactggccttccggcagctgggcaatgatggtttcgcggatgcgctggctttcggttttgtcggctggcacgctggcgggcacggacgccgttaccgggatcgattcatcacattcggtgatggtaaaacccagtagatccgccacttcacgggcttccggggtaataatgctggcgcgcagaaccacggacattgcctgttcgccgcgcgcgtgtgcttcacgaatatcattcgctgcttcctcctgtttggtgagagatgccagataatccaccagttgctgcacgctttgcgggtcgtggctgtttagctcgaacatcggctcttcgaaacccgtctcaagcaataactttcgcgttgcggcgacgtcagcatctggcatgtccgttttactgatgacggcgatttgccgtttgctgacgccaatatccagcaacccggcaggcaaccgactttccgggtcatttgcgccatggacatagatcagcatgtctacatcctgtagcgtggtaattaaggcgtgataccagcggggatggttaaaatattcacccggcgtatcaatatcgcccttatcattaaattccacggcctgtgtttttctggcgagggtagacctcccccatgaagaatatctctccggggaattccagacacggaaatgcagacgggccatcgtcaccggatcgcttagcagcaccaggcgacgatcgcgattcagcttatctggcgtctcgttcagcgcctgttcaacgtggcggtcacgggcgatttccagcaccttactggcgcggtgacgcgcggtcgccattgcggttgccagagcgttaaatgacgggttaaacactgcgtgcataaagccatcatcaagggagcgttgacgattcatctcaaggaaccgatcggtatcaaccagcacctgcggcggcgaatactcttccgggatcaggaacagtttccagcgtttggtgcgcagaccaacggtggcacggctggaaatcaccgaaacaaacggtgacaggatcaacgagaagacaatcggtgccagccagaacaggaaacgcagatccagccacgccatcccaacagcccacactaaccctaacagcagcggtttgtatgggcaatcgatactcttgtagagctgccaaaggctggcaccaaagtactcttcagcagaaagcgagcttaagccaccgagatccagccattcatttggcgtcagcacgccctgcgcgtaaagcgtcatcacatagtcgtcgtaatgctcttcttcgtcgcacggcaccatattccacagaatacgcttaccggcgagacgcacggcggtacgataaaattcgtcaagcagcagtatatgctgggtggagccacaatcttcgccccccaggctgccgctttcattatgacggaagcggttttcatcaatcaggaagaagctgacttccacacccagcgaggcggcccagttttccagcaggctacatttacgttgtagcaattggcgctcttcgctatcgagccaggattgatgacagacccagatatccaggtcagaggaacaactttgccctacggacgaggtgctgcccatggtgtatacaccagtaattggaagctcacctttcggcggatcctgtactgacattccacgatacagttcaagctcgttcaggtagtggcgttgagtttcatcaggcgtgtaaaggcaaatgccgtttaataatggatcgtattcgtcatattctggctgcgttgcacgattgcccgaaaataggacgtcgtccgggtcggcagccacaccgcgtgcagtgtaggtaatctcttcgtcatcatccatccgcttaccggagaacaacgcagcgtctgtttgccgccccatcggattaatgaatttttccgccaaccgtttacgacgcgctagcgcgccgcgaagaatacgggcacggcgtgattcatgctgtttgccgtgattttcatcttcatactcttcgtcgtcttcatactcatcttcatcgacccaggtatcatcgcgacgggtacgattactggcgaaggtgagaatgtttaaaatccagccgccgagtttttcagcaatggtcacccatgaccaaccggtgaacaacgtcaggcccgctgccgggaataccgcaatttcacggctgtacggatgcgcccactcggcgaccagttcgctctgaatgtgcggcgcgttcaccagcgggttatcttccagcggccagacaccggctttcacctggtcaatttctgcgcggatagccagcatcgcgtcgataaagcgatccagttccactttgctttcagattcagtcggttcaaccatcagcgtacccgccaccgggaacgacatcgtcggcgcgtggaaaccgtagtcgatcaggcgcttggcaatatccagctcgctgatgccggtttcttctttcagcgggcgaatatcgagaatacattcgtgcgccacgcgaccgtcgcgaccggtatacagcaccgggaaggcatcctgcaggcggctggcaatatagttggcgttgaggattgccacctggcttgcttttttcagcccttctgcgcccatcatgcggatgtacat

SEQ ID NO: 139653 - DNA, 1728 bp, Homo sapiens
ttacacgcccggtgtacatatatgtggatttattaatagcatatcgagcatatgatatgaaacccatacttgaacatcgagtaacagcgccaacgccaaatccgcctgcaagctgcgctcatgaaattcatcaaggatcaccagtccaacaccgctcagttccgggtcacgctggatcatgcgcgtcagcacgccttcggtaaccacttccaggcgggtattcggcccgacgcagttttgcgcacgcatccggtagccaacggtatcgcctggcttttcgttaagcagctccgccagccgttgcgcgacgttacgcgccgccagacgacgcggctccagcaggataattttcccgttaatgccgggatgcgccagcagttgcagcggcagccaggttgatttcccggccccggtcggcgcacttaataatacgcttgatgacgccggacaatggctgcgttcgcgtgtggtgtggtaagggatgcgtcggaagtgattcgccccagctcgacactggtgccgctggtaggtgaaaaacacgccaaagggttgttcggcactatcgtcgacaacttctatctcgtcgccttgatcttcgcgatgggtaccagtctgggccttgccacgccgctggtgaccgagtgtatgcaatggttgtttggcattccgcataccctgctgggatttatacctacaacgccatttgcgtcgcttgcggtctgcaaaaaggggtacgtatcgccagtgacgtgcgtagttacctgagcttcctgatgctgggttgggtgttccattgtcagcggtgccagcttcatcatgaactacttcaccgattcggtggggatgttgctgatgtatctgccgcgcatgttgttctataccgatcccatcgctaaaggcggcttcccgcagggctggaccgtgttctactgggcatggtgggtgatttatgctatccagatgagtatcttcctcgcccgcatctcccgtggtcgtactgtgcgtgaactgtgctggatcctgtggactgtactcggtagtaacactctgctgttgatagataaaaacatcatcaacattccaaatctgatcgaacagtacggtgtggcgcgcgccatcattgaaacctgggccgctctggcactcaacaacggcaacatgtggggcttcttcatcctctggtttattggccccggtacgctggttaacgcctggcagaatatccgcgcccagtttgttcatcacatcctgcggcgaaacggtattgccgatggatttagacatcttgcggccctgaccatccacggtaaagccgtgggtcagtacctgacgatacggcgctttacccttcatcgcggtggagatcattagggaagacatgaaccagccgcggtgttggtcagaaccttccagatacatgtccgctgcgtgaccggcaaattccggacgcacgtcaacaacagaagagtgggtagatccggagtcaaaccatacatccaatgtgtccggcactttcacgtactgatcagcttcgtcgccgaggatctctttcgcatcgagatcccaccacgcctggatgccatcgacttcaacgcgttttgccacttcttccatcagttcaagggtacgcggatgcagctcttccgtgtctttgtgcacgaacagtgacatcggtacaccccaggtgcgctgacgggagatacaccagtcaggacggttagcaaccat

SEQ ID NO: 139654 - DNA, 4251 bp, Homo sapiens
tcataggacctgctccatgatatccgccggcacactattactgtcgatacccatatccgccagtgctttgacaaaacgttccgggtagacgctgtcacggtcgcactcggcaaaataggcctcccagttttcgctggccatcagttcgcggataccggcgacaaacagttccataatgttgacgaagaacagcgggcatcctccggcgataatggcggtttgaatcggtttcaggccgccgagcgccagcagaacaataccgataatgccaaccagaattgaccaaccgatacgcaccagcagaggtggttcttcaccatcgcgtacttcgcggcaagtggacatcgccagggtataagagcaggcgttaaccagcgtaacggtggcaataaagcagaggatgaagaagccccacatggtggcggtgctgagtggcagagcggcccaggtttcaatgatggcgcgcgccacaccgtactgttcgatcagatttggaatgttgatgatgtttttatcggtataacatgaatgttctgtatcgccatcccgctgggcctggcacgcgaaaataaaggcgtagcggcattcgctggcttcatcggttatgcggtaatgaacctcgcggtaaacttctggttgaccaataaaggcattctgccaaccacggatgccgcggttctgaaagccaataacatccagagcattcttgggatccagtcgatcgataccgggatcctcggtgcggtgatcgccggtattatcgtctttcagagattgttgtgttgcttgattattgcattcgcgcatcttttgctgctgtggcgtcaaacttttttcgccaggcgcagacttgctgttcttcaggcaatcactcatgtaggtcttacgagcatcccctttcaacgcctgcgccgtcgcctgctgattacaggaggtcatatgctgttgttggcccttaaattctctctgcagatccagcctgtaggcatgtatgattagccgccaaaaccccaaatcggcaaaaatgacacgggttgtgcttctcccagcctgctggatggcattgtcgtgaattattacggccaagccgagccgcgcgtcagctgcaagcgtaacggtagaagattcccgtacactgaaaatcaacgtgtttgatcgttcaatgtctccggccgttgaaaaagcgattatggcgtccgatcttggcctgaacccgaactctcgggtagcgacatccgtgtgtcctgccgccgctgacggaagaacgtcgtaaagatctgaccaaaatcgttcgtggtgaagcagaacaagcgcgtgttgcagtacgtaacgtgcgtcgtgacgcgaacgacaaagtgaaagcacattctgggctcgaccggctcgattggttgcagcacgctggacgtggtgcgccataatcccgaacacttccgcgtagttgcgctggtggcaggcaaaaatgtcactcgcatggtagaacagtgcctggaattctctccccgctatgccgtaatggacgatgaagcgagtgcgaaacttcttaaaacgattcccctcacgatctaaagcgcgcagcagcattcctttcgaaatgatgccgacatactgttggtcctcgtcgaccacgggcaccgcacagggtgcctgtccgacatgagagagcaactcgctaagaggcgtttgtgcatcgactgctaacggcgcatcaatcagcgccgcatcaagaccttgctgtttgtcatgcagctccaccgattttgagaacgacagcgacttccgtcccagccgtgccaggtgctgcctcagattcaggttatgccgctcaattcgctgcgtatatcgcttgctgattacgtgcagctttcccttcaggcgggattcatacagcgccagccatccgtcatccatatcaccacggacctgcagagatatcttcaccgcgacggcgaatattttgcccgtacgcacttcagcagtaaaacgcacgccattgtccatttgttcagtctgctcctgcatcaccaccgcttcgcagccttccggcaccggcgcaccggtcataatacgaatgcaggtacccgcaggccattcaccatggtatggctgaccggcaaaggatttaccggcaacgggcagcggttgcccggaggcaatatcggctaaacgcaccgcgtagccgtccattgcggagttatcaaaccccggaacatcaagcggcgaaacgacatcgctcgccagaatacgaccaaaacactgtaccagtggcagcgtttcctgggcggtcagtggggtgacgcgagaaagcatctcattaagcgcggtgtcgagcgacatcaatccggtggtaaattccatgaaaacactcagactgcaggcatggaagcttttgatggcctcgagaatagtcagtggcacgttggtgatcgcctgttgaccggatttattcacctgaccggagatataggccttttgtgagcggaaggcggcgatattaacgtccacctcagcctcccaaagtgctgggattacagctggcgtaacggcgataacgcctgttttgacttcatcagcaatatctctgaggccgggcagttcgacgtctacgtcaatgaccacaaagcagggaccttcactgcggaccggaagaacgctgagaaagttctgtccactctcggagactgcagcaacgactgatagtagtatcttccccagcaaattcaccccgacagctagcaggctgccggggttttcttttatcaggagcccgaaaatgacccaatccgtgttgctgccaccggggcctttcacccggagacaagcgcaagcgttcactaccacgtacagcaatatcacactcgaagacgaccagggcagtcacttccgtctggtggttcgtgatactgaaggccggatggcatccgtacagacacggccacccgctgatcgcgaagcatttacccgcattcacctccccgaacacactttatatccccatacgccagccatcgccgctggcgtttttattgacggagacatacccatgacaacacagacgcagcacgacctcgcacccgctaaccaacccgaatttgaactgaccgtcacgccggtccccgatgaacagcgtatcgatttctggccacagtactttggcgctatcccgcagtggctactcctggagccgcatatcttcgcctggatggaccgcttctgtgagggctacagcggtggtatctggtcgttctacaccctcagcaatggcggcgcatttatgtcccccgagcctgacaacgatgagacatggcgtctgtttaactgcctgaacgccaccatgccgccgtacagaatgacgtgcgggacggtgatttatgctatccagatgagtatcttcctcgcccgcatctcccgtggtcgtactgtgcgtgaactgtgcttcggcatggtgctggggctgacagcgtcaacctggatcctgtggactgtactcggtagtaacactctgctgttgatagataaaaacatcatcaacattccaaatctgatcgaacagtacggtgtggcgcgcgccatcattgaaacctgggccgttctgccactcagcaccgccaccatgtggggcttcttcatcctctgctttattgccaccgttacgctggttaacgcctgctcttataccctggcgatgtccacttgccgcgaagtacgcgatggtgaagaaccacctctgctggtgcgtatcggttggtcaattctggttggcattatcggtattgttctcgtggcgctcggcggcctgaaaccgattcaaaccgccattatcgccggaggatgcccgctgttcttcgtcaacattatggtgacgctctcctttattaaagacgcgaaacagaactggaaagattaattaacccccaaaatatcaagaggttgaaagatggattttaatttaaatgatgagcaggaactgtttgtcgccggtatccgcgaactgatggccagcgaaaactgggaggcctattttgccgagtgcgaccgtgacagcgtctacccggaacgttttgtcaaagcactggcggatatgggtatcgacagtctgctgatccctgaagagcacggtggtctggacgcggggtttgttactctcgccgccgtgtggatggagctgggacgtctgggggcaccaacctatgtcctgtaccagttgccgggcgggttcaacaccttcctgcgcgaaggcacacaagagca

SEQ ID NO: 139655 - DNA, 3741 bp, Homo sapiens
catataaaacaaattacaccgataacagcgaatattacgctaatgtcggttttaacgttaagcctgtaaaacgagatggtaagatgagcgtaatgtctgacccagacacggcgatttatcctttccccccgaagccgacgccgttaagcattgatgaaaaagcgtattaccgcgagaagataaaacgcctgctaacagaacgtaatgcggtgatggttgcccactactataccgatcccgaaattcaacaactggcagaagaaaccggtggctgtatttctgattctctggcaatggcgcgcttcggtgcaaaggatcccgcttctaatttgttagtcgccgggggtggaacctgcaggtctgtcgttattaatgctgtattcagttacgtcaccaatgtatggggatgggcatttgaatggtatatggtggtgatgcttttcggttggttctggctggtgtttggcccgtatgccaaaaagcgtttaggtaacgaaccgccagaatttagcaccgccagttggatctttatgatgttcgcctcctgtacgtctgctgccgtactgttctggggatcgattgagatctactactacatctccaccccgccgtttggcttagaaccgaactcgacaggggcgaaagagttggggctggcttacagcttgttccactggggacctctgccgtgggccacttacagcttcctttcagtcgccttcgcttacttcttctttgtccgcaaaatggaagtgattcgccccagctcgacactggtgccgctggtaggtgaaaaacacgccaaagggttgttcggcactatcgtcgacaacttctatctcgtcgccttgatcttcgcgatgggtaccagtctgggccttgccacgccgctggtgaccgagtgtatgcaatggttgtttggcattccgcataccctgcaactggacgctatcatcattacctgctggattatcctcaacgccatttgcgtcgcttgcggtctgcaaaaaggggtacgtatcgccagtgacgtgcgtagttacctgagcttcctgatgctgggttgggtggtcattggcagcggtgcccgcttcatcacgaactacttcaccgattcggtgggggatgttgctgatgtatctgccgcgcatgttgttctataccgatcccatcgctaaaggcggcttcccgcagggctggaccgtgttctactgggcatggtgggtgatttatgctatccagatgagtatcttcctcgcccgcatctcccgtggtcgtactgtgcgtgaactgtgcttcggcatggtgctggggctgacagcgtcaacctggatcctgtggactgtactcggtagtaacactctgctgttgatagataaaaacatcatcaacattccaaatctgatcgaacagtacggtgtggcgcgcgccatcattgaaacctgggccgctctgccactcagcaccgccaccatgtggggcttcttcatcctctgctttattgccaccgttacgctggttaacgcctgctcttataccctggcgatgtccacttgccgcgaagtacgcgatggtgaagaaccacctctgctggtgcgtatcggttggtcaattctggttggcattatcggtattgttctgctggcgctcggcggcctgaaagcgattcaaaccgacattatcggcggaggatgcccgctgttcttcgtcaacattatggtgacgctctactttattaaaaacgcgaacacagactggaaagcttcattaacccacaaaatatcaaaaccccgcacaggtgaagcccagcgcgtcagtacggtgcggctcaataccgttcgggaactgcttctcggtgcgcttacggattttgtccgccagctgcgcctgcatcatattgccggtacgtttttccagcagttctggcagcgaaataccgtcaaccatatccagtgggtcgataacgttacccttggatttggacatcttctggccttcgtcatcacgaatcaggccggtcatgtaaacggtgtggaacggcacctgcggtttgccattttcatctttgatgaagtgcatggtcatcatgatcatgcgggcaatccagaagaaaatgatgtcgaaaccagataccatcacgctggttgggtggaactgacgcagggcgtcggtattttccggccagccaagggtagagaaggtccacagcgcagaagagaaccaggtatcgagaacgtcttcgtcctgacgcaggacaacatcagcaccgaggttattttctttacgcacttcgtcttcgttgcggccaacataaacgttacccgcttcgtcataccatgccgggatacggtgaccccaccacaactgacgagagatacaccagtcctgaatatcgcgcatccaggagaagtacatgttttcgtactgcttcggtacgaactgaatgtcgccgttctcaaccgcttcaaccgccggtttcgccaggacatcggcacgcacgtaccactggtcggtcagcattggttcgataactacgccgccacggtcgccgtaaggaacggtcaggtcgtgcggtttaatttcttccagcaggccaagcgcgtcaactgcggcaacgactgctttacgtgcagcaaaacgctccagtttctggaactctgcagggatttcgctggaataaacgtcagattcgttacctttggtatcgaacacctgggcgctttcacggatatcgccgtcaaaggtcaggatgttgatcatcggcagggcgtgacgtttacccacttcatagtcgttaaagtcgtgcgccggagtgattttcacgcagccggtgcctttttccatgtcggcgtgttcgtcgccaacgatcggaatacgacggttaaccagcggcagaatgacatatttgccaatcagatctttgtaacgcggatcttccgggagatcgtctcgttaatcggccctaacggtgccggaaaaaccacggtttttaactgtctgaccggattctacaaacccaccggcggcaccattttactgcgcgatcagcacctggaaggtttaccggggcagcaaattgcccgcatgggcgtggtgcgcaccttccagcaaagcgaagcgctcgaccgcgccgcgacctggcttgagcgcattggtttgctggaacacgccaaccgtcaggcgagtaacctggcctatggtgaccagcgccgtcttgagattgcccgctgcatggtgacgcagccggagattttaatgctcgacgaacctgcggcaggtcttaacccgaaagagacgaaagagctggatgagctgattgccgaactgcgcaatcatcacaacaccactatcttgttgattgaacacgatatgaagctggtgatgggaatttcggaccgaatttacgtggtcaatcagggacgccgctggcaaacgtacgccgagaaattcgaggcaggccccagtaacagtgacaaaatccattcaggacatgctgaaggcaataaggaagcgcgtggtaaagggatgttgatggcgattgagtttgttgataacgaaatcggctataactttgccagcgagatgttccgccagcgcgtactggtggccggaacgctcaataacgccaaaacgatccgcattgaaccgccactgacactgaccattgaacagtgtgaactggtgatcaaagcggcgcgtaaggcgctggcggccatgcgagtaagtgtcgaagaagcgtaa

SEQ ID NO: 139656 - DNA, 1656 bp, Homo sapiens
atgtttctcagaaaagagcagagagaagtgtacgagcaggccgccgaatgtgacggcgaggtggttcgtcccaaggaaccgaactggacagcctgggcaaacgaaattcgcctgatgtgtgtgcaggatggtcgtactcacaaacaaatctgcgagatgtacagccgcgtcagccgcgatccgttctggtgccgtaacgtgctcagcccgtcgaagctgcgggaaaaatgggatgagctttccctgcgcttatcgccgtccgtcagcacgtacacagaaaaacgcgaagacccgtacttcaaagccagttacgacaatgtggactacagccagatcccggcaggattcagggggcggaagaactggagtccaggggcttataccgtcgtgctgcaacggtgtggatggcggcattccgtgaaagccactcccagccagaacgaaacaattttctggcgcgtcgtgaacggtgtttacggaaaagcagtaagcgggctgcatcagttctcgaagatgggtaagtcgagtcagggacacaggatgagtcctgggtttactgaccagcggccgggtgccgcagcaatcgcctgtatgaacctgctggtagcgctgggtctgcaaaaacataacatcgtggtttgcgattcaaaaggcgttatctatcagggccgtgagccaaacatggcggaaaccaaacgcgcatatgcggtggtggatgacggcaaacgtaccctcgatgatgtgattgaaggcgcggatattttcctgggctgttccggcccgaaagtgctgacccaggaaatggtgaagaaaatggctcgtgcgccaatgatcctggcgctggcgaacccggaaccggaaattctcgcgcgctggcgaaagaagtgcgtccggatgccatcatttgcaccggtcgttctgactatccgaaccagaaaatgccgctgcctgaacgttcgcaacgttaagctgataaacattcgacgcattgcggttatgatgaggagcagcaaaatggctagcgaacgcagtactgatgtgcaggcatttatcggggagctggacggcggcgtatttgaaaccaaaatcggcgcagttctcagtgaagtcgcttccggtgtgatgaacacgaaaaccaaaggtaaggtctcactcaacctggaaatcgaaccatttgatgagaaccgtctgaaaatcaaacacaaactctcatatgttcgcccgactaaccgtgggaaaatttccgaagaagacaccaccgaaacgccgatgtatgtcaatcgcggtggtcgcctgactattctgcaggaagaccagggacaattactgactcttgccgtgtccgaactatccgcgacattctgcgttagccctgcgcaagaggccacccagcagcacggcacgcaaggtttcgcggtgctgtcgtatgtgtatgaacacgaaaaacgcgacttagccagccgcattgtctccacccagcatcatcaccacgacctctccgtcgccacgctgcatgtgcacatcaaccacgacgactgtctggaaatcgccgtgttgaaaggtgacatgggtgacgtgcagcattttgccgatgacgttatcgcccagcgcggcgtgcggcacgggcatttgcagtgcttgccgaaggaagattga

SEQ ID NO: 139657 - DNA, 588 bp, Homo sapiens
atggctcagtgcagcctggacgccctggaccagcccctcctgcgcctgggccacggccgctgccttcagggcatcactgtgccctggccccacccacccgtgtcagcaccgcccaccgccctggcaccacccaccgagttctcgcccatgaggaagggggaccctgagtggaggtttcaaaccttaggggccgtccctgccgtgcagggctctacccccacctgccccatggcccccatttcatgtctgtggctcaccagcttttccccagacccagctccggagcccacaggcgtggccgatgcagaaacctcaggaagaaccttccagaacgtgccttccacgggacggaaacttccggaacatgccttccacagcatggaaacttctggaacgtggcttccatgggatggaaccttccggaacgtgccttccatgggacagaaccttctggaatgtgccttccacgggaccctctcatgcccttgcacaactgcaccattttcctgtgtcaccgaggaggacgtgggctccgagccgctgagtgacctgttgggggcagggctggcgctggccgtcccagcttaa

SEQ ID NO: 139658 - DNA, 1629 bp, Homo sapiens
  misc_feature (1)...(1629): n = a,t,c or g
atgcttgaagaggatatngaagacctgctgcaagctgccattgatgttttcactaccgtcaacgttcagcatctggaaagtctgaatgatgtggtcagcggcgtcaccggaattcaggtacgggaaaccgtgcccgatccttttttcgatgccgccgacgacgtggtgctggtggacttgccaccggacgatctgcgccagcggctgaaagaaggcaaagtctatattgccgggcaggcggagcgcgccattgaacattttttccgcaaaggtaatctgatcgccctgcgcgaactggcactgcgccgtactgccgatcgcgttgatgagcaaatgcgcgcctggcgggggcatcctggcgaagagaaagtgtggcacacgcgcgacgcgatccttttatgcatcggccataacaccggcagcgaaaaactggtccgcgcagcggcgcggctggcgtcacggctgggtagcgtctggcacgcggtgtatgttgaaacccctgccctgcaccgcttaccggaaaaaaaacgtcgggcaattctcagcgccttacgtctggcgcaggaactgggcgcggagacggcaacactttctgatccagcggaagagaaagcggtagtgcgttatgcccgtgaacggggatcatctagagtgacttgcacgctgcactttcgccgcaaaacatggttcatcccaatgctgaacggtgaacgggtaatcgtcgaaatcgagactttccacgcgagtaaacggcggcaccgcatagatgcgcttatcgcgccccgcgccgaacagttgcagggcgggcatcatgtccatttttgggttatcgaatttcgggatcggcgacgggtccatcacgtagcgcccatttaccttcaccggataggcgtaggtggtggcgatataaccgaagcgggcgatatcttcatacagtttcacctgcatcacgccgtactcttccagcgcgtgcatggtgcgggtttccgtttcgcgcggctcgataaagcgcagcggctcggggattggcacctggaagataattatctgatcttcggtcagcggcgtttcggggatgcggtgacgcgtctggataaccgtcgcatcgtccaattgcagcaatatggcgacgccattacattgtgtttctcaaaaagcttaaacgttggtaaaccggcccggtttagtgaggatcgcccgttgtcagaactactctctttcgccctttttctcgcctctgtgctgatttacgcatggaaagcgggacgtaacacctggtggtttgcagccacgttaacggtgctggggctatttgtcgttttaaatatcaccctgtttgccagcgactattttactggcgatggtattaacgacgcggttctctataccttaaccaacagcctgaccggtgctggcgtcagcaaatacattttgccgggtatcggcattgtgctggggctgacagcggtgttcggtgcgctgggctggatcatgcgccgtcgtcgccatcatccgcaccattttggttacagcctgctggcgctcttactggcgctgggttcggtggacgccagcccggcatttcgtcagataacggaactggtgaaatcccagtcacgcgacggcgag

SEQ ID NO: 139659 - DNA, 1998 bp, Homo sapiens
atggtcggcgtgcgttttgcgttgggcctgatgtggctgacgctgattgttgccgaaaccatttctgccaattcaggcattggttatctggcgatgaatgcgcgggagtttttgcaaacggacgtggtggtagtcgctattattctttacgccctgctcggcaaactggctgacgtcagcgcgcagctgttagagcgcctctggttgcgctggaacccggcttatcatttgaaggaggccacgttatctgccgaacaggctgctcgcatcagggaaatgacggtcatcacctccagcctgatgatgagtctgaccgtcgatgaaagcgatctttctgtgcatctggtaggacgaaaaatcaataaacgggaatgggctggcaacgcgtctgcatggcatgacacaccggcggttgctcgtgatttatcacacgggctttcctttgctgagcaggtagtttctgaagcacattccgcaatagtgattctcgacagccgggggaatatccaacgcttcaatcggttatgtgaagattacacagggttgaaagaacacgacgtcattgggcaaagcgtgtttaaactgtttatgagccgtcgtgaagctgcggcatccaggcgcaataaccgtgtattttttcgaagcggcaatgcatatgaagtagaaaatgttcccgatccgggcgttgaacaggcagatgatattattctgcgtattacggcaacggcgatctgtggctctgacctccatctttatcgaggcaaaatacctcaggttaaacatggcgatatttttggtcatgaatttatgggggaagtagttgaaaccggaaaggacgtaaaaaatttgcaaaaaggcgaccgagtggtaattccgttcgtcattgcttgtggcgactgttttttctgtcgattgcaacaatatgccgcctgcgaaaataccaatgcgggtaaaggcgctgcgctcaataaaaaacagataccagctccagcggcattgtttggttatagtcacctgtatggcggcgttcctggtgggcaggcggaatatgtccgcgtcctaaagggaatgtggggccgtttaaatgacgcgcagcctggtttccgctcatctcgccctctacggtatggagctggcatcatgactttacttaacatctccggcctttcccatcactatgcgcacggtggatttaacggaaaacatcaacatcaggcggtgctgaataacgtttccctgaccctgaaaagcggcgaaaccgtcgccctgctggggcgcagcggctgcgggaaaagtaccctcgcgcggttgctggtgggtttagaatcgcccgcgcaggggaatattagctggcgtggcgaaccgctggcgaaactcaatcgcgcccagcgtaaagcgttccgccgcgatattcagatggtatttcaggactccatcagcacctgtgaatccgcagccaaaccgtctgcatattgtacttttcctcttactcgacttaaccagtaccaacccagcttctcaacggatttataccatggcactttaaagccagcatcactgacaatgagcggtgtggtgttactcggtagaatgctcgcaagaccagtcaacaagtacaatgggcatcgtattgcccgaacagataaagctagcatgccaacggtatacagcgagtcgctctttgtggagcccttggagcgcgttttatacgtcgctgtaatactgactcagataataagaggcttgcgggacactgaaatcgagacgataaaccctgatatcgcagtccacttcgcgctttgtttccacgggttaggttcaattcccaccaagggtgctgaaaaatcccctttcctgactatccataaggtacgcgttaaaccggatataccctcccccgtgtccatcatggcaccctgccgggcccatccaacatgtgaagctttgttcaataactccactgcgctacactctccctggttctgtgactctttgtga

SEQ ID NO: 139660 - DNA, 3039 bp, Homo sapiens
atgacacgcaaaccccgtcgccacgctctttctgtgcccgtgcgcagcggttcggaagtggggttcccgcagagcctgggggaggttcacgatatgttgtacgataaatcccttgagagggataactgtggtttcggcctgatcgcccacatagaaggcgaacctagccacaaggtagtgcgtactgcaatacacgcactggcccgcatgcagcaccgtggcgcgattctcgccgatggtaaaaccggcgacggttgcggcttgctgttacaaaaaccggatcgcttttttcgcatcgttgcgcaggagcgcggctggcgtttagcaaaaaactacgctgtcgggatgctcttcctgcatcaagatcctgaactcgccgctgccgcacgccgcatcgttgaagaagaactgcaacgcgaaaccttgtcgattgtggctggccgaattgatcgctgccacgctaaaagaaaccataattgggcatatcgccatcgtggcaataccgagacgtgcggagaacatttgcggaatggagaacggcgaaccgaccgagatatcaatcaccgaatttgccaccagtacgatttccaccgcaccggtgacaaagccggtaatgccgccactattggtctggtgctggttcttattcctgtggtgatgactgctattgttggctggcattggtttgatgcggcaacttatgcagctaactggaatactgcggataccactgatggtcatgcgatcattaaaagtattctgctctgcctgtgggccttcgtgggtgttgaatccgcagctgtaagtactggtatggttaaaaacccgaaacgtaccgttccgctggcaaccatgctgggtactggtttagcaggtattgtttacatcgctgcgactcagggcgaaaaagttaaatttcaaggccagctgaaagggcaacaacttacagtcagcgaactggatgtcgtcgcgtttgaaaatcagccgccggtaaaactggtgggggaatttgctatgccgctcgtgccggatggacttcctgtaagtgggcatgctactgcgacgttaaacttgccgcaggaaccgtcactggtggatgccgagctggactggcaggaaaatagcgggcaattgatcgtgctggcacgggataacggcgatccgttgctcgatttgccgtggcaaattactcgtcaacaattgaccgtaagcgatggtcgctggagctggccgtatgcaggttttcctttgagtggccgactgggtgtcaaagtcgacaactggcaggcagggcttgagaacgctctggtcagcggacgactgagtgtgctgacccaggggcaagcggtggcgctactggggaaaagggagttttacacgcgtatgcaatgccacctggcgatgtcgcaggacaaaggcgatttacatgctggtgagattggcccggttcgggtaaatggtcgctgggacggtattcgtctgcgcggtaacgcctggtggcctaaacaatcactgaccgtattccagccgctggtgccacccgactggaagatgaacttacgcgatggtgaactgtatgctcaggttgcattttctgctgcgcctgaacaaggattccgcgcgggaggacacggcgtgttgaaaggcggtagtgcctggatgccagataatcaggttaacggtgtcgattttgtcctgcctttccgttttgccgatggagcctggcatctggggactcgcggtcccgttacgttgcgaattgccgaagtgattaatctggtgacagcgaaaaatattacggctgatttgcaagggcgttatccgtggactgaagaagaacccttgctgttgactgatgttagcgtcgatgtgttaggcggcctggagcacttggagacgagtggctcgtgtgccctccatggaccctctctctccgttgggcacatcgagtctccagcgctacttgagatcatcggttgtctcattccttcgaccatcttcggcctatgctcgtccggtattgtgcaacatctacagttctacccacatatatgttccacggcgctaggtggcttcgacgcatatggtgagcaatggagcagcatccgagggtcaggtggtcgcgcgtcaattaccagtagatatgacgacaatggtcgtagccgccgtttccattgggatcctggagtcatctggttgctattcttactagaaacagcagccacgatatcttggtccaaagcatgggtatctggttataaacacgaaacagttgtcaccagaaccgcgcaagaggccacccatcagcacggcacgcaagttttcgcggtgctgtcgtatgtgtatgcactcgttagacgcgacttagccagccgcattgtctccacccagcatcatcaccgcgacctctccgtcgccacgctgcatgtgcacatcaaccacgacgactgtctggaaatcgccgtgttgaaaggtgacatgggtgacgtgcagcattttgccgatgacgttatcgcccagcgcggctttttcttcgctttttcgtatgaagatactgtcattaaaataatagaaaaggattttacgatgagcggaaaaccggcggcgcgtcagggtgacatgacgcagtatggcggtagcattgttcagggttcagccggggtacgtattggtgcccccaccggcgtggcctgttcggtgtgccccggcggagtgacgtccggccatccggtcaatcccctgctcggtgcaaaggtccttcccggtgaaaccgacatcgccctgcccggcccgctgccgttcatcctctcccgcacctacagcagttaccggacaaaaacgcccgcgccggtggggagcctcggccccggctggaaaatgcctgcggatatccgcttacagctgcgcgataacacactgatactcagtgataacggcggcagaagcctgtattttgagcacctgtttcccggtgaggacggctacagcccgcagcgagtcactgtggcttgtgcgccgcggcgtggcaaaactggatga

SEQ ID NO: 139661 - DNA, 2784 bp, Homo sapiens
tcatgctcccacgatggcgatatagggtaagtttttgataatccgtgacgtgcgttcttcaaacaccgaaagcccgctggcatcgatgtcattttcatcacgatgacgcaggtcgtgagttatcgcgatccccagcagcatcaccatgccaataaagatttcgatggattcagggttaagatgtgggaaatagcgcacgactaccacacgggtcatcagtaccaccacggcggcgatcagactttgcttccagccaaactggtagaaaatcgccaccagcgggaacagtgcaaaagctgaaaccaccggcgagcttaattcccccaggctacctaatacatccaccggcagcgcggtcagcagctggtttactggcaacaggcaagtaaggatcaacacgccccagatagcgccaagacccatccgcgccgaggtggatacccaggttgcggagttgcagcgactggagcgtgtgctgcagcgccagctaaccgccacgcaaccgaaattcaagaatatctccccgcatttacagcgcattaaagcgttcaaaaccctcgggtaaattggatccacgcagcactgcagcgaacgggccgaggccgacggcgacacgaacagcatggcgaagaccatttcgttaatggcgcggcaggcgtccatcaggcggcgaacgggctggtaaacccaccacggcaccaggttttcggcgctcatcaggccaaaggggatggagagaaccaccgccagcgcggtgccccagacggcgatttgcagcgtgacggccatttcggtgaggtaatcctgccactggctgaaatcgggcgggaagaagtcggcggcgaacgtcgccatgttgccgccgtctttgatcagcgtaagcggggccatttccgcgccctgccacgagacgaccaacacggcgagtacaacggcccagctcagaagcgagaaccagctgcgcttgggtggggcgatggtgatggtttgcatgtttggctccggtctgtaggccggataaggtgcttgcaccgcatccggcatcaacgccgaactcatcgcgcttagcgcgttgttcaggcggtccaggtcatccagctgcgcctgaatctcggtggtttttgccagcttgtcctgctcattcagtcctttattgcttttcacgccctgcatctctttaaacagcgcgagctggcgaatcggcaccagttgcaggtcgctggaagcgcggaatggcgcccagcccaggcgttccagcaccgctttttcttccggcgttttgccgtagttcataaagaagtcgtagatcttgtctttggtggtttcggaaagattcttgcgccagacgatcggatcgcctgggatcagcggcgacttccagatcaccttcagttctttcagcttctctggcgcggaggttttcagcttgtcgaggttttcggtgttgttggtggcaacatccacctgcttgcctgaccgtcctttgattaaatcacatgtcattacacactgcccataatgcaactccgaatacacgaagataacggcatgtacatctgcccggaatgtgcctacgaatggaacgacgcagaacctgcacaggaaagcgacgagctgatcgttaaagatgctaacggcaatctgctggctgacggcgacagcgttaccatcattaaagatctgaaggtgaaaggtagctcttcgatgctggtgttcgccggtatttaacgtcgcattcagacccgcagaaaccagaatgagatttttcagttcgcgatgataatagccaatatgcggatgccattcgttataatgctcgaacgcctctgcaaggttctttgctgccgttaacccgtctggtttgggcatgatactgatgtagtcacgctttatcgttttcacgaagctctctgctattccgttactctccggactccgcaccgccgtgttcttcggttcaagtcccaacatccgggcgaactggcgtgtttcattagcccggtagcatgaaccattatccgtcagccactccactggagacgacggaagatcgttgccgaagcggcgttccaccgctcccagcatgacgtcctgtactgtttcactgttgaagccgccggtagtgaccgcccagtgcagtgcctcacgatcacagcagtccagcgcgaacgtgacacgcagtctctctccgttatcacagcagaactcgaacccgtcagagcaccatcgctgattgctttctttcacggccactctgcctgtatgtgcccgtttcgatggcggtacagcaggttttcgctcaagcaacagcgcattctggcgcatgatccggtaaacacgtttggcattgatcgcaggcataccatcaagttctgcctgtctgcgaagcagcgcccatacccgacgataaccatacgttggcagctctccgataacatggtgtatacgagaagcacatggatcaggattgctgggcgtctttcttgccggaggaacggttgttctggcggccgatcccagcgccacgctcggatcgcgtggagtgtgtggattcacttccgctgacggcggtcgggaaagtcgataaaaaacaattacgtcagtggctggcgtcacgcgcatcagccagggctcaaaggaggagtccacttgcagaagccaggaagccacaatatgtgcaccaaggtatggacaacgcaaggacagctcttcagaaaccagagcaagcacgggcacacacagaggttcattggacttaacttccagtgtctgggcagcctccat

SEQ ID NO: 139662 - DNA, 1746 bp, Homo sapiens
atgggcaacagggggtggaaccgcggatttttcgccggagttcgtctccttcccggagatacacaagtgcttcatgcgaaatggtgtgacccacaggcatttagcatagctcttctgggacggcgaattcaggtgctcaatcctatttatgttagtatgggtggagttcaaaaacttaagtatttagaaatgatgggaagtctaatgggtaaaacatgtttccgtgctaaagcaccctgtgaacttaagggaactctgtttgctcttggacaagtcctgatgtccagggacagacacccagtaagaagcaagtcagagcagaatgattccaaatgggctgctgtggaggaggaccctaggaccaggcatctaccaggcatctctggtattaccccatgtccaaggtcagcgcgtttccaccctctccgcggccagcagcaacgtgtggcgattgcccgtgcgctgatgcagcaggcgaaagtgattctggccgatgaacccatcgcctcgctggacccagaatcagcgcgcatcgtgatggacaccctgcgcgacatcaaccagaacgacggcatcaccgtggtcgtcacgctgcatcaggtggattacgccctgcgctactgcgaacgcatcgtcgccctgcgccaggggcacgtcttctacgacggcagcagccaacagtttgataacgaacgttttgaccatctctaccgcagcattaaccgccatgttcagcctcagcaccctgttaagcccggcgcacgccgaagagcaggaaaaggcgttgaatttcggcattatttcaacggaatcacagcaaaacctgaaaccgcatggacgccgttcttgcaggatatggagaagaagctgggcgtgaaggtcaacgccttctttgccccggactacgcgggcattatccaggggatgcgcttcaataaagtggatatcgcctggtacggcaatctgtcggcgatggaagcggtggatcgcgccaatggccaggtcttcgcccagacggtcgcggcggatggatcgccgggttactggagcgtgttgatcgtcaacaaagacagtccgatcaacaacctgaacgatctgctggcgaagcggaaagatctcacctttggcaatggcgatcctaactccacctctggcttcctcgtccccggctactacgtcttcgccaaaaacaatatctccgccagcgacttcaagcgcaccgtcaacgccgggcatgaaaccaacgcgctggccgtcgccaacaagcaggtggatgttgccaccaacaacaccgaaaacctcgacaagctgaaaacctccgcgccagagaagctgaaagaactgaaggtgatctggaagtcgccgctgatcccaggcgatccgatcgtctggcgcaagaatctttccgaaaccaccaaagacaagatctacgacttcttaatgactacttgccgatttggtgttttgtgtgcctggggaatgtttcgtcggtgtccatatgggggggttggcagcgacagagtgccaaaggccgacaccgccgctgtgtttatagtggtgtcgagtcgtagtcgtagtcgtagtcgtagtctagtcgtagtcgtagtgttagtcgtagtcgtagtcgtagtcagtgcggtcgtagtcgtagtcgtcgtagtcgtagtcgtatggtgccctgtccgtggtcgtgtcgtagtccagtccagtccagttcagtccagtgtcagtccatcgtcgtcgtag

SEQ ID NO: 139663 - DNA, 858 bp, Homo sapiens
atgaaaggcaccgttgaacgggccgatatgcactacatcatccgtgatttcgaccgtaaacagtttgaagcgcgtaaacgtaaaatgatggagatcgccaaaaaagcgggtgtcattcgcctgctgaaaaagctacaacaacagtttggcaccgcctgcctgttcatcacccacgacttacgcctggtagaacgcttttgccagcgggtaatggttatggacaacggacaaatcgtcgaaacccaggtggtgggagagaaattaaccttttcctctgacgccggacgtttaacgcaaatgcaacgagtcaccatcacgcttgatgacgatttactggagacgctggacagcctgagccagcgtcgtggttataacaaccgttccgaagctatccgcgacattctgcgtagcgccctggcgcaagaggccacccagcagcacggcacgcaaggtttcgcggtgctgtcgtatgtgtatgaacacgaaaaacgcgacttagccagccgcattgtctccacccagcatcatcaccacgaccttatttgtgcgaaaaccgatggttgtaacgaggctcgctggttctcgctgacgacgcgcaatgttaaaagaaggaaagcggctggcggacatcgccaaaaaacagccgctgaccctgctctactcagcaaaaaacaccacgcagaaccatgcgctggtgctggccgactggctaccgcggcaatggaagacggcgatgcactgattttcatgaacttccgtgctgaccgcgcgcgtgaaatcactcgtgctttcgtgaacgctgatttcgatggcttcgcgcgtaagaaagtggttaatgaagatctcggtaccgtaccg

SEQ ID NO: 139664 - DNA, 291 bp, Homo sapiens
atggtcgcaagccttgtgttctctgacctggggttcttggcctcacggattccaaagaatggaatcttgggccatgcgggcaaacccgggcacttagctgtgcaggaacaatggcgagcctttagccagatcaggagcagcaatgggcgccttgctggatcgggagcacagcagacaccctgccggatctggagggatggaagtcagcagcaggtctgcgacagcggcgggtctgtgacagcggcaaacaccagtggtgggcagcaagtgaaagctcagctcgagctgtaa

SEQ ID NO: 139665 - DNA, 4484 bp, Homo sapiens
atggcccccatttcatgtctgtggctcaccagcttttccccagacccagctccggagcccacaggcgtggccgatgcagaaacctcaggaagaatacggcgggcgaagattacaaggagggcggtagcaggaaggactccggccagtacgaaaaggactttctggaggcggatgcttacggagtctcttacaacatgaaagctgacatagaagatgagctagataaaaccattgaattgttttctaccgaaaagaaagataaaaatgattccgagagagaaccttccaagaaaatagaaaaggaactaaagccttatggatctagtgccatcaacatcctaaaagagaagaagaagagagagaaacacagggagaaatggagagacgagaaggagaggcaccgggacaggcatgcggatgggctgctgcggcatcacagggacgagctcctgcggcatcacagggacgagcagaagcccgccaccagggacaaggacagcccgccccgcgtgctcaaagacaagtccagggacgagggcccgaggctcggcgatgccaaactgaaggagaaattcaaggacggtgcagagaaagaaaagggcgacccagtgaagatgagcaacgggaatgataaggtagcgccatccaaagacccaggcaagaaagacgccaggcccagggagaagctcctgggggacggcgacctgatgatgaccagcttcgagaggatgctgtcccagaaggacctggagatcgaggagcgccacaagcggcacaaggagaggatgaagcaaatggagaagctgaggcaccggtccggagaccccaagctcaaggagaaggcgaagccggcagacgacgggcggaagaagggtctggacattcctgctaagaaaccgccggggctggaccctccatttaaagacaaaaagctcaaagagtcgactcctattccacctgccgcggaaaataagctacacccagcatcaggtgcagactccaaagactggctggcaggccctcacatgaaagaggtcctgcctgcgtcccccaggcctgaccagagccggcccactggcgtgcccacccctacgtcggtgctatcctgccccagctacgaggaggtgatgcacacgcccaggaccccgtcctgcagcgccgatgactacgcggacctcgtgttcgactgcgccgactcgcagcactccacgcccgtgcccaccgctcccaccagcgcctgctccccctcctttttcgacagagctataacacttaccgcatggcccaagattccattccttggaatccataaggccaagaaccccaggtcagagaacacgacgcttgccaccatcttggaagcagcctgccgccattttggaagctgcccgctaccatcttgggagctctgggagcaaggaccccctagtaacacatccacatacgtccgctatccaaatgtccatccatatacgtccactatccaaatgtcgaaatatccactgtccaaatacgccccatggggcgggatgtgggatcctgggaccaagccagcttctcacaaaggaggggggtcaggcagcagcagctcagggcaggctcagggagagcaggagggcggcagcgggggctgccagcaggctccaggggcgccgccgtctctcctgaccgccacaggcttcctgggccacctcaatcagatgccggtgctgtgtgaatcaccgtttatcatcgccgatgaaccgaccaccgaccttgacgtggtagcacaggcgcgcatcctcgatctgctggaaagcattatgcaaaaacaagcgccgggaatgctgctggtgacccatgatatgggcgttgtggcgcgtctggcggatgacgtggcggtgatgtctgacggtaagattgtcgaacagggcgatgtagaaacgctgtttaacgcccccaaacatacagtgacgcgcagcctggtttccgctcatctcgccctctacggtatggagctggcatcatgactttacttaacatctccggcctttcccatcactatgcgcacggtggatttaacggaaaacatcaacatcaggcggggctgaataacgtttccctgaccctgaaaagcggcgaaaccgtcgccctgctggggcgcagcggatgtgggaaaagtaccctctcgcgagtgctggtggggttagaatcccccgcgcaggggaatattagctggcgtggcgaaccgctggcgaaactcaatcgcgcccagcgtaaagcgttccgccgcgatattcagatggtatttcaggactccatcagcgccgtgaatccgcgcaaaaccgtgcgcgagatcctgcgtgaaccgatgcgccacctgctatcactgaaaaaatccgaacaactggcgcgcgccagcgaaatgctgaaggcggtcgatctcgatgacagcgttctcgacaaacgcccaccgcagttaagcggcggccagctccagcgcgtctgcctggctcgcgcgctggcggtcgaaccgaaactactgattctggatgaagccgtttctaaccttgatctcgtgttacaggcgggtgtcattcgcctgctgaaaaagctacaacaacagtttggcaccggcttccctgttcatcacccacgacttacgcctggtagaacgcttttgccagcgggtaatggttatggacaacggacaaatcgtcgaaacccaggtggtgggagagaaattaaccttttcctctgacgccggacgtgtgctacaaaacgcggtattacccgcattccccgtgcgccgtcgcaccacagaaaaggtttaacgcaaatgcaacgagtcaccatcacgcttgatgacgatttactggagacgctggacagcctgagccagcgtcgtggttataacaaccgttccgaagctatccgcgacattctgcgtagcgccctggcgcaagaggccacccagcagcacggcacgcaaggtttcgcggtgctgtcgtatgtgtatgaacacgaaaaacgcgacttagccagccgcattgtctccacccagcatcatcaccacgacctctccgtcgccacgctgcatgtgcacatcaaccacgacgactgtctggaaatcgccgtgttgaaaggtgacatgggtgacgtgcagcattttgccgatgacgttatcgcccagcgcggcaggatccccagcgacttcaagcgcaccgtcaacgccgggcatgaaaccaacgcgctggccgtcgccaacaagcaggtggatgttgccaccaacaacaccgaaaacctcgacaagctgaaaacctccgcgccagagaagctgaaagaactgaaggtgatctggaagtcgccgctgatcccaggcgatccgatcgtctggcgcaagaatctttccgaaaccaccaaagacaagatctacgacttctttatgaactacggcaaaacgccggaagaaaaagcggtgctggaacgcctgggctgggcgccattccgcgcttccagcgacctgcaactggtgccgattcgccagctcgcgctgtttaaagagatgcagggcgtgaaaagcaataaaggactgaatgagcaggacaagctggcaaaaaccaccgagattcaagcgcagctggatgacctggaccgcctgaacaacgcgctaagcgcgatgagttcggcgttgatgccggatgcggtgcaagcaccttattcggcctacagaccggagccaaacatgcaaaccggtacgaactctagctcggtaccccacctggaagataattatctgatcttcggtcagcggcgtttcggggatgcggtgacgcgtctggataaccgtcgcatcgtccgtacgttccgtggtgtttaccccggtcacgcgcttgaagaagttgcgaatcgacacggcgttggtggtgtcatccgcgccctggtcaatcaccttcagcacgtcgctttcgccaatcacgctggcgagcgcgggtcgaccatcgccatattcatgggttttggctcgctcatgccgaacaccagcccgttgtggcgcaggacgtccctccttatgtcattgcgcagggtaaccacgcaacgccgttcgggtgtcaatatagaagggctgaagcgccgcggattcagccgtgaggcgattccggctatccgcaatgcgtaataagctgatttatcgtagcggtaaaacgctcgatgaagtgaaaccggaaattgctgaactggcggaaacatatccgaaagtgaaagcctttaccgatttctttgcacgctcaacgcgcggtctgattcgttaatgactgaacagcgtccattaacgattgccctggtcgccggagaaacctccggcgatatcctgggggccggtttaatccgcgctttgaaagaacatgtgcccaacgcccgctttgttggcgtccccgggccacgaatgcaggttgaaggctgcgaagcctggtacgaaatggaagaactggcggtgattgtca

SEQ ID NO: 139666 - DNA, 1302 bp, Homo sapiens
atgcttgcggtcgaatgtcgatctctcccatttccgccgttggtacagccagtccggtacaccgatgtgaccgtcaaagacgactacaatccggaaaccgagcagtacaccctgaccatcagccagcgcacgccagccacgccggatcaggcagaaaaacagccgctgcatattccgtttgccatcgaactgtatgataacgaaggcaaagtgatcccgttgcagaaaggcggtcatccggtgaattccgtgctgaacgtcactcaggcggaacagacctttgtctttgataatgtctacttccagccggtgcctgcgctgctgtgcgaattctctgcgccagtgaaactggaatataagtggagcgatcagcaactgaccttcctgatgcgtcatgcgcgtaatgatttctcccgctgggatgcggcgcaaagtttgctggcaacctacatcaagctgaacgtcgcgcgtcatcagcaaggtcagccgctgtctctgccggtgcatgtggctgatgctttccgcgcggtactgcttgatgagaagattgatccagcgctggcggcagaaatcctgacgctgccttctgtcaatgaaatggctgaattgttcgatatcatcgacccgattgctattgccgaagtacgcgaagcactcactcgtactctggcgactgaactggcggatgagctactggctatttacaacgcgaattaccagagcgagtaccgtgttgagcatgaagatattgcaaaacgcactctgcgtaatgcctgcctgcgtttcctcgcttttggtgaaacgcatctggctgatgtgctggtgagcaagcagttccacgaagcaaacaatatgactgatgcgctggcggcgctttctgcggcggttgccgcacagctgccttgccgtgacgcgctgatgcaggagtacgacgacaagtggcatccgaacggtctggtgatggatcactggtttatcctggcagccacccggcccgcggcgaatgtgctggagaccgggcgcgggctgttggagcatcgctcatttaccatgagcaacccgaaccgtattcgttcgttgattggcgcgtttgcgggcagcaatccggcagcgttccatgccgaagatggcagcggttacctgttcctggtggaaatgcttaccgacctcaacagccgtaacccgcaggtggcttcacgtctgattgaaccgctgattcgcctgaaacgttacgatgccaaacgtcaggagaaaatgcgcgcggcgctggaacagttaaaaaggctggaaaatctctctggc

SEQ ID NO: 139667 - DNA, 1056 bp, Homo sapiens
atggataaggaagacttcctgatccagattatggctggcgaagagttcggcgatgtcgaagcgattttccacgaaggcgcgtgctcttccaccaccgagtgggacggcaagggagtagtaatgagcaactctgaagggccactggtatctgccggtatcaccgacattaacattgaagacgaccagggcattcacgtccgcctgatagttcgtgatgccgaagacgctttgaacctgaatacacactcggggcgagcgccagtgcagttgttggggcgttactggctgatcaccaatggcaatggccgtgaaaccgaagtccagggcgaaggagtggttggcgtccagccacttatcgcgcctggcgaagagtaccagtacaccagcggtgcaatcattgaaaccccgctgggcaccatgcagggtcactacgaaatgatcgatgaaaatggcgtccctttcagcatcgacattccccgacccctgacacaaacgcattttgtgatgagtgcgcctgatattcgccacctaccttccgataccggaattgaagtggcttttgcaggccgttccaacgcaggtaaatccagcgcgctgaacacgctgactaaccagaaaagcctggctcgtacctcaaaaaccccagggcgcacccagcttatcaacctgtttgaagtggctgacggcaagcgtctggttgacttgcctgggtacggttatgcggaagtcccggaagagatgaagcgcaaatggcagcgtgcgctcggcgaatacctcgaaaaacgtcagagcctgcaaggtctggtggtgctaatggatattcgccatccgctgaaagatttggatcagcagatgattgagtgggcggtagacagcaatatcgccgttctggtgctgctgaccaaagcggacaaactggcaagcggcgcacgtaaagcgcaattgaatatggtgcgtgaagctgtactggcgtttaaacacatcatctcggtacccgtccacgccgccgctgcagcgggtcttttattctctgccatgattttgccagtccgttaa

SEQ ID NO: 139668 - DNA, 1803 bp, Homo sapiens
atgatagagtcaactagtaggtatgatacatgccatacccgctcgaaatatggcgatgaaaccaaccgtctgtatcgccagtactacgcgctgacctggaacggtggctgggataacggcgtgaccaccagcaactgggtgcagtacgaacacacccgtaactcgcgtattccggaaggtctggcgggcggtaccgaagggaaatttaacgaaaaagcgacacaggatttcgtcgatatcgatcttgatgacgtgatgctgcacagcgaagttaacctgccgattgatttcctcgttaaccagacgctgacgctgggtacggagtggaatcagcaacggatgaaggacttaagttccaacacccaggcactgaccggaacgaataccggtggcgctattgatggcgtgagtaccaccgaccgtagcccgtattcaaaagcagaaattttctcgctgtttgccgaaaacaacatggagctgactgacagcaccatcgtaacgccggggctgcgtttcgatcatcacagtattgtcggcaataactggagcccggcgctgaacatatcgcaaggtttaggcgatgacttcacgctgaaaatgggcatcgcccgtgcttataaagcgccgagcctgtaccagactaacccgaactacattctctacagtaaaggtaacgatgacctgaaagcagaaaccagcatcaacaaagagattgtctggagttcaacgcgacggtactggcggcgtcacctgttccgaacgatatcgcataggaccggccatcactccgtgcttgttgtgcgttgtaagaacgtcagtgtttcctgcgcgtacacgcaaggtaaacgcgaacaattcagcggctttaaccggacgctcgacgccattaataatgttttccgtaaattcagcgccttccatgatgagacaggtgcgcgtgatattcgccacgtaccttgcgataccggaattgaagtggcttttgcaggccgttccaacgcaggtaaatccagcgcgctgaacacgctgactaaccagaaaagcctggctcgtacctcaaaaaccccagggcgcacccagcttatcaacctgtttgaagtggctgacggcaagcgtctggttgacttgcctgggtacggttatgcggaagtcccggaagagatgaagcgcaaatggcagcgtgcgctcggcgaatacctcgaaaaacgtcagagcctgcaaggtctggtggtgctaatggatattcgccatccgctgaaagatttggatcagcagatgattgagtgggcggtagacagcaatatcgccgttctggtgctgctgaccaaagcggacaaactggcaagcggcgcacgtaaagcgcaattgaatatggtgcgtgaagctgtactggcgtttaacggtgatgtgcaggttgaaacgttttcttcgttgaagaaactaggcgtggacaagctgcggcagaaactggatacctggtttagcgagatgcagcctgtagaagaaacgcaggacggcgaataattttcttgccttaatgcttgtgctggatgtggcgtatccggcccgtaaattcaatagattacaattctcccgttggcctgataaacatagcgcatcaggcattacggatcttttctttcgcccaataaaaaacgccccagtcatttctgcttggggcggctaaaatattcagccaactccgatttcgcaaagtaaaaggtgtgaaagatagaccattttacctttgtaacgaactcgtcaggccgggatctccgctccggttcctgcaggcgtcccccc

SEQ ID NO: 139669 - DNA, 1121 bp, Homo sapiens
agcgcggacggcatacacgtgcatcgcctcgcgcctacggccaaaatggcggcttccggtcagatgcagtaaggttttcagatcgcgtaaatcctcagggacagccctcgatgttgacgttgcaaaaattgcaatgtgacgttgtagtacagcaccttaacaggaagacaccattggatcaggggtcctcaggtgaggtgaatgtgcagcaaaagattacatcaggagcaggtctgaagccctgcatgcgcctgccagtggcaggcttctgtgatgctttgccccacttctcacaaagcatggcttctggggacaggacagagttgcaggatgctcagtcagtgctccttgagtgcatgaagggcacacaggcaaagatgacacaaggtgagagctttgcggaaggaggctgcaaagaatgggaggtagcaaactgcaagcactttcctgaaaagggggaaatgcgcgtcacggcaaagcaagctgtgcggcaaccgccgcagaaagcgccgccagcgcatcagttcatattgtttgcttcgtggaactgcttgctcaccagcacatcagccagatgcgtttcaccaaaagcgaggaaacgcaggcaggcattacgcagagtgcgttttgcaatattcttcatgctcaacacggtactcgctctgggcggcacccagcttatcaacctgtttgaagtggctgacggcaagcgtctggttgacttgcctgggtacggttatgcggaagtcccggaagagatgaagcgcaaatggcagcgtgcgctcggcgaatacctcgaaaaacgtcagagcctgcaaggtctggtggtgctaatggatattcgccatccgctgaaagatttggatcagcagatgattgagtgggcggtagacagcaatatcgccgttctggtgctgctgaccaaagcggacaaactggcaagcggcgcacgtaaagcgcaattgaatatggtgcgtgaagctgtactggcgtttaacggtgatgtgcaggttgaaacgttttcttcgttgaagaaacaaggcgtggacaagctgcggcagaaactggatacctggtttagcgagatgcagcctgtagaagaaacgcaggacggcgaataa

SEQ ID NO: 139670 - DNA, 1179 bp, Homo sapiens
gacctgcgaaaatccaacggttaatggagcggccaacgccatagacgacatggctgccgagactgcagagactataagtaagcgtttccacatagggttgtcctcgtcggggtagttattattggttaaaagatgttcgcgaaaaaactatagacaattcgttatgtaacagattgcgttacatcacacttcaaaaaagtaaataaaacgttaatcacaagtttgtaatcgctttcatctcactatgaaaaatgcggctacggttatggattttcctgctctgtataccgtcttaaaactggtgaaaaaggaaaatgaagacgaaaacaagcgaagacattcggcgcgagttggctataatactcggcacttgtttgccacatatttttaaaggaaacagacatgagcttactcaacgtccctgcgggtaaagatctgccggaagacatctacgttgttattgagatcccgcgtaacgcagatccgatcaaatacgaaatcgacaaagagagcggcgcactgttcgttgaccgcttcatgtccaccgcgatgttctatccatgcaactacggttacatcaaccacaccctgtctctggaggaggatagcgaccatgctgcgggcattagcccgccttcttctcaggatatgtttttctggccggactctaaagattgcctgcttactgttacttgtggcaggagcgaccatccttatcgccgatcgccagcgttgtaccacgccggaaaagtgaaatggctgctggtaagtggcgataacggacgtaaaaattacgatgaagcatcaggtatgcagcaggctttgatcgctaaaggcgtaccagcaaaagtgatcttctgcgactatgccggattctcaacgctggattcggtagtgcgtgccaaaaaggtttttggtgaaaaccatatcaccattatctcgcaagaatttcataatcaacgcgccatctggctggcaaaacagtacggcatcgacgctatcggttttaacgcgccagacctcaatatgaagcacggtttttatactcaactgcgggagaaactcgttattgcaaagggacatgggagcctactcacagacctcccagtggccaaagctggaacaatgtgggcaatagaaatagatgacgtggccaggcacagtcgctcacacctataa

SEQ ID NO: 139671 - DNA, 627 bp, Homo sapiens
tcaatccgttctactcagcgatgcgtaacatcggcgggtattcgtcacattctggcgcgtcatgtggaaggtgcttcgcacatggcggaaggttatacccgcgctacggcagggaatatcggcgtatgtctggggacttccggtcgatgctgctttcggctctgctggtaaattatcgcccggtatgcagtaacgaaatttaccgccctgatttacgcgaatcagacgacctttgctgattgccattgccagcgttgaagccactttgcgtgatgtggtaccaaacaatgtagccagctcatcagccgtttgtggtcctcgttgttcaatcgtcgcggttaaatcgcactctgagattttcgctactgttgctgtggtgatttcttccggcagttctgcctgcgctggctgttcctgctgaacattgttatcagccacacgccaggtgtacgcgcttttatcaacaaaaccagcctttttcagttcccatagttcgttcagcacttcttcacgactgatatcaagtcgcgcagcaagttctatggatgtggcttttcccattgctttcagtgcgtcaaaaacagtctccattaaatttttctcccggtaaaaattacttcgcaattc

SEQ ID NO: 139672 - DNA, 1227 bp, Homo sapiens
gggcagaattacacttcaattctggctgggtggccaccggataccaacgttgaagagttcgaatttgccattcgtacggtctgtgaacctatctttgagaaaccgctggccgaaatttcgtttggacatgtactgttaaatctgtttaatacggcgcgtcgcttcaatatggaagtgcagccgcaactggtgttactccagaaaaccctgctctacgtcgaaggggtaggacgccagctttatccgcaactcgatttatggaaaacggcgaagcctttcctggagtcgtggattaaagatcaggtcggtattcctgcgctggtgagagcatttaaagaaaaagcgccgttctgggtcgaaaaaatgccagaactgcctgaattggtttacgacagtttgcgccagggcaagtatttacagcacagtgttgataagattgcccgcgagcttcagtcaaatcatttggcccagcccaattggccgcgcctgtccccggatcccggtattctctcggagcctaaagcggcgctgacactgctggtagaagtggcgcaggagatgcaaaaagcgggtcgtctgccgtgtcgtaaagaatgggtcgccgactgccagcagcgtaaacgcactttgctgcgcaaaacccacttcgacaacgtgccggtgaaaccgcagcgcgtgtatgaagagatgaacaaagcctttggtcgcgatgtttgttatgtcaccaccattggtctgtcacaaatcgctgcggcacaaatgctgcatgtctttaaagaccgccactggatcaactgtggtcaggctggtccgttaggctggacgattccggctgcgctaggggtttgtgccgctgatccgaaacgcaatgtggtggcgatttctggcgactttgacttccagttcctgattgaagagttagctgttggcgcgcagttcaacattccgtacatccatgtgctggtcaacaacgcttatctggggctgattcgtcagtcacaacgcgcttttgacatggactactgcgtgcaactcgctttcgagaatatcaactccagtgaagtgaatggctacggtgttgaccacgtaaaagtagcggaaggtttaggttgtaaagctattcgggtcttcaaaccggaagatattgcgccagcctttgaacaggcgaaagccttaatggcgcaatatcgggtaccggtagtcgtggaagtattctcgagcgtgtga

SEQ ID NO: 139673 - DNA, 1470 bp, Homo sapiens
atggaaaaagtcatgttgtcctttgacaaagtcagcgcccactacggcaaaatccaggcgctgcatgaggtgagcctgcatatcaatcagggcgagattgtcacgctgattggcgcgaacggggcggggaaaaccaccttgctcggcacgttatgcggcgatccgcgtgccaccagcgggcgaattgtgtttgatgataaagacattaccgactggcagacagcgaaaatcatgcgcgaagcggtggcgattgtcccggaagggcgtcgcgtcttctcgcggatgacggtggaagagaacctggcgatgggcggtttttttgctgaacgcgaccagttccaggagcgcataaagtgggtgtatgagctgtttccacgtctgcatgagcgccgtattcagcgggcgggcaccatgtccggcggtgaacagcagatgctggcgattggtcgtgcgctgatgagcaacccgcgtttgctactgcttgatgagccatcgctcggtcttgcgccgattatcatccagcaaattttcgacaccatcgagcagctgcgcgagcaggggatgactatctttctcgtcgagcagaacgccaaccaggcgctaaagctggcggatcgcggctacgtgctggaaaacggccatgtagtgctttccgatactggtgatgcgctgctggcgaatgaagcgtcggagagaaaattatggctggagatgttatctcccccaaaagacgactctaaggatccccaggcaaaactgtttatcaccgcagcaaccgaaggtcggggaatggatgccctgcgcgagcatctgcttcagttgccggaacgcgagcacgccagccaacatagtttccgcctcgcgattgaccgcgcatttaccgtaaaaggtgccgggctggtcgtcaccggtacggcgttaagcggggaagtgaagataaccttgctgaactggtcttcgacaccccgttatggctggcagaatgatacgcccaacgcgccggtggtgacgcgtgaagcgcagttagatattcagtcgcaatcacaaccgccgacagaagaacagctgcgggcgcaattagttaccccacaaaatgatcctgatcaggtggctccggtcgctccagaacctatacaggaaggccagccagaagagcagccgcaaactacccaaacgcaaccattccagccagatagcggaattgataatcaatggcgctcttaccgtgtcgaacccggtaaaacgatggcgcagctgttccgcgaccacggactgcccgctaccgatgtctatgcaatggcgcaggtagaaggcgcgggtaagccgctgagtaatttgcaaaacgggcagatggtgaaaatccgccagaacgccagcggcgtggtgacgggcttaaccattgatacggggaataatcaacaggtcctgttcacccgccagccggatggcagttttattcgtgcgcggtag

SEQ ID NO: 139674 - DNA, 1023 bp, Homo sapiens
ttaccgaattttcgtttcacaggaagagaaagttatttcgtcagtcccaggcgttcgggtgctaactgcctggagttcacagctacttccagttaggccgctgtggatagtttctccaagtggaataggagttaaaagcacatgagcatgcaactgggatgcacttctgtcatgttctagcaccactgtcttagtatcggtctgttcgtgcgtgcccgtgatgccatctactgtatggccgggatgttgtacaggtgatctagcaagtcccgtgtgttctgatgagacagaggttttgagagcacagaggtacgccaaagggctctggttaaaacaaagaggtacctggcgaaatttttcgccgtactgctcgcgggtcatattggattgccagtcggaagtgagcgtgaaatcttcctgcggcgagaattgctggctttccagccaggcccgacgggcattgacatcattatgactcagcaaagaaactgtatgacgctggtggtcgacaatgagcgcccaatcgtagatacccactgccatatccggcagaacgatatcttgttccgcaatttctggcagtgactcaaaacggcggcccagatcgtagccaaacaaccccagtgcgccgccctgaaatggcaaatcttcgttatgcgttgggcgaatgtctgcgcgatccagcacctgctggagcacctgtagcgggtcatcagtggtcgttgtgcgtttttcgctttcactaacaacggtttctttaccgaaagtggttaaagtgcaaatcggctcggcgaccacaatatcaaagcggctatacggatgatcggcatagccggagtgtaaaagcatcgcccacggcaggtggctcgctcggagaatgtagccgcgtacaggtatcagttccgtaatcagcactgtcacgcacatcaacaggtatgagcccaaatgaaagccagcatgcactgtgattttccggagtcgcaagcctggtcttatcaatcccagattagcaccggccaccat

SEQ ID NO: 139675 - DNA, 759 bp, Homo sapiens
aagcaggtagttatcgtctttaatgtcgaggatttttttgcgcgcggtatcgatgcaatccgaaatgtcctcgtacaactgataccgtatctccggcaatctgacggcaatgttaatatcagtcaccaactcgctgaagccaatccaaagctgatcaccttctggatcgcggcgaacgatatgcacgttttcaagaattttttcggcccctgctttttccacgtatagcatgcaaggaataggctggctttcgtggtgctgccggatcagttgcgtgcaacagcactcgacccaaaaattcgctgacgtcatggagcgatttgaagacggaattctttagtcgttctcgcttttcaatgaatgtcagtttatgaatatcagacatttcttttggtcggagaaaaacctcatccaaccattgacagacgttatccgcgatgtgcttgtagcggtatttcttaagtgagtactgctgatgtagaacctggcctttacgcttagcgcagaccgaagccataggcgctctaaatggcgtaaggatgtggggtaagtcccgtttgacgtagattttgcggcctgaccgagattggtcatcttcgacacgctgcttgaaccactcaagtaggtctggtcgtaagtaggacttgtcatcagcactgtgaatgcgtcgagaatgctcgcccttgcgcgtcacagtatcaaggatgcggccccaaatgtcttcggcgacggtttcgaaactgagaatgaccccatgta

SEQ ID NO: 139676 - DNA, 4570 bp, Homo sapiens
tgacgccgatgaagcagcaaatcaccctggcagacgtggccgacattaaagtctctaccggaccgtcgatgctgaaaaccgagaatggcgcgcccgacgagctggatttatatcgatgcccgcgatcgtgacatggtgtcggtggttcacgatttgcaaaaagcgatagctgaaaaagtgcagttaaaaccgggcaccagcgtggcattctccgggcagttcgagctactggagcgcgccaaccataagcttaaactcatggtgccgatgacgttgatgattatcttcgtgctgttgtatctggcgttccgtcgggtgggcgaagcgttgctgattatcagcagcgtaccgtttgcgctggtgggcggcatctggttgctgtggtggatgggctttcatctttccgtggcgacgggcactggctttatcgccctcgccggggtcgccgccgaatttggcgtggtgatgctgatgtatttacgtcacgccatataggccgtgccgtcgttgaataatccacaaacattcagcgagcagaagctggatgaggcgttatatcacggcgcggtcctgcgcgtgcgcccgaaagcgatgacggtggcggtgattatcgccggtctgctgccgattctgtggggaacgggggctggttcagaggtgaagagcccggattggcgcgccgatgattggcggcatgatcaccgcacctttgctgtcgctgtttattatcccggcggcgtataagctgatgtggctgcaccgacatcgggtgcccctcaacaaaaaagacacacaggggaaaggcgtgaaaaacgcgtcaaccgtatcggaagatactgcgtcgaatcaagagccgacgcttcatcgcggattacataaccgtcatattcaactgattgcgttgggtggcgcaattggtactggtctgtttcttggcattggcccggcgattcagatggcgggtccggctgtattgctgggctacggcgtcgccgggatcatcgctttcctgattatgcgccagcttggcgaaatggtggttgaggagccggtatccggttcatttgcccactttgcctataaatactggggaccgtttgcgggcttcctctctggctggaactactgggtaatgttcgtgctggtgggaatggcagagctgaccgctgcgggcatctatatgcagtactggttcccggatgttccaacgtggatttgggctgccgccttctttattatcatcaacgccgttaacctggtgaacgtgcgcttatatggcgaaaccgagttctggtttgcgttgattaaagtgctggcaatcatcggtatgatcggctttggcctgtggctgctgttttctggtcacggcggcgagaaagccagtatcgacaacctctggcgctacggtggtttcttcgccaccggctggaatgggctgattttgtcgctggcggtaattatgttctccttcggcggtctggagctgattgggattactgccgctgaagcgcgcgatccggaaaacagcattccaaaagcggtaaatcaggtggtgtatcgcatcctgctgttttacatcggttcactggtggttttactggcgctctatccgaacatccccattgactcgataaacacgatgattaacacggcagtcatggtcagaatggaaacgggatcgaaaatcggcataccaaacgacatcggcgtaacaatcgcaaaccatgaagcatcatgtagcccggataaattgacttcattcatcatccacgaaagaggtcagatgggtatcatagctcaaaataaaatcagttcattgggcatgctgttcggtgccatcgcttggatgatggggattatccacttttcattcggccctttctccgcaccaccgccaacgtttgaaagcatcgtggcggacaaaacggctgaaattaaaagaggtcttctcgccggaataaaaggcgaaaaaattaccaccgtggagaaaaaagaggacgtagatgtcgataaaatcctcaatcaaagcggtatcgcactggccattgctgcgctcctttgcgcatttattggcggtatgcgtaaggaaaatcgctggggcattcgcggcgcgctggtttttggcggcgggacgctggctttccataccttgctttttggtatcggcatccattttgctgatattccttatcttttccttcctgaccggcggttcactggtttaagcagcctgaataatgcccgccgggtgatcatcagcgggcattatcgtcagaacttctgttttttctcctccaccttcaccccttgtgtcggccggtgtcatagtcgcgtacaactggcgaatagccatcttgtggacgtggacgaaacgcccccatccagcgcggccgtgcatctttacgccacggacgcagactccattggtaactgcggaacggatcgcgaattttgtccatgtaatccaataaggcgtcatgcattttgctgcgaacgtctgcaaaacggatatcatcgatcagggtatgcatttcatttgggtcattacggcgatcgtaaagtcatcactaacttttattctctgattgccaaaaatcatctttcacactggctcgaaacgctgcccgcgcagattgctaactggcagcgcgagcagcagcacgggttgtttaagcagtggtcaaatgcggtggagtttctacctgaaattaaaccgtatcgtcttgatttattgcatagcgttacggcagaaagcgaagagccactgagcgcagggcaaattaaacgcattgaaacgctgatgcgcaacctgatgccgtggcgcaaagggccgttctcactgtatggcgtcaacatcgataccgaatggcgttccgactggaaatgggatcgtgttctgccccatctttctgatttaaccggacgcaccattctggatgtcggctgcggcagcggttatcacatgtggcgcatgattggcgcaggcgcgcacctcgcggtggggatcgaccctacgcaactgtttctgtgccagtttgaagcggtgcgtaaactactgggtaatgatcagcgcgcgcatttgttacctattgaacaacttccggcactgaaagcctttgataccgtcttttcgatgggcgtgctttaccatcgccgttcaccgctggagcatctatggcagttgaaagatcaactggtcaatgaaggtgaactggtgctggaaacgctggttattgatggtgatgagaacacggtgctggtaccaggcgatcgttacgcgcaaatgcgtaatgtctatttcatcccttccgcgctggcgctgaaaaactggctgaagaagtgtggttttgtagatatccgcattgcggatgtgagcgttaccaccacagaagagcagcgacgcaccgaatggatggttaccgaatcgctggccgatttcctcgacccacatgatccggccattttccagatctggccatgcaccttcatgcacgcataccacgccttttttgatcccgtcagtcaccaccgcgcctgtcaaaatctgaccacgtttgttccagacacgcaccagatcgccattcgcaataccaaagcgtgcagcatcttcgtttcatttgcgcttcgtaccacgcattcgtgcgccatttcacattcgtctctagaggatcccccggcgattctgtttaagattgccgatcgaatggaacaaaacctcgagctgttagcgacactggaaacctgggataacggcaaacccattcgcgaaaccagtgctgcggatgtaccgctggcgattgaccatttccgctatttcgcctcgtgtattcgggcgcaggaaggtgggatcagtgaagttgatagcgaaaccgtggcctatcatttccatgaaccgttaggcgtggtggggcagattatcccgtggaacttcccgctgctgatggcgagctggaaaatggctcccgcgctggcggcgggcaactgtgtggtgctgaaacccgcacgtcttaccccgctttctgtactgctgctaatggaaattgtcggtgatttactgccgccgggcgtggtgaacgtggtcaatggcgcaggtggggtaattggcgaatatctggcgacctcgaaacgcatcgccaaagtggcgtttaccggctcaacggaagtgggccaacaaattatgcaatacgcaacgcaaaacattattccggtgacgctggagttgggcggtaagtcgccaaatatcttctttgctgatgtgatggatgaagaagatgcctttttcgataaagcgctggaaggctttgcactgtttgcctttaaccagggcgaagtttgcacctgtccgagtcgtgctttagtgcaggaatctatctacgaacgctttatggaacgcgccatccgccgtgtcgaaagcattcgtagcggtaacccgctcgacagcgtgacgcaaatgggcgcgcaggtttctcacgggcaactggaaaccatcctcaactacattgatatcggtaaaaaagagggcgctgacgtgctcacaggcgggcggcgcaactgctggaaggtgaactga

SEQ ID NO: 139677 - DNA, 2950 bp, Homo sapiens
gttttgtcagtcagggtgagctggtcatatacaccgcccgcgatatcagcacggcgttgggactgaaagcacatccataatgtctgtcgcatcccgctctgcggagcgggtttttttgacaaaatttgaaagttggaaaaattttccaataaatagaggtaggaataaaatggcaaaaatgagagccgttgacgcggcaatgtatgtgctgaagaaagaaggaatcatctcccgccttcggttgttccgggagctgccaatcaatccgttttactcaccgatgcgtaagcacggccggtattcgtcacattttggcgcgtcatgtggaaggtgcttcgcacatggcggaaggttatacccgcgcaacggcagggaatatcggcgtatgtttggggacttccggtcctgcgggcacggacatgatcaccgcgctctattccgcttctgctgattccattcctattctgtgcattaccggccaggcaccgcgcgcccgtctgcataaagaagattttcaggccgtagatattgaagcaattgctaaaccggtcagcaaaatggcggttacagttcgtgaagcggcgctggtgcctcgcgtgctgcaacaggcatttcacctgatgcgttctggtcgtccgggtccggtactggtggatttaccgttcgacgttcaggttgcggaaatcgagtttgatcctgacatgtacgaaccgctgccggtctacaaacctgctgccagccgtatgcagatcgaaaaagctgtagaaatgttaatccaggccgaacgtccggtgattgttgccgggggcggggtaattaatgctgacgcagctgcactgttacaacagtttgctgaactgaccagcgttccggtgatcccaacgctaatgggctggggctgtatcccggacgatcatgaactgatggccgggatggtgggtctgcaaaccgggcatcgttacgagaaatacaccgaagggcgcaaaatcgttcatattgatattgagccgacgcaaattggtcgcgtgctgtgtccggatctcggtattgtctctgatgctaaagcggcgctgacactgctggttgaagtggcgcaggagatgcaaaaagcgggtcgtctgccgtgtcgtaaagaatgggtcgccgactgccagcagcgtaaacgcactttgctgcgcaaaacccacttcgacaacgtgccggtgaaaccgcagcgcgtgtatgaagagatgaacaaagcctttggtcgcgatgtttgttatgtcaccaccattggtctgtcacaaatcgctgcggcacaaatgctgcatgtctttaaagaccgccactggatcaactgtggtcaggctggtccgttaggctggacgattccggctgcgctaggggtttgtgccgctgatccgaaacgcaatgtggtggcgatttctggcgactttgacttccagttcctgattgaagagttagctgttggcgcgcagttcaacattccgtacatccatgtgctggtcaacagacctgcagcgaatggagctcaggggtcatgtcaccctgacgcgccggcggttttccgctcatctatcttcatacgaaaaagcgaagaaaaacttgtggtcacaatgaatgaattgagtgcgtcacgagcgttaccagaggaaaccatgcccggacgctttgaactaaaaccaaccctggagaaagtcttgcacgcgccggacaattttctcttcatggaccctctgccgccgatgcatcgtcgggggatcattattgccgccattgtattggcggtcggatttctgcttccatctgatgatacgcccaacgcgccggtggtgacgcgtgaagcgcagttagatattcagtcgcaatcacaaccgccgacagaagaacagctgcgggcgcaattagttaccccacaaaatgatcctgatcagaacctatacaggaaggccagccagaagagcagccgcaaactacccaaacgggacttaccccacatccttacgccatttagagcgcctatggcttcggtctgcgctaagcgtaaaggccaggttctacatcagcagtactcacttaagaaataccgctacaagcacatcgcggataacgtctgtcaatggttggatgaggtttttctccgaccaaaagaaatgtctgatattcataaactgacattcattgaaaagcgagaacgactaaagaattcggtcttcaaatcgctccatgacgtcaggactgtagaggatccaagtggtactcagctcgaagtcgtctcaaataacccgtgggatccgaagcgtcagttgctgaaatgggacggcactaagtggaccggctgggatattccggactacagcgcagcgcctccggaggccgtgccgtcgttgaataatccacaaacattcagcgagcagaagctggatgaggcgttatatcacggcgcggtcctgcgcgtgcgcccgaaagcgatgacggtggcggtgattatcgccggtctgctgccgattctgtggggaacgggggctggttcagaggtgatgagccggattgccgcgcctatgattggcggcatgatcaccgcacctttgctgtcgctgtttattatcccggcggcgtataagctgatgtggctgcaccgacatcgggtacggaaataaaagcaggataccccgtttaaccgtgtggattgtgtcttgcgacgatgggcactaaatgttaaaaggtgcccctcaacaaaaaagacacacaggggaaaggcgtgaaaaacgcgtcaaccgtatcggaagatactgcgtcgaatcaagagccgacgcttcatcgcggattacataaccgtcatattcaactgattgcgttgggtggcgcaattggtactggtctgtttcttggcattggcccggcgattcagatggcgggtccggctgtattgctgggctacggcgtcgcc

SEQ ID NO: 139678 - DNA, 570 bp, Homo sapiens
ctcgttctgctggccgaccaaatgctcgccctggacgatcagtacacgtttttacagcgtatcccgcgcagcccatacgggctggcatttggtcctgttcctcatctccattatctccatcagatgcgattgctggatatcgccccgatcgcttttagggctatgtccctcgcctttccggtcaattatctggatgcagtccgcactggcagcatatgttcaaactgcaaccagcggagcaacgattcggcgatgggcatctcaatgaacgtatccaccttgatgagggttcgagccatttgggtatatgctgcttatatggagcgcgtgctggataatttgctcaataacgccctgcggtactgccattcaacggttgaaaccagcctgctactgtcggggaatagagcgacattaattgttgaggatgatggcccagggattgccccagaaaaccgcgaacatatctttgaaccttttgttcgcctcgatcccagccgggatcgctcaaccggcggctgcgggctggggctggcaattgtccactctatagcacgtggcaactgggcg

SEQ ID NO: 139679 - DNA, 876 bp, Homo sapiens
cgcaacagctgctgaatattagacctttgtcagacgcatagtttgcaaaaatcgtggtgaactggagataacgtccatcaaccagatgtacctcgaggcgggcaacctgaccgttgaactgctcgggcgcggatttgcctggctggataccggcactcacgacagcctgattgaagccagcacctttgtacagacggtggaaaaacgcaagggctttaagattgcctgccggggaaaacgccttcttgggtgttaacagcgccatcgtgcgcataacgtctgaagcaccgctcctgacgccagacgcgtaagcgccgcggtcacgggtgcaggccaaaattgcggcatcaaatacgggtgaactgaatgccctgcaacagctgggattctcccctggtagaaggtgaagttgatttggcgctaacccgtgaacaatgcccagtgatagcggtgctgtagtggcaccaagagacggatattcccgcataacgtcagttagccagcgccgcatttgcgcaaagccgttttcgtgcgccgtggtatgcgcctgacgccagcagtcgcttttatgcacagtggattgaaaatgccgtgcgcggcacctttgatcatcaatgtctgattttacgtgcggcgtccggcgatattcgcggctatgtctctttacgggaactcaatgcgacagatgcgcgaattggcctgctggctggacgcggtgcaggtgctgagctgatgcaaacggcgctaaactgggcgtatgctcgcggtaaaacaactttgcgggtggcgacccaaatgggcaacaccgccgcgcttaaacgatacatacaaagtggtgcgaatgtagaaagcaccgcgtactggttatacaggtga

SEQ ID NO: 139680 - DNA, 1570 bp, Homo sapiens
gttttcaccaccaggcttgcacgatgcaggtgaggcggtgttctggcgggtgaataaatcggcaaactacggagtactggataagttggcccgaggatatgcagatctgtcaaaagcggagagtcagtgggatgagatgatgcgaaccgctggttcgctgaagttgggtacaattcatgcgtccatcaactcattgtttgagaacattaccgccgctcctgccgacccgattctgggcctggccgatctgtttcgtgccgatgaacgtcccggcaaaattaacctcgggattggtgagaatcccagctgttgcaggacatccagttcacccgtatttgatgccgcaatttggcctgcacccgtgaacaatgccagtgatagcggtgctgtagtggcacaagagaccgatattcccgcattacgtcagttagccagcgccgcatttgcgcaaagccgttttcgtgcgccgtggtatgcgcctgacgccagcagtcgcttttatgcacagtggattgaaaatgccgtgcgcggcacctttgatcatcaatgtctgattttacgtgcggcgtccggcgatattcgcggctatgtctctttacgggaactcaatgcgacagatgcgcgaattggcctgctggctggacgcggtgcaggtgctgagctgatgcaaacggcgctaaactgggcgtatgctcgcggtgatcacatgattccatttaacgcaccgccggtggtgggaaccgaactcgactatatgcagtcggcaatgggtagcggcaaactgtgtggcgatggcggttttacccgtcgctgccagcagtggctggagcaacgttttggcagcgccaaagtgttactgacgccgtcctgcaccgcttcgctggagatggcggcgctgctgctcgatatccagcctggcgatgaagtgatcatgccgagctacacctttgtctccaccgccaatgcctttgtgctgcgtggcgcaaaaatcgtttttgtggatgttcgcccggacaccatgaacatcgacgaaacgctgattgaagcggcgatcaccgacaaaacgcgcgttatcgtgccggtccattacgcgggtgtggcctgcgaaatggacaccattatggcgttggcgaaaaagcataatttgtttgtggtagaagatgccgctcagggcgtgatgtccacttacaaagggcgtgcactgggaaccattggtcatattggctgctttagcttccatgaaaccaaaaactacacggcgggcggtgaaggcggcgcgacgctgattaacgataaagcgttaatcgaacgagccgagatcatccgtgaaaagggcactaaccgcagccagttcttccgtggtcaggtcgataaatatacctggcgcgatattggctccagctatttgatgtccgatctgcaagctgcatacctgtgggcgcaactggaagcagcggatcgtatcaaccagcaacgtctggcgctgtggcaaaactactacgatgcgttagcgcctctggcgaaagccgggcgtatcgagctgccgtcgattggtaccgagcatcgattg

SEQ ID NO: 139681 - DNA, 1875 bp, Homo sapiens
ttaaggaaatgtgcattgaatttgagtggagattgatgacttgacaatgacgagttgaagagaaccatgtgttggatgatgctgttggataatagcatgtgggttgaccactggtaaatgcccttgacagaatgaataattgacacctctccatgacgaatgacgtaatgcccaacatggtggctgttttcgttttcggatcaaacgggcaccttgatctcgatatgatgtacatggaacgatgtatacatgcaccaacggtgaatgaccataactggaaagacgaaaacgttgctggcacatggctgggtacccggccgtgtagttatgttggctgtgcgcagcaaattgcgcgctgaagtggtccattgccagtgctatagagtggacaattgccagccccagcccgcagccgccgtttgagcgatcccggctgggatcgaggcgaacaaaaggttcaaagatatgttcccggttttctggggcaatccctgggccatcatcctcaacaattaatgtcgctctattccccgacagtagcaggctggtttcaaccgttgaatggcagtaccgcagggcgttattgagcaaattatccagcacgcgctccattaagcgcatatccaacgccgcataatggccttgcacgagcgtttttatccgtaccgttttatcgggcgttactgcctgaatatctgccagatgcgttgacagccacaacggcaggtctggttcgctaagatgaagctcgttttgtgggcgatcgagtcgggcataagtcagcagctcttcaattaaagcttcaagttgactgatatcacgattcaacgcctgggattcggcggcgctcaggttatcgctcatctccagtcgataacgcaggcgcactaacggtgttcgcagttcgtgagcgataccgtcaataagctgttttttgctggcaattaaggcgttgatattgtccgccatctggttaaatgcgacgccaagtcgttcaaagctcgaaccctcatcaaagtggatacgttcattgagatgcccatcgccaaatcgttgcgccgctgcttccagttttaacatatcctgccagtggtttctttctgagtatggtcccccgaaccaggttgccagcgggaaaacatccccatttgtgatcgtgttcaagcaaccccggtatcgggctgtcacgaagccgaactgtcgcttgatgatgcgaaatgggtgctccaccctggcccgtatgctgcctgtcatgtatgcgatgctgatgcccgttctgttcttgcgtggatgctgtttcaaggttcttaccttgccggggcgctcggcgatcagccagtccacatccacctcggccagctcctcgcgctgtggcgccccttggtagccggcatcggctgagacaaattgctcctctccatgcagcagattacccagctgattgaggtcatgctcgttggccgcggtggtgaccaggctgtgggtcaggccactcttggcatcgacaccaatgtgggccttcatgccaaagtgccactgattgcctttcttggtctgatgcatctccggatcgcgttgctgctctttgttcttggtcgagctgggtgcctcaatgatggtggcatcgaccaaggtgccttgagtcatcatgacgcctgcttcggccagccagcgattgatggtcttgaacaattggcgggccagttgatgctgctccagcaggtggcggaaattcatgatggtggtgcggtccggcaaggcgctatccagggataaccgggcaaacagacgcatggaggcgatttcgtacagagcatcttccatcgcgccatcgctcaggttgtaccaatgctgcatgcagtgaatgcgtagcat

SEQ ID NO: 139682 - DNA, 1249 bp, Homo sapiens
atggagcgcgtgctggataatttgctcaataacgccctgcggtactgccattcaacggttgaaaccagcctgctactgtcggggaatagagcgacattaattgttgaggatgatggcccagggattgccccagaaaaccgcgaacatatctttgaaccttttgttcgcctcgatcccagccgggatcgctcaaccggcggctgcgggctggggctggcaattgtccactctatagcactggcaatgggcgtcaacgctcaggccgatttcatgaagctgacaggcgctgatgagcaaatcgcggcttattgcttcaagatgccattcgttttccacctgatcgaagaagttagccgcaactttggctacgcgctgtgcctgatcaatatcgatcataaagcggcgttgaatattacgcagcgtacggctgcgaatatcctgctcgacggccagatgcaacatgccgtagaccaggccttcacgcagcgcaccgcccgccagggtagcacgtttgtacagtatgcccgacttgctcgaaaactggctacggccaatatctgctggagttacttcgtgcccgtccgcgccagtattgagccactaacctgggaaaacgccttctttggtgttaacagcgccatcgtgcgcattacgtctgaagcaccgctcctgacgccagacgcgttagcgccgtggtcacgggtgcaggccaaaattgcggcatcaaatacgggtgaactggatgccctgcaacagctgggattctccctggtagaaggtgaagttgatttggcgctacccgtgaacaatgccagtgatagcggtggctgtagtggcacaagagaccgatattcccgcattacgtcagttagccagcgccgcatttgcgcaaagccgttttcgtgcgccgtggtatgcgcctgacgccagcagtcgcttttatgcacagtggattgaaaatgccgtgcgcggcacctttgatcatcaatgtctgattttacgtgcggcgtccggcgatattcgcggctatgtctctttacgggaactcaatgcgacagatgcgcgaattggcctgctggctggacgcggtgcaggtgctgagctgatgcaaacggcgctaaactgggcgtatgctcgcggtaaaacaactttgcgggtggcgacccaaatgggctacaccgccgcgcttaaacgatacatacaaagtggtgcgaatgtagaaagcaccgcgtactggttatacaggtga

SEQ ID NO: 139683 - DNA, 2006 bp, Homo sapiens
atgttcggtaataccaacggtgtaagtgccgtcggcttctttacgcagccattcgtgttctttgctgtatttcagttctgctgtaaatcacgcgacggctttgccgttacgcacaaaaacaggttttgtcactttaaccggcatttcacggttgcgaatttgcacaatcgccgtttcgccaataccttccggcacgcgcgccagcgcaatgctgtaacccagcgtcggggagaaagtaccgctggtgataatgccttcatgctggttgccctgcgcatcggcttcagtccgaagctgcgtcatgttgcggcgcgcaccgaaggggcgacggtttttggctatcaggtgatggacccggaacgctttggcgtggtggagtttgacgacaatttccgcgctatctcgctggaagaaaagccaaaacagccgaagtcaaactgggcggtgaccgggctttatttctacgacagtaaagtcgtggagtacgcaaagcaggtgaagccgtcggagcgtggtgaactggagattacctccatcaaccagatgtacctcgaggcgggcaacctgaccgttgaactgctcgggcgcggatttgcctggctggataccggcactcacgacagcctgattgaagccagcacctttgtacagacggtggaaaaacgccagggctttaagattgcctgcctggaagagattgcctggcgtaacggctggctcgatgacgagggtgtgaagcgtgctgccagttcattagcgaaaactggctacggccaatatctgctggagttacttcgtgcccgtccgcgccacgccatcgtgcgcattacgtctgaagcaccgctcctgacgccagacgcgttagcgccgtggtcacgggtgcaggccaaaattgcggcatcaaatacgggtgaactggatgccctgcaacagctgggattctccctggtagaaggtgaagttgatttggcgctacccgtgaacaatgccagtgatagcggtgctgtagtggcacaagagaccgatattcccgcattacgtcagttagccagcgccgcatttgcgcaaagccgttttcgtgcgccgtggtatgcgcctgacgccagcagtcgcttttatgcacagtggattgaaaatgccgtgcgcggcacctttgatcatcaatgtctgattttacgtgcggcgtccggcgatattcgcggctatgtctctttacgggaactcaatgcgacagatgcgcgaattggcctgctggctggacgcggtgcaggtgctgagctgatgcaaacggcgctaaactgggcgtatgctcgcggtaaaacaactttgcgggtggcgacccaaatgggcaacaccgccgcgcttaaacgatacatacaaagtggtgatcacatgattccatttaacgcaccgccggtggtgggaaccgaactcgactatatgcagtcggcaatgggtagcggcaaactgtgtggcgatggcggttttacccgtcgctgccagcagtggctggagcaacgttttggcagcgccaaagtgttactgacgccgtcctgcaccgcttcgctggagatggcggcgctgctgctcgatatccagcctggcgatgaagtgatcatgccgagctacacctttgtctccaccgccaatgcctttgtgctgcgtggcgcaaagatcgtttttgtggatgttcgcccggacaccatgaacatcgacgaaacgctgattgaagcggcgatcaccgacaaaacgcgcgttatcgtgccggtccattacgcgggtgtggcctgcgaaatggacaccattatggcgttggcgaaaaagcataatttgtttgtggtagaagatgccgctcagggcgtgatgtccacttacaaaggggcgtgcactgggaaccattggatccatcacagtttgcccgtctgactatgaaaactgacacacttatgtgccttaacatcactgagctttgtaaaacaaataaacaaatgactttcttgatgtga

SEQ ID NO: 139684 - DNA, 1893 bp, Homo sapiens
ttaataatcgatccctatctgcgcttttacaccggcatcaaacgcatgtttgacggggcgtaattcacttaccgtatctgccagttcaagaatatcccgatgacaaccacgacccgtgataatcaccgtctgttgatgtggacgttcatttaacgcctgcaccacttcttccagtggcaaatagtcatacgccaccatatacgtcagttcatcaagcaaaaccatatccagtgaggaatcagcaagcatccgctttgcatgttgccagacttcgcggcaggcggcggtatcagactcgcggttttgtgtatcccaggtaaagcccgttgccatcacctgaaactcaacgccatgtggctccagcagattgcgttcgccattaggccaggtgcctttaataaactgcacgacgcctactttttttccgtgaccaactgcgcgtgttgccgtaccaaatgccgcggtggttttgccttttccattgccggtaaagacgatgataataccgcgttccttggggagacgcagatccggcggaatatgccgaccattggggtacctggtagccatggacgctatcgacgggctgcagaacgccgataactcaaacggcgaaagccgtatagcgacctcttctttcaggtcgcgcagcgcgcggcgatagttctccagttgcttcaggatacgattaactttatcaaaagtttcctgatattccgcttcttcctggctatcggcgacaattccaccgcccgcagagcagaaaatttgtccgttaatggcagtcagcgtgcggatagtaatactggtatccatgttgccgcaaaagctcaaatagccaatgtgccgcaccaggcattgcgtcgctgcggttccagttcgtcgataatttccatagcccgtactttcggagccccggttattgagccaccaggaaaagctgcgcgcagcagatcgctggcgtgtaactgttctggtagttgcgccgttatggtgcagatgatgcacggcagggaagggttccaccacgaacagctctggtacttttaccgaacctgctacggcaacacgaccgatatcattacgcattaaatcgacaatcatcagattttcggcacgatctttcgctgagttcgccagttttactgcttgtttgctatcttcctgaggatcgggcaggcgtggtagcgtgcctttaatcgggcgggtctggatttcactattatcacaaagaataaaccgctctggcgaaagctttaaaattgcaccctgttcaagacgtaaaaaagcgctaaatggcgcgcggttgccgtgattaagctgaaggaatgcctggcattcatcgccagaataggtcgcatgaaaacgttgggcgagattcacctgatagcaatcaccgctgtgcagatattcctgtacctggcgaaatttttcgccgtactgctcgcgggtcatattggattgccagtcggaagtgagcgtgaaatcttcctgcggcgagaattgctggctttccagccaggcccgacgggcattgacatcattatgactcagcaaagaaactgtatgacgctggtggtcgacaatgagcgcccaatcgtagatacccactgccatatccggcagaacgatatcttgttccgcaatgtctggcagtgactcaaaacggcggcccagatcgtagccaaacaaccccagtgcgccgccctgaaatggcaaatcttcgttatgcgttgggcgaatgtctgcgcgatccagcacctgctggagcacctgtagcgggtcatcagtggtcgttgtgcgtgtttggctgtcactaacaacggtttctttaccgaaagtggttaaagtgcaaatcggctcggcgaccacaatatcaaagcggctatacat

SEQ ID NO: 139685 - DNA, 2565 bp, Homo sapiens
ttaggtgattccttggaaagggcattgaccaattgcgtttccagagggaacaggtatggcattggtgttcctggccacagttttcccatggtgttcctggacaccgcttgatctggtgttccaggaaccgcataacatgggttctgcaccgtattccattgtgtcctggcccgtttccatctttccgacccgttcatcgttaggacgcatattccggttacgccaccagccgacaatcgctgcggtaataattcccgccaggatcggtgccgccaggtcgtgccagaaagtcatggcaaactgcgcgagcgtcatatagccgccttgttgtaatgacaacattttgcggctattcttgaagtgtttccggttacgccaccagctgacaatcgctgcggtaataattcccgccaggatcggtgctgccaggtcgtgccagaaaatcatggcaaactgcgcgagcgtcatatagccgccttgttgtaatgacaacattttgcggctattcttgaagtgtgtcgatagtgatcgacaagccacccagtgagtaaccaaacagactcgccaacagcgccggacgcaccagcggatggtattgcccacggttaaagacgtataccgcccacgccagcgcccagccgccacaggcaagacaacgacactagcgacggaggccgagcgggcaaacaagacagcttcttcctcaccaacggtgtccttgagcacgttccacaccagttcgttgtagatgtacgcataatggttatgcattttctgcggatcggaaccgtcaaaccactgaacatcagttgggatacgttcgccaaagtcggtcttaaagcaatcaacgcccatcgcgaccagacctttcagtttgtcggcgtaccatttgcaggcatccggattggtaaagtcataaatcgccagacctggctgccatttatcccactgccatagcgaaccgtccgggcgtttgagtaaatagcctttctcttgtaactctttaaagacgggggatttttgaccgatataggggttaatccagacgcagattttcagtcctttcgctttcaggcggcggatcatcccttccgggtcagggaaagtcagcgggtcccactcaaaatcgcaccactggaaggctttcatccagaaacagtcaaagtggaaaacatgcagcggcagattgcgttccgccataccatcgataaagctgtttaccgtcgcttcgtcgtagttggtggtaaatgaagtggttagccacaggccgaaggaccacgcgggcggcagcgccggacgaccagtaaagcgggtataacgatcaagtaccgctttcggcgtcgggccgtcgatgaacaagtattcgagatattcactcttcaaagctgaactggactttgggggacttcctccgatcccacggttgtactgatttcgtccgacacctgtgatttctatcactatccggtcaggcctcgggacaggcgctgtccggctggttgcgggatctgtgccggccgggatttggcgtagatcagcaacctggcgcaagagttctgctttaagtatctcgagattatggatcgcagagtggtaatcgcctgccacaaggatatctaacacaatatcaatacgttcggcaacgcgctgggcatcaaattcagacatcaaggacatccagcgttcgaaggcgacggcgggcatcggtttggcaaacaaaaatccttgccgctcattgatcccgttcttggttaaaaaagcatcttcctttgcactctctacaccttcggcgatcacctgaagattcaatgcctgggccacagcgacgatcgcccggaccagtgactgcgagacaggttgtttgtgaatatctcgaacaaaaacctggtcaagtttgatggcatcgatcggaaagcgcgccagttgcgaaagtgaagagtagccggtaccaaaatcatccagatgcacttgcgcacctagttggctaaattgttgaataacagacagtgccagttcatcattctcaatcagacaactctctgtcagttcaacatctatagggcagtattcaaattgaggttcctggagaacctgtttcagggcggtgactggcccggcgtggatctgattccaggccgtaggagatgcgtctttgtggaggtcaggtctaccctcccttttggggccacgctttcgataggcctcccgcgtgtgatgtaaccaggtcggtctagtgtggaaatccgtctgtgggaaccccctttccagcatagagcgcggaataagcgcaatgcctgctcctgcgatcacacaggccaacattccgtgataagactccatctcatggatagttcccggagcggcaccgtcagcatgaaaccagctctcgaagtggcgacgatacgaacaattggcgcggaaggcataaatgttactgccattaacctgactggcacgggttactggcgcatatccttgtggcgtgacgatcatcagtacctcgcggtataccggtatcccgacgatggcagcatggttaatgggtccatcaaataaacgccgcat

SEQ ID NO: 139686 - DNA, 1344 bp, Homo sapiens; identical to SEQ ID NO: 132057

SEQ ID NO: 139687 - DNA, 1116 bp, Homo sapiens
  misc_feature (1)...(1116): n = a,t,c or g
atgctcctgaatgaccagtggatcaatgacaagattaagaagaaaattgaaaaatattttgaaacaaatgataatggaaacacaacataccaaaacctatgggatacagcaaaagcagtaccagaagggaagtttattgctgtgaagaagctaagtctcagaaagataactcacccaagaggacacaaggataaacctgatacccatggcagtagaaagcctacacttacccactcagatgctcatcaatggaggagagacttatgcctggaggaactggaaaagagggggacaatacaaatcagcgacactgaatacggggcaacctcatgtccgagctcgcgagctcgtcgacagcgacacacttgcatcggatgcagcccggttaacgtgccggcacggcctggcgttgcccgcgttattcacgttgatcgctgtcgttacttcgctgttaagcccacaatttatcaggcagatactctggtccaggttgacaaaaacaaggcaacggccattctcagcggcctgagcgatatgatccttacttcatcgcccgagtctgcaccggagatccaactgctgcaatcgcgcatgattctcggtaaaaccattgctgaactgaatctgcgcgacatagttgagcagaagtattttccgattgtgggtcgcggctgggcgagattaaccaaagaaaaaccaggtgagctggcgatcagctggatgcatattccacaactgaatggtcaggatcagcaactgacactcacggttggggaaaacggccactatacactggaaggtgaagagttcaccgtcaatggtatggtcggccagcgtctggaaaaagatggcgttgcgctgactatcgcggacattaaggccaaaccaggaacacagtttgtcctgagccagcgtaccgaactggaagcgattaacgcattgcaggaaacctttaccgttagcgaacgcagtaaagaaagcgggatgctggaacttaccatgactggtgatgatccccagttgattactcgtattctgaacagcatcgctaacaactatttgcaacagaatatcgctcgccaggcggcgcaggattcacaaagcctngtttattaa

SEQ ID NO: 139688 - DNA, 755 bp, Homo sapiens
  misc_feature (1)...(755): n = a,t,c or g
atggtggaacgctatatagcgctggccatgacaaangcattatgcgcacagcacaagatctgccgcagccattgtttggccgcagttgcagcactagagacacggttgtctatcaaatacgacttactcacctgcggcaactggaggcggaaagcatccacattattcgcgaggtggcggcagaattctcaaatccggtgatgctctactctatcggtaaagattccagcgtcatgctgcatctggcgcgcaaggcgttttatccaggtacgctgcctttcccgttgctgcatgtcgataccggctggaaattccgcgagatgtatgagttccgcgatcgtactgctaaagcctacggctgcgaactgctggtgcataaaaacccggaaggcgtggcgatggggattaatccattcgtgcacggcagcgcgaaacataccgatattatgaaaactgaaggcctgaaacaggcgctgaacaaatacggttttgatgccgccttcggtggtgcgcgccgtgacgaagagaaatcccgcgctaaagagcgaatttactctttccgtgaccgcttccatcgctgggatccgaaaaatcagcgcccggagctgtggcacaactacaacgggcaaattaacaaaggcgaaagcatccgcgtcttcccgctctctaactggaccgagcaggatatctggcatacatctggctggaaaatatcgacattgttccgctatatctcgctgcgaacgtccggctaa

SEQ ID NO: 139689 - DNA, 2130 bp, Homo sapiens
agttggttattcactatcaaccgaaaatcacctggcgtggcgaagtgcgcagtctggaagcactagtacgttggcagtcacctgaacgtgggttgattccaccgttggacttcatttcctacgccgaagagtcagggctaattgtgcctttaggccgttgggtgattctcgatgtcgtacgccaggtggcaaagtggcgggataaaggcataaacctgcgagtggcggtaaatatttctgcacgtcagctcgccgatcaaaccattttcaccgccctgaaacaggttctccaggaactcaattttgaatactgccctatagatgttgaactgacagagagttgtctgattgagaatgatgaactggcactgtctgttattcaacaatttagccaactaggtgcgcaagtgcatctggatgattttggtaccggctactcttcactttcgcaactggcgcgctttccgatcgatgccatcaaacttgaccaggtttttgttcgagatattcacaaacaacctgtctcgcagtcactggtccgggcgatcgtcgctgtggcccaggcattgaatcttcaggtgatcgccgaaggtgtagagagtgcaaaggaagatgcttttttaaccaagaacgggatcaatgagcggcaaggattttggtttgccaaatggcactttttgatattagctttgccaaatcgttattccgttaaggaactactcattctaattggtaatttcattcgttctcttacgctccctatagtcgaaacatctgatggcaagaaaatagcggtattgcaaaggaacggttatggatcaaatacgacttactcacctgcggcaactggaggcggaaagcatccacattattcgcgaggtggcggcagaatactcaaatccggtgatgctctactctatcggtaaagattccagcgtcatgctgcatctggcgcgcaaggcgtattatccaggtacgctgcctttcccgttgctgcatgtcgataccggctggaaattccgcgaaatgtatgagttccgcgatcgtactgctaaagcctacggctgcgaactgctggtgcataaaaacccggaaggcgtggcgatggggattaatccattcgtgcacggcagcgcgaaacataccgatattatgaaaactgaaggcctgaaacaggcgctgaacaaattacgacatcccgcgctaaagagcgaatttactctttccgtgaccgcttccatcgctgggatccgaaaaatcagcgcccggagctgtggcacaactacaacgggcaaattaaccaagggcgaaagcatccgcgtcttcccgctctctaactggaccgagcaggatatctggcaatacatctggctggaaaatatcgacattgttccgctatatctcgctgcggaacgtccggttctggaacgcgacggtatgttgatgatgattgatgacaaccgtatcgacctgcaaccgggcgaagtgattaaaaaacggatggtgcgtttccgtacgctgggctgctggccgctgaccggtgcggtggagtcaaatgcacaaacactgccggaaatcatcgaagagatgctggtttccaccaccagtgaacgtcagggccgcgtgattgaccgcgaccaggcggggtctatggagctgaaaaaacgtcagctcattgagttgattatcaacgttcacaatctgctcaagaacggctttggcttccaggttaaggtcaaccgaatcgcgctgctggcgataaacgttgagtttttcttccgcttggtccagctcgctgcgcacttcagttcgggtacgctggctcaggacaaactgtgttcctggtttggccttaatgtccgcgatagtcagcgcaacgccatctttttccagacgctggccgaccataccattgacggtgaactcttcaccttccagtgtatagtggccgttttccccaacctgccaatatactcatacgccaccatatacgtcagttcatcatccattcccatatccagtgaggaatcaccaagcatccgctttgcatgttcccagacttcgcgtcagccgccggtatcagactcgcggttttgtgtatcccaggtaaagcccgttgccatcacctga

SEQ ID NO: 139690 - DNA, 566 bp, Homo sapiens
gagctcggcacccggggatcttcccgctgctgggattcttctgcccattgtttacggtgatggcgatttatcgtggtcgcccgggttggggatttttgatggcatcattgatgcaatttggcgtgattttcacggcaggcatcacgctgttcccctttgtcatgccgtcaagcgtgagtccgatctccagcctgacgttgtgggacagtacttccagtcagctgacgctgagcattatgttggtaatcgtgctgatatttttgcccattgtgttgctctacactctctggagctactacaaaatgtgggggcgcatgacaacagaaactctccgccgtaacgaaaacgagttgtactaaggagcagaaacaatgggggatttactttgggtcgtcggcattttgttgatgtgttcgctctccacccttgtgttggtatggctggacccgcgtctgaaaagttaacgaacgtaggcctgatgcggcgcattaacatcgcatcaggcaatcaataatggccgaaatgaaaagcggaaacctattcgtgaaagcgatcctcttaaagcc

SEQ ID NO: 139691 - DNA, 933 bp, Homo sapiens; identical to SEQ ID NO: 127992

SEQ ID NO: 139692 - DNA, 981 bp, Homo sapiens
ctagtgtctaatagaaggtgatacttgagtattttgtagtgtggaatctcctgtcagaatataagctctgagctctttctctaacttccgggcatattctgccgacatgaccgaagcataatgggttgcgaggtgccacaaaaaagaagcatccggctgggcgagtcggaactcaacggtatgattatccagtttgcggacgcttttcacgttatcggcaaattgcaggctgtcgaagtaggggaagttgctgccgttgacgttatgccacgggttgttgcggtcaaaaattcgctggaaggtaaacaccacatcgtcggcattcattttaccgagtgggagtaaacgcagtcggtttttgtgaaacggaacatcgcgacgcaggtggaagcgataggtcgcgccgttgtcgagtacttcccagctttcggcaagttccggcatcaggcgataggtatagggatcgacatccagcagtcgatcataaaactgggcggtaagggtatcgacaattaacccactgctcgctttggatgggttaaaggtgttgacttgcccgctgacgcaatagacaagaccgctttgccattgacgttcgtgttcaggggtcgtaatgagggctgtgtgcttccgctctttcgtgttctgctctttgtctcgtgtgcgctgcttctcgtctctgtctcgtgtgttctgcgtctgctgttttgttgttcttcttttgtctctctttttgtctggtctgggtggtggcaggtctccaaaggctggggatgttttcagagacaggcgttgagattgtgaggtccagatcttctttcgacgtggaagtttgcttccattgccaatctcaggggctactgctttgattttatgaagggagagaccaagcttccacaggcgattcggacgcgtggccgcccctggaatgcggaccactgctcggcatctgtcggggctggcgaatcccctcactgacat

SEQ ID NO: 139693 - DNA, 1074 bp, Homo sapiens
ctattttgtctgaaaacgccggaaattaatgcgctctatgggataagcaataaaggtgcgggaactttcgataaaattaaaaatgtgctttcgttgataaaaactctgcacggatgaaaatatcgcaactttatggtcatcggcagcatggtatttggaaaaaaagctatcacacacgtagcgggagtcaagaggcgtacggctgtggttgtcggttttaaagttttcgacattcagcgcagccagttccggatagtagttaccggtgatctggcgcagctgctctaccgcgttatcaaggttattacgtgcggtcacttcgttcgccagcacggtatcgtactgtgcgcgggcgttctgcacgtcggtgatcgctaccaggcccacgttaaaacgttgggtggtttgatctaattgacggtagatcgcttctttttgtgcctgtgtataggaaagaacgtcaatagcattcaacacgttgaaataagcggtcgcggtgttgaggatcaaggtttgctgatcggtctgatacgtgacgtcctgaatccctgctgctttttcctgcagcgttaacgcacgccatttcgacatatcaaaaatggattgagttaactgcaaggacgcactggtcgcgttagagttgatgccgttcgcgtcgcggtagccgttgctataggtgtaatctgcacctaaacctaggcaattccgggttactaaggggtgcttggttgataacttggcttcagttcccgggctggattcaagaaatggaaccaggaaggtccggcccatacaatgggggcccacttctaattgacatccagcgcggtatcgcgcgttatgctctccccagcctgacaacaataaacctcttccggggagtttccgcgacactggtagggctgctccggttgatgggtatcctccagccaggcgtaaacatacagtttccacaaactcccgcgcagcaccagttgtaacggcgtctcctccgcaagtgttggcagagtaaccaacgccaatagccagacgattctgcgccagttcacttatttcacctgcatcccggtccat

SEQ ID NO: 139694 - DNA, 1491 bp, Homo sapiens
atgcagcggcgcacgatggcgacgttccgccgtatgactggggacaatcccgatgcaccacgctggttaagatatccgggattcattcctcagttgagaaataacgcagacagtgtaatctttattaatcagatacaaggattattggcagatgagcgttatctctcactactcaactgcgagctgtcgcgtttcaccgatgattacgatgcttcagttcccgcgggcgagattattattgtaccttggatggagcttcaagtgcataacggccacgaaagcgcgccgttccgcgccgtagaccgcatcagctacagcgtaaaacagggcgaagtggtcgggattgtgggtgagtccggctccggtaagtcggtcagttcactggcgattatggggctgattgattatccgggccgcgtaatggcagaaaaactggagtttaacggccaggatttgcagcgtatctcagaaaaagagcgccgcaacctggtgggtgccgaagtggcgatgatcttccaggacccgatgaccagccttaacccgtgctacaccgtgggtttccagattatggaagcgattaaggtgcatcagggcggcaacaaaagtacccgccgtcagcgagcgattgacctgctgaatcaggtcggtattcccgatccggcatcgcgtctggatgtttacccgcatcagctttccggcggcatgagccagcgcgtgatgatcgccatggcgattgcctgtcggccaaaactgctgattgccgatgaaccgaccaccgcgctggacggggaccattctagcgccaatcatcgaactactgctggagctacaacagaaagagaacatggcgctggggtcacgcacccaccacggttcgtcaccaaacagtggctctgctttttgccagatggcctgctgctcttcgctgaagcccgctttgtgatctggcagatgcagccagccgtgatggctgtggatgtcgccgctttcgcgcatcttttcaatcagcaacagtaccagcgcttcatcttccattggcaacgccatacgtcgcagacgttcgcgcccagggccaggcctacaagttcagcgatctacattagccgcatccggcatgaacaaagcgcaggaacaagcgtcgcatcatgcctctttgacccacagctgcggaaaacgtactggtgcaaaacgcagggttatgatcatcagcccaacgacgcacagcgcatgaaatgcccagtccatcaggtaattgccgctgatactacgcagcacgccagaaaaccacggggcaagcccggcgatgataaaaccgattccctgcataaacgccaccagcttgccagcaatagccgggtgcacagagtgatcgagcgccagcagcaaacaaacggaaacgcgccgcccagaccttacccacacaccatcgcccacaataccggcgaattgcatcggcagccaaataaagccgcagaacccccccgattgtaa

SEQ ID NO: 139695 - DNA, 4677 bp, Homo sapiens
atgttgcatttgcctgtcagttatgcacccatcgatgtctggtgggatgaacacggcaggccaggtacaggctgcctgaacactaaaggcagccagcagcagcatcgtcacgattccactacgcaacacattcatcttcaattactcgttatccgggttaagacgacgacgactaataattcgcagcagacgccacagtacccatgccagcaatatcacactgatagccgccagcaccgccagcagaatcggatggtttgccagcgcataccacacgcgctcgaaccacggcagatgacctacgctgttgataccggactcgcggatcaccgcgaccgaaccgaacatggtggcgcgtttgccgctatcgttcagaacgcagaaagcgtattgtgttcctcgccaaagaagacacccgtggaaaatcgttcggaccggaaaaccgaccaagaagtttttcgcgcgcctgaacgcagcctgttaaaaccaaagagaatctcggttccggatttatcagcctgttccgcggagctggaagagcagcttttgatcgccgatgtgggtgtggaaaccacacgtaaaattatcaccaatctgacggaaggcgcatcccgcaagcagcttcgtgacgccgaggcgctctatggcctgctgaaagaagagatgggcgagattctggcgaaagtcgatgagccgctgaatgttgaaggcaaagcgccgtttgtgatcctgatggtgggcgtcaacggtgtgggtaaaaccacgacgattggtaagctggcgcgtcagtttgagcagcagggtaaatcggtgatgctggcggcgggtgatactttccgtgcagctgcggttgaacagcttcagatgagacacttacgagctatacgcaccgtacaggtcatccagcaactgattgagcgcatcactctggctaacgaagcggccgggattggcatctgggagtgggagttgaagccgaatatttttagctgggataagcggatgttcgagctgtatgaaattcctccacatatcaaaccgaactggcaggtgtggtacgagtgcgtgctgccggaagatcgccagcatgccgaaaaagtgattcgtgattcgttgcaatcacgctcgccctttaaactggaatttcgcattaccgtaaaagacggtattcgccatatccgcgccctcgccaaccgggtactgaataaagaaggcgaagtcgaacgtctcctcggcatcaatatggatatgaccgaagtgaaacagcttaacgaggcattgtttcaggaaaaagagcgcctgcacattacgcttgattccatcggtgaagccgtggtctgtattgatatggcgatgaaaattacctttatgaatccagtggcggagaagatgagcggctggacgcaggaagaagcgttaggtgttccgctcctgacggtgttgcatattacttttggcgacaacggaccattaatggagaacatttacagtgccgacacctcacgttccgcgatcgagcaagatgtggtgttgcactgttcttcggtcatgcacttccagcgggccgtgaaccacgttttcgtcagccagaaccgccagcgcagaggccaacccctgcaatcacaggggatcttcaccgatcctcagtcatatattacttacgcgaccgcgctggcttatcgtggcgaaaaagcaaaattaaaaaccgccgagcatgtcggcggctttctgacttacaaagtaacagattacatcagcggcattgccaaacgcacaatgctaatcagcggttgtggccatacacccagcaccagtaccaacagtgcagagatcagcacaacgataccgcccgcgctgtactgccagtttgatgaggccgattgccgaaccgacaaccacggcacccaccagccaccacaagtgtgcctggacaccgaccgccagcacgtagaacttaccgataaagcccagcgtcatcgggataccggccagagacagcatcatcaccgtcatcactgccgcgaggatcggacgatgccagaacagaccgcggtaagagaacagggaatcagcatccgggccacgatacgggctggacatcaggctgaccacgccgaacgcgccgaggctgctgaacagataaccggccagaatatagctgtcgccagagcgggtgacattgtaagcgccagattcggcattccatggaacgccaccatccgcatcggcatatgtatccgttgcccttctggcaaaagcagccacatgcgcggcgttaccatcttccggtgtgtttcgccaacaatttggaacttggaggctttccaatttttgtctgaatgcatactttcaaaggcggtgaccgatgatgagtatgatgatgagaatgatgatcacgatgatgatgatgatgacgatgatgacgatgatgatgatgacgatgagatgatgggatgtgatatgggaatagaatatatgaattaccacccgcctgcaagaacaaccccggatatggacccggaactgcgtgccttcctcgactttaactccacgcatatggagccgtgggatggcccggcgggcatcgtgatgtccgacggtcgttttgccgcctgtaacctcgaccgtaacggtctgcgtccggcgcgctacgtcatcaccaaagataagctcatcacctgcgcctctgaagtcggtatctgggattaccagcctgacgaagtggtcgaaaaaggccgcgtcgggccaggcgaactgatggttatcgacacccgcagtgggcgtattctgcactcggcagaaaccgatgacgatctgaaaagccgccatccatataaagagtggatggagaaaaacgtccgccgactggtaccgtttgaagatctgcccgatgaagaagtgggtagccgcgaactggacgacgacacgcttgccagctaccagaaacagtttaactacagcgcggaagagctggactccgtaattcgcgtactgggcgaaaacggtcaggaagcggtcggttcgatgggcgatgataccccattcgccgtgctctccagtcagccgcgcattatttacgactacttccgccagcagtttgcccaggtgactaacccgcctatcgacccgctgcgtgaagcgcatgttatgtcgctcgccacccgtatcggtcgtgaaatgaacgtcttttgcgaagcagagggccaggcgcaccgtttaagctttaaatacgccgatgtgctctactccgatttcaacaatcacgacggcggcccacaggctgccaacaaatacccgacggattgtgccatccccgagagtgccgcgcctgatgcgcagaaaccacatgccatattgcccccacacatctgcgccaatatgcaaccgctgcggcgcaaaatagagcccacaggaacgtaccagcgcggtatcgcgcgttatgctctccccagcctgacaacaataaacctcttccggggagtttccgcgacactggtagggctgctccggttgatgggtatcctccagcacaaggcgctaaactattacaagttgtccaccagaacgtccgctaatcggcagtggttgagtcgaagttcaagcaccagttgtaacggcgtctcctccgcaagtgttggcagagtaaccaacgccaatagccagacgattctgcgccagttcacttatttcacctgcatcccggtccattcactcactgccgcaacactgtgctgcgcaggtgcatatggaccggggaatccgttaaaggcaggctgcagtagcctggagcgccttatggatattaactccctcaaccctgacggcagcccagtggggagggtgcacttcccttcaagtcttacagtaagggatcctctagagtcacctacagcatggcaaggcgcagctgaaaaccctgctgcaacagctcaagctttgctgagccggacgataacgatgaccattgagaaaattttcaccccgcaggacgacgcgttttatgcggtgatcacccacgcggcggggccgcagggcgctctgccgctgaccccgcagatgctgatggaatctcccagcggcaacctgttcggcatgacgcagaacgccgggatgggctgggacgccaacaagctcaccggcaaagaggtgctgattatcggcactcagggcggcatccgcgccggagacggacgcccaatcgcgctgggctaccacaccgggcattgggagatcggcatgcagatgcaggcggcggcgaaggagatcacccgcaatggcgggatcccgttcgcggccttcgtcagcgatccgtgcgacgggcgctcgcagggcacgcacggtatgttcgattccctgccgtaccgcaacgacgcggcgatcgtgtttcgccgcctgatccgctccctgccgacgcggcgggcggtgatcggcgtagcgacctgcgataaagggctgcccgccaccatgattgcgctggccgcgatgcacgacctgccgactattctggtgccgggcggggcgacgctgccgccgaccgtcggggaagacgcgggcaaggtgcagaccatcggcgcgcatttcgccgaccacgactctcctgggaacctcagggggttctctttcagtctggtcatgatttcgcgtcatgtattgggtagtacgggcatgacgctgtag

SEQ ID NO: 139696 - DNA, 2179 bp, Homo sapiens
atggacgaagcaccggatgccgatgatctgatgctggctgaaacaccgcggacgaagatgctgccgaagccgccgcgcagcgtggaatctgaaatcgggcgcacgactgacccggtacgcatgtacatgcgtgaaatgggcaccgttgaactgttgacgcgcgaaggcgaaattgacatcgctaagcgtattgaagacgggatcaaccaggttcaatgctccgttgctgaatatccggaagcgatcacctatctgctggaacagtacgatcgtgttgaagcagaagaagcgcgtctgtccgatctgatcaccggctttgttgacccgaacgcagaagaagatctggcacctaccgccactcacgtcggttctgagctttcccaggaagatctggacgatgacgaagatgaagacgaagaagatggcgatgacgacagcgccgatgatgacaacagcatcgacccggaactggctcgcgaaaaatttgcggaactacgcgctcagtacgttgtaacgcgtgacaccatcaaagcgaaaggtcgcagtcacgctaccgctcaggaagagatcctgaaactgtctgaagtattcaaacagttccgcctggtgccgaagcagtttgactacctggtcaacagcatgcgcgtcatgatggaccgcgttcgtacgcaagaacgtctgatcatgaagctctgcgttgagcagtgcaaaatgccccgagaaaacttcattaccctgtttacggcaacgaaccagcgatacctggttctacgcggcaatgcgatgaccagccgtggcaatcgtggcgacagcgccatcctgcgcggcttacttgatgccatcaacattctcaatccacacgccgaagtggatgtgatgagccgctatccggtcagttcttcctggctgctcaaccgcccggtaatgggcgatccgctgttcctgcaaatgaaacaacacaacagcgcggcgggcgttgtcgggcgcgttaaaaaagtcctccgtcgccgctaccagcatcaggtattgctctcacgcgtcaccgacactggcaagctgcgcaatatcgccatcgcccagggattcaccgacttcgtgcgcctgctgtcaggttacgacgccattatccaggtcggcggatcgttttttgtcgatctctatggcgtgccgcagtttgaacatgcactttgcacgtttatggcgaaaaagccgctgtttatgattggtcacagtgttggcccgttccaggatgagcaatttaaccaactggcgaactacgtttttggtcactgcgacgcgctgatcctgcgcgaatcggtcagctttgatctgatgaaacgcagcaatatcaccaccgcaaaagtggaacatggcgtcgataccgcgtggctgaggatccccaagcatggcgacatgacgcatatggcggtagcattgttcagggttcagccggggctgcgcattgcgtgcccccaccggcgtggctgttcggtgtgccccggcggagtgacgtccggccatccggtcaatcccctgctcggtgcaaaggtccttcccggtgaaaccgacatcgccctgcccggcccgctgccgttcatcctctcccgcacctacagcagttaccggacaaaaacgctcgcgccggtggggagcctcggccccggctggaaaatgcctgcggatatccgcttacagctgcgcgataacacactgatactcagtgataacggcggcagaagcctgtattttgagcacctgtttcccggtgaggacggttacagccgcagcgagtcactgtggctggtgcgcggcggcgtggcgaaactggatgaaggtcaccggctggccgcactctggcatgcgctgccggaagaactccgcttaagtccgcatcgttatctggcgacaaacagtccgcatgggccgtggtggctgctcggttggtgtgagcgggtgccggaagcggatgaggtgctgcctgcgccgctgccgccgtaccgggtactgaccgggctggtggaccccttcgggcgcacacagacgtttcaacgcgaacgccggtgaattcacggcgaatcacggcgtgacgatgtgctggcgtacttcggctgtactacaccagccagggcagagacccgcacagcattccgcggacgacgtcgcttctatactccggtaa

SEQ ID NO: 139697 - DNA, 1140 bp, Homo sapiens
atgtccatacggagggtcgcctgctgcagcgggagccggccgaccacacactcgggctgtgcattcaacatcgcctccgtcaactgtgccctggaagtgacttttgagtcgacaaaccaaaaactcaacagccagtcgatagcctgcaacagcggttgttgcagggtggcctcttgcgtactcatagtgtcgcgtcccggcatcatcaagtgggtaatggcatttggactgacgcccgtcagcgagcatattcagcgccggttcttcagcgcgacatctgtcagtggcataggggcagcgcgggttaagcaggcagccgttcgggcggtcgtacttgccgggaacgacacctggcaacgacgccagacgttctttgtcctgagcaaattctggcagcgcacgcagcaatgcctgagtatacggcattgtagtgaggaacagttggcaaatttcgcccgattgctcacccataatgaaaaaggcaaaactcgcctctccagcgtactgatgcgcaacgaactgtttaaatcgatggaagggcatcccgagcaacatcgccgcaactggcagctgattgccggagaattacagcattttggggcgatagtatcgccaacaaactgcgcggacacggactctttctgcatcccagtggagggtcccagcccgggcgcggacaaggaggagggtcccagcctggacgcagacccagaggagggttccagcccgggcacagacaaggagaagggtcccaggccggatgcaggcccagaggacgggatcaacagttactacctgaccagcgacggcagcaccatgagttaccgcacccgtgttcgtaccccgagctttgcgcatttgcagcaaattccggcggcgatccgcggcagcctgtatcgattttgttatgtcagatgtggaccgctaattatgcacgagaatcaacaaccacaaaccgaggcttttgagctgagtgcggcagagcgtgaagcgatcgagcacgagatgcaccactacgaagacgcgcgtgcggcgtccattgaagcgctgaaaatcgttcagaagcagcgtggctgggtgccggatggtggatccacgcgatcgccgatgtgctgggtattccggcaagcgacgtcgaag

SEQ ID NO: 139698 - DNA, 1036 bp, Homo sapiens
tcattcgtcatgtgaggtgcatctctcttcgttcttgttatctccgttgtagtgcgtgtctcgtgcttctgttattgtgttcttgctggttatttgatgatgctggatgtatcgatttgtcatcactatggatatcatgtctagtgagccattgatgtagcgaatttcgatgtcgcggataccctgtctgaagagaagcacacagcatcggttcgttgtgtttcggcctctactgactgttcttcgcttctcttcctccttcctttgcttctcttcttctgtgctctttcgttttcttttgcttgtgttgatctgcctgtcgctgctgccttgtcgtcgttccgctgttcgtctgtctcgttcctcgctttctcttgctcctacttttcctcttctggcctctttctcttcttctcgcgcgtcgcgtgtcgtcgccttcggtctcgggtctctccgcgctggttcggcgctttgtctgccttgcgctgctgtcgtgctggccctgagatcagctggcacttgcttggaatggtggtggtggcattcagtggtgcttcctccagaaacaaagcgactcccctccacctcccttatcccatatcctgcttcagtgagtatataacgcccgtcagcgagcatattcagcgccggttcttcagcgcgacatctgtcagtggcataggggcagcgcgggttaagcaggcagccgttcgggcggtcgtacttgccgggaacgacacctggcaacgacgccagacgttctttgtcctgagcaaattctggcagcgcacgcagcaatgcctgagtatacgggtgacgcggcgtagcgacattaaggtacggaggtaccgactgattgtatgcgatacagcgcctgataggccgcatgatcatcggctcgcgaatacccgcttccagcacaatgcgcagaccttcggcgctaacttcaccagcttttagcttttcaagtaacacgccctcttgctgcccgtggcgtatcagctcggaccacactatatgtttcttattctcacag

SEQ ID NO: 139699 - DNA, 2239 bp, Homo sapiens
ggcttcttcaatcccttggcccgtgtttcccaacgggaaggccccctactataaggatccagaaaccccttttgaaagatttattggattggacacccctaatggagtggggcttttccttaacccacttttggaaggttattgggcttttaagcccaaaacaaccccttgtgcctctttgccctctgtccccgtcatgaccaatgccccgttgttgctgggtattgtgacctgtctgggctacatcctactgcgcaaaagtgtcagcgttattattaaaggcacgattaaaaccataattggtttcatgttgttgcaggcagggtccggcatcctcaccagcaccttcaaaccggtggtggcgaaaatgtccgaagtctacggcattaacggcgcaatttccgatacctacgcttcaatgatggcaaccatcgaccgcatgggcgatgcctatagctgggtgggttacgccgtattgttagcgctggcgctgaacatctgttacgtgctgttgcgtcgcattaccggcattcgcacaatcatgttgaccggccacatcatgttccagcaggccgggttgattgccgttacgctgtttatcttcggctactccatgtggaccaccattatctgtaccgcgattctggtttcgctctactggggcatcacttccaacatgatgtacaagccgactcaagaagtgacggatggctgtggtttctccatcggtcaccagcagcagtttgcatcatggattgcctataaagtcgcgccgttcctcggcaaaaaagaggagagcgttgaagacctcaaattgattatgggtggcgctatggggctgggtaactggacgcctgcggctgaatttaatatttacgttgacccggaagcggcagaaattgtcttccagtcagggatcccggtggtgatggccggtctggatgttactcaatgcgcaggtttcgtgacggcttactggaacccgccgacgctcaatggcgtactgatgaaacttagcgttgggcaatatctggcaaaagataaaggcgcaacgatcgacgtcgccaaacgctttgacagcggcgtggcggtaggggtatgggcggcaatcagtaacgtatctaaagatgactacggcgaaggcggctttagtaaaggtttttatatctcgattccattcgacttgatgaccattggacctaaccgcaaccgcgcggtggtttcgtggacaccattgacgcgtgatggtggacaaatgctgtcacgcaaataccagctctatccaatgacggcagagcgagaagtaccgaatttatcgaccagtaacaaggatgtcattgaactacctgacaatcagtatgacctggacaaaatggtcaatatctatcccgtcacgccaggattgattgatcagttgcgcgccaaaccgattatgtcgcaggctaacccggagctggagcagcaaatcgcaaactatgaatatcgtatcgggattggtgatgacggtctgatcacccggactaacaccccgagcaaccgtagcggtggtcgacatgatatggtaaaagataaagcggcctataaatctttcctgcgtgaactgggctacctggtgccgcaaccggagcgcgtgacgaagatatcgagtatgttgagtcgatcaaaaacgctgccggagtcattgccgctcggcattcgccagcggctttcgctggcggtggcggtgattcatcgcccggagatgttaatcctcgatgagcctacttctggtgtcgatccggaagcggcagggcagagcaacgaagccgaagcgccgcccgtggtacacgacaccacccacgcgccgcgtcagggatttagcctgcgccgtctgtttagctacagccgccgcgaagcgctggaactgcgacgcgatccagtacgttcgacgctggcgctgatgggaacggtgatcctgatgctgataatgggttacggcatcagtatggatgtggaaaacctgcgctttgcggtgctcgaccgcgaccagaccgtcagtagccaggcgtggacactcaacctctccggttcccgttactttatcgaacagccgccgctcaccagttatgacgagcttgatcgtcggatgcgtgcgggcgatatcacggtggcgattgagatcccgcccaatttcgggcgcgatatcgcgcgtgtacgactggactgtcatcgtcagtgcggtacgtactgctatcggtag

SEQ ID NO: 139700 - DNA, 6385 bp, Homo sapiens
agtcccagctgtgctgctgctccacttgggaaggcaaacctggacaagctccgccattcaggaaagcttcaggcctacattgttctcgtggagctcgtgtgtaataggaaacgctgtggcgtccagatccactcttctcagcagctcagtgcatcttcgctgctgtcatctgcttcttcagagggagaggggagtgtgtggaaaaccatgctgcccaacagtccccggtctcttttcaacgctcttgaaccgttggcctctgatgacacagcgagtcctgaacatggagctcactttaccccaagaagaaggaagaacctcatcatttccccaaatggagcctcccacttcctcacctacaaatggatttggcagaactcctgtgtttgtttggcgttggaattaacgcactggctgctggggtgcgttttattcataaagcaaggctgtatgagcgagaaattaaagatagtctatcgcccattacaagaattgtcaccgtatgcgcacaacgccaggacgcacagtactgagcaggtggcacaactggtagaaagtattaagcaattcggctggactaatccagcgctgattgacgaaaagggcgaaattattgcgggtcacggtcgtgttatggcggctgaaatgctcaaaatggattctgttccggtcattgttctgtctggcctgacggatgagcagaagcagcgattacgatcagtatcgctcccgtaatgcattaatccgtcgccacattgagaaaatggatgccagtttgcacgtcggaacgaaggagtttgatatttcaaaggtttccgaggtggattctgttgatgatttactcattgataatgccgctcgttatctgctgaaagactggaaaggggttggtgaactggttaatggtgttgaggttgcactggaatatacggcagaacgagggatcgcgctgcttaagcagaatccagagttgtactggcagatccttgcagaagcagccagcatcgcccaggtcgggggcgaagtgtggatcgcccccaaatttgaaaggaatgggctcagacttttggcaaattccgagattggagccgcgtcgcaattacaaacttaccaccgagtggaccctggacgtccgtgtaaattggacctttccggcggcatgagccagcgcgtgatgatcgccatggcgattgcctgtcggccaaaactgctgattgccgatgaaccgaccaccgcgctggacgtgaccattcaggcgcaaatcatcgaactactgctggagctacagcagaaagagaacatggcgctggtgttaattacccatgacctggcgctggtggcggaagcggcacataaaatcatcgtgatgtatgcaggccaggtggtggaaaccggtgatgcgcacgccatcttccatgcgccgcgtcacccgtatactcaggcattgctgcgtgcgctgccagaatttgctcaggacaaagaacgtctggcgtcgttgccaggtgtcgttcccggcaagtacgaccgcccgaacggctgcctgcttaacccgcgctgcccctatgccactgacagatgtcgcgctgaagaaccggcgctgaatatgctcgctgacgggcggtctttggagtcccacacattcgccgtttttaagcagtcagcccagccccgtttgctggtattggactgtctggctacatcctactgcccaaaaggtcagcgttattataaaggcacgattaaaaccataattggtttcatgttgttgcagccaggttccggcatcctcaccagcaccttcaaaccggtggtggcgaaaatgtccgaagtctacggcattaacggcgcaatttccgatacctacgcttcaatgatggcaaccatcgaccgcatgggcgatgcctatagctgggtgggttacgccgtattgttagcgctggcgctgaacatctgttacgtgctgttgcgtcgcattaccggcattcgcacaatcatgttgaccggccacatcatgttccagcaggccgggttgattgccgttacgctgtttatcttcggctactccatgtggaccaccattatctgtaccgcgattctggtttcgctctactggggcatcacttccaacatgatgtacaagccgactcaggaagtgacggatggctgtggtttctccatcggtcaccagcagcagtttgcatcatggattgcctataaagtcgcgccgttcctcggcaaaaaagaggagagcgttgaagacctcaaattgccgggctggctgaacattttccacgacaacatcgtctccacggcgattgtgatgaccatcttctttggtgccattctgctctccttcggtatcgacaccgtgcaggcgatggcaggcaaagtgcactggacggtgtacatcctgcaaactggtttctcctttgcggtggcgatcttcatcatcacgcagggtgtgcgcatgtttgtggcggaactctctgaagcatttaacggcatttcccagcgcctgatcccaggtgcggttctggcgattgactgtgcagctatctatagcttcgcgccgaacgccgtggtctggggctttatgtggggcaccatcggtcagctgattgcggttggcatcctggtcgcctgcggctcctcgatcctgattattcctggctttatcccgatgttcttctctaacgccaccatcggcgtgttcgctaaccacttcggcggctggcgtgcggcgctgaagatttgtctggtgatggggatgatcgaaatctatggttgcgtctgggcggtgaaactcaccgtaggaaccgacggcaacgtagactactgtcttcagcattcaggagagatggcactgtgcatgcttatggaacttatatcttatgggcgagcggaaaataactgccctgatttctgtttttatctcgctgaaacgctgatggtgattgaccatcagaaaaaaagcacccgtattcaggccagcctgtttgctccgaatgaagaagaaaaacaacgtctcactgctcgcctgaacgaactacgtcagcaactgaccgaagccgcgccgccgctgccagtggtttccgtgccgcatatgcgttgtgaatgtaatcagagcgatgaagagttcggtggcgtagtgcgtttgttgcaaaaagcgattcgcgctggagaaattttccaggtggtgccatctcgccgtttctctctgccctgcccgtcaccgctggcggcctattacgtgctgaaaaagagtaatcccagcccgtacatgttttttatgcaggataatgatttcaccctatttggcgcgtcgccggaaagctcgctcaagtatgatgccaccagccgccagattgagatctacccgattgccggaacacgcccacgcggtcgtcgcgccgatggttcactggacagagatctcgacagccgtattgaactggaaatgcgtaccgatcataaagagctgtctgaacatctgatgctggttgatctcgcccgtaatgatctggcacgcatttgcacccccggcagccgctacgtcgccgatctcaccaaagttgaccgttattcctatgtgatgcacctcgtctctcgcgtagtcggcgaactgcgtcacgatcttgacgcctgcacgcttatcgcgcctgtattatcgtctcttttggtgattgctggacttgtgagtggtcaggcaatcgccgcgcctgaatctcccccgcatgctgatatccgcgacagcggttttgtctattgcgtcagcgggcaagtcaacacctttaacccatccaaagcgagcagtgggttaattgtcgatacccttgccgcccagttttatgatcgactgctggatgtcgatccctatacctatcgcctgatgccggaacttgccgaaagctgggaagtactcgacaacggcgcgacctatcgcttccacctgcgtcgcgatgttccgtttcaaaaaaccgactggtttactcccactcgtaaaatgaatgccgacgatgtggtgtttaccttccagcgaatttttgaccgcaacaacccgtggcataacgtcaacggcagcaacttcccctacttcgacagcctgcaatttgccgataacgtgaaaagcgtccgcaaactggataatcataccgttgagttccgactcgcccagccggatgcttcttttttgtggcacctcgcaacccattatgcttcggtcatgtcggcagaatatgcccggaagttagagaaagaagatcgccaggagcaactcgaccgtcaaccggtcggcaccggtccgtatcagttgtcggaataccgcgccgggcaatttattcgcctacaacgtcatgatgacttctggcgcggtaaaccgttaatgccgcaggtagtggtggatttaggctccggcggcaccggacgtctgtcgaaactcctgaccggggaatgcgacgttctggcctggcctgctgccagccagctatccattttgcgtgacgacccgcgcttgcgtttaacgctgcgtcctgggatgaacgtcgcctatctggcatttaacaccgccaaaccgccgctaaataatcccgctcgcctgatgcaatccatctattatggtacggctgaaacggcggcctctattttaccgcgcgcctcgtgggcctatgacaacgaggctaaaattactgaatatgaaataagtgaactggcgcagaatcgtctggctattggcgttggttactctgccaacacttgcggaggagacgccgttacaactggtgctgcgcgttctacgccgcttttacatcactgtgtcgcccggaatgggtcactaacagcacgacggtaccgagctcgactgctcttctcagtaacggacggaagaaactgtccgggtcgttactgtccgtcgcccaaccggataacgtcagatcatggctcatatccatcaaccgcgcctcctgaaagcgaccttctaccggcacaatcaccacttttacgccaacctgcgccatatccgcctgaatcagttcggcagttttcagtggactgggtgatacaacagcgtcggtgcacactgggcaaggcaaccaggctctggcttgatcctcgcctgcgtggggcattatttgccgcctggcccagagtgtctgccgcggcgttttccggcttttatgtggcgatgatcctggtgctgtgctcactgttcttccgcccgctggcctttgattatcgcggaaaaatcgccgatgcacgctggcgtaaaatgtgggacgccggtctggtcatcggcagtctggtgccgccggtagtcttcggtatcgccttcggcaacttgttgctcggcgtgccgtttgccttcacaccgcaattacgcgtggagtatctcggcagcttctggcaactgctgacgccattccctttattgtgcggattgctcagccttgggatggtgattttgcaaggtggcgtctggttacaactgaaaactgttggtgtgattcatctgcgttcacagctggcgaccaaacgcgctgcactgttggtgatgctgtgctttttgctggcgggttactggctgtgggtcggtattgatggctttgtactgctcgcccaggatgctaacggtccttccaatccgttaatgaaactggtggcagtgctacctggtgcctggatgaataattttgtcgagtcgcccgttttgtggatcttcccgctgctgggattcttctgcccattgcttacggtgatggcgatttatcgtggtcgcccgggttggggatttttgatggcatcattgatgcaatttggcgtgattttcacggcaggcatcacgctgttcccctttgtcatgccgtcaagctccggaacggacacggtgaccaaatctagtgaccgtgatttaaacccgccggatattagtgggcgggtaccaggggtcccgaaacgaatgaaggactctggttgtacgccagccccatcttcacccggtgttttcgccctgaattctccgcgtcttctcgctggaccttctgtgtgctctcgttgcggtccaccagcccggtcagtacccggtacgtcggcagcggcgcaggcagcacctcatccgcttccggcacccgctcacaccaaccgagcagccaccacggcccctgcggactgtttgtcgccagataacgatgcggacttaagcggagttcttccggcagcgcctgccagagtgcggccagccggtgaccttcatccagtttcgccacgccgccgcgcaccagccacagtgactcgctgcggctgtaaccgtcctcaccgggaaacaggtgctcaaatacaggcttctgccgccgttatcactgagtatcagtgtgttatcgcgcagctgtaa

SEQ ID NO: 139701 - DNA, 1467 bp, Homo sapiens
tcatggtgtttcctcaccttgctcttcctgctggtgataaaccagcgacaccgccagcacgccctctacgttgcgtactgactcaatggtttggatcagcgtttcgctgtcttctgcttccaccaccacaatcaactgaccgctcggcgcgtcgctgacagcaacttcacagccgggaaaggcgttcagttgggtgctgatgtctgaaattcgttcgcttttggcgatattgtacaccatataacacgacgtgggcagcgtcagagaaatggcgataaccatcaccgttaaaaacgtggcgaacggtttgcttttcagatcctgcaatgcgccgtggaaggcatagcgcacctgttcgttgaaaacgttggttttgcgatttaccggttttggcgaggatttcgcgcgttttggtgcgttacgaccgccgtcgcctgagccgccgaccgatttacggaagcgatcaagacgcccgccaaagcctccatgcaagtgaccatcgctcagggtgagcatgcgataggaacgccgcgagatcaggttgatgtcgtgcgttgccatcaatacggttaccccaacgcggttaaactcttcaaacagacgtaaaatgccttccgacagcgcgtcgtccaggttaccagtcggttcgtccgccagcagtaccgcgggcttgttcaccaccgcgcggcaatgccaacacgcgcccgaaagctgaatagggaagttcttcgctttgtccagtagcccgactttatccagcgccgccgaaacccggcgacgaatatcgtcaccgctggcaccggcgataatcagcgggatcgccacgttatcgtagacagtacggtccatcagtagatggtgatccatgttcatcactggtctttccgaaaggctgtaagaaataacttcgttgttgaagagatctattactggagacaaatacagcttgcgcccattgactgcaaattcagtaacatcggtaacccacttctcgtttggccgcgtagccttgaaatctccgccagtgagcgcgaattgcgtcagcaacgggtgattagcgccgctgagaagtttgttgaggatcagagaacgctgcatccgctcaacccgatttgggataaccagttcatgactttgctggagcagggacgcatacaggaactggatgccgtcagtaacgaagagctttccgccattgccggaaagtcgacacatgaaatcaaaacctgggtcgccgcttttgccgctatttctgcgtttggcaactggcgtagcgaagggcgttattaccgcccaatcccggagtggattgccggatttggcgaagccgccaccagccgttttctgaatgtagaagaagcgggtaaaacgctgcgcatccattttaatgactgcggacaaggcgacgaaacccgttgtcctgctgcatggttccggcccgggtgctactggctgggcgaacttcat

SEQ ID NO: 139702 - DNA, 3045 bp, Homo sapiens
atgatgttctttatgctgatagctgccgtagcaggatcctgtcgcagttcggcggttctgctcgtttcctcgtctcactgggcgcgctttggaacattccccgccgtggcgaagactttcacccggatacgttgggaatctctactgatgcgcgttatcagcgacttaccgctgcgctgcgctggcagaataaaagccgtgacatccattacattattcgccatctacggaaacgctggggacagacaacctcgcggaaagtcatttacagacggagacggcgagttatttattgatacctgcctgacgacgaccgccgaagcgacattgtttttggctttgcgcgttcttattttatggtttatgcgccgctgccgcagcgctggtcgagtggctacgggaaattctgccagggctgtaatgagcagttcattaagcgccgggtattcgtggaatggtgatgttggtgtttacgctgccgggtttgatcgggtattcaaagtcatcaaagacagaaaggatgtctgccgctcacgttcgtgcctgctatcaactggtgaaagagcacatcgcgtgggccgaatggcggacacccaggagtttgaaaactttgtgctgagaagcggcatatttccccggcattatatggaattactgcttcagaagagcggaataaatcacctatctggtaccgaagctgatatttctccgtgtaatgtagtttgtgtctggtgtatgaacatcgcagcggtgtctatcactatcgattcccatcatgcgtgtgacctattgtactcgacaatccgcacagttatacggtatacgatccgacggctgtacgtagtatccagtaatgaatcgttaaacccgaatgtgcttcagaaaccattcgggtgttttctatccattcgccagcggctgcgcttcctgcggctgataatggataatattgctgtgacaaattccacacccggctgcaccacgatggcaatcacaccagagaaggacgctctcgcgaacagcagctggccatactccacactgaacctggccgtatgcggcagttgcagcagcagcatagtcaaacgagactggccgataccccgccgatggtctgcggcatttcaccgcgcagcagcgcctgatgccactcagctccaggcgatcttcgtcaccgcgccagttgatgcttcagctgtcggcatctacacggatccccatggaggaaagctcaaacgcatcttcagtaccgggttccacaccagaatatcgccgttcagacccgcatggcccactctgacggggtgctccagtcatcataatccggtgcgcgcacgtcgtgggatgaccatcgctcagcttgccgccaatcccgacaaggaataccgcgccagatctttcgctatcgcccgctcacgccctttggcatcaagatccggatacgagacagtaactcctggctgtacccgtcgcgccgcctaccagcgcaaccggcttgtggcccgcctgctgaagcgtttcaggcataacaatggaacaagatgccccaaatgcaagctgcagcgctcaggaatttactttcaggataccgcgggcagaaatgcgactggactgctcgaaacccatgcaccatctggctatcacgcgggcggctatgaatatttctcacttcgagagtcgaaagtcgttctgctttaccgatcaccatcacctgcgctcaaggcacaaacgcgtcagcctgctcgatgtcgtctagcagcccatcggctcatccataccaaagggggttttgaatttctcttccatcacatcgaaggcctgatcccaggaaatagccttaatgcagttcaggccacggttaaccggtgcgtccgggtcgccctgaaggccaccacatcgtacactgctgcgttccgaccagaacgccgcaaccataccgcagaaacgggcatcggcgcttatcccattaatgcgcatcctgcccgttcgatatgggcatctcctgctctgctgaccgtatatcaaagcgaagatcaaccgtcagggaatctggatcgaaaaactggaaataatccaggcaaatatatcccggaagagctgcgcaaagcgggagaagggaagcggtatgtcagcacacatttccccgttgagcctgattcaggcactacacaagaggcacatccttatgaaaaagatccttgtggcatgcggtaccggcatgtcgacttcaacatgattgcacacaagctgcaagagttcctgactgaacagggcatttcagcactaccgcccaatgctttcgcaggttgtattgcgcaggttggtgaaaaagtcaaagactggaagtggggcaacgcgtcgtatcggataaacaagccggtcaacgatgtatccggtgttttgtccaggccttgtgaaacaagacgaatcgcatgcggtcatataacgcttccagactgctgtctgcttccggcagctcttggaggccgccaccagcagacgcatcgggattttttctacgtgtgcacgttgcggaactggcgctcgttaatggcgtgcgacggcaatgttggcccgattgcctttattggcctgatgatgccgcatatggcgcgttgctggtgggtgccgatcatcgctggtcgctgcccgtcacgctacttgctcccctgccctgctgctgtttgccgatatcatcgggcgggtgattgtgccggcgaactgcgcgtttctgtggtcagtgcgtttattggtgcaccggtgcgatcttcctcgtgcgacgtaaaacgcgaggtggtgcatgatttacgtcttcgccgattactcatcacctgtttgctgctggtttccgcctgtgtggttcaggtatctggggattacgcagcggtgccgtcacgctggaaacctcgcagtattcgccgcgctgatgggcgatgcgccgcgcagtatgacgatggtggcaccgaatggcgtttaccacgcgtgctgatggcgctgttgattggcgcacactgggcgtcagtggcgcgatttttcagtcgctga

SEQ ID NO: 139703 - DNA, 2273 bp, Homo sapiens
cgtaaagcgtttaaagcgattaagtcgctgattactgacgtgagcgaaacgcataagatcagcgccgaattgctggcatcgcgtcggcaaatcaaccaactgctgaactggcactggaaactgaaaccgcagaacaatttgccggagctgatttccggctggcgtggtgagctgatggcggaagcattacacaatttattgcaggaatatccgcagtaaaatcttccgaagccggactgggcgcgctcagcgccacatccggcttcggcaaactacaaatccaacaccaggcgtttacccttcgcacgcgaacaacagatcaacatactttgctggctggcacgctcttcatcgctaaaatattgatcccgatggtcagcttcaccttccagtattgctgtttcgcaggttccgcataccccttcacgacataaacattccactttcgcggctttattattttcaataacctgcaaaatagtcatctcttccggcaccacaaactcttttccggaacgggcaagcaccagggtaaatgcatcgccggttttgtcttcgatagcaaattgctcaaagtgcagcgtatcggcggcgatgtccagacgcgcagcttcacttcttaccgcttcaattagcgcctcgggcccacaggtataaacgtgtgtgccaggttcgatatccgccaatattcgcgctaattcccagtcgtgttccggttgatgaatgatgcaaatggactttctcagcctgcggatgtcagatttatattgataccggatcgccgaacagcgggcggctgtcattttataaaataaagtagtctcatgcttcttcagcaaagagagatcctgcttcaccagcgcgcgactggcactctccggcaaaccgtcgtctgtaataatctgatcaaactcgcttaatggtaacgccagccatgtcgccacctgaccatatttcgtcgcatcacagaccaaaactcgctggcggctggcactggcaatcgcccgtttcaccgtgactttatcttccgctggcgtagaaatcccccgcacactccatgacgatgcagaaataaaagcctgatcaatcatcaggctgcgcagcatggtcgcagcggcttccccgacacaggaacggttttcccgacacactgcaccgccagtgtgaataattgtgcaattactgttgtcgagcaagtagtccgcaataacgaaatcgtttgtgaccacagtcagtgactccatgtgaatcagatgctgtgctatcgctaacgtggtcgttcccgcatccagatagatacaacttcccggctgaacaagacttgccgccagcttgccaatagccgctttttgcgtcattgccagcgcagtttttacctgatgagaaggttcatgcgccacgcgtcccggagactggacgcctccggacaccagcacaacggctccctgctgctccagtttttgtaaatcccgacgaatggtcatatgtgacacattcattctgtccgttagttcagcaatactgacaatgcctttttcagctaccatcgtatcgtccagcgctggccgccttagcgatacgttggtcagggttatctgtatttttatgctcgccgtaatctgcgtgaagtagtagtttttatctgcaaaccaccgattaaggtagtaatcggcggttaacgccgagaagtcgactaatttgctttccagcgtgtcgagggcttgcgcaacgtcggcctgcggtgagcgatagcgatgtaccatttcactgataaccgccagcaaaggaacttcccagaggatgacttcacgccacgggccgcttaaacgaatatccagcttgccattatcgttggacacggtgacttgttccgggttaaagcggaactcgcgtaaccagttaagatagtcggccttaaagaaaggcagggcagaaagccactgatattcatcatcctgcaggcgcaggtgctgcatcgcctgaacctgttcacgaatagcatcggcataaatacccagcagatcgtcacctcggcaacgaaactccgccgcgacatgcacatcgtaatagtgatgaaacacggcttgctgcatatgcaacttataagcatacggaatgatgatccaacctttatccagcgcaccgttgaaatggctaaagcgttcgaacagcagacgggtcagttttgccggatagcttaccgctggcgcgtcatcgaatttatcgcccgcattggttgagttacaggcgcgtttcgacgaagaagccaacat

SEQ ID NO: 139704 - DNA, 3393 bp, Homo sapiens; identical to SEQ ID NO: 129101

SEQ ID NO: 139705 - DNA, 1875 bp, Homo sapiens
atggtggcgtggacactggtgtgcccgctcccgttcattcgctgccagcagagcttcgtttcccaggcaatcagtacatcgccaaattccgcgctcgacaaaagtgttgtggagccacgcgcgccagaatccagaacttcgacgtttttatacagtgccgaacaaaatcctgtgcttttgcctgatcgttgttgttgtgatgcagccgtagccccaggctgccaggtagttccagcgcgcgccaccagagcttttggattaggcgtgatcaccgaaacacccggtttaatcagatcgttccagtatggatctgcttcggatttcccttacgtaccaggaaaacaatggtggaatgtacggtgcggagttatccggcagacgtttgatccactctttatcaatcgcccgctttgctgtttccatgacatgattacaattcttgctcggtacctgaaagcggatttcgctaccgataacccaggctgtccagttcgcctaaacttcccggcatataacgcgcaccgaccacaaatgctcttcacgcacgacaaagttcaccgccagatcgcctctcgcgccttgcgcagtcgccagtcggctaacagttgcagacaggccgttggcgtgcatctccggcgcaacgacttcctgacgacgcatttgcatcaggcggcattcatcagcgccgcagatcttcactgcctgatggagaaattttgtgatggacggatcgcgcaggatcgctttcagcggtaccagtcggtgatcccgagtggatcgattagcgccagatgctcgccatcaaaagttgaatcaaccccagctgcgggtaataagtgcgcgtacgaacaattcagtatccagggctatcgccggaaaggcacggacggcttcacacaaaaagccagcgcatcgtccgtggtaatcatttgctcggcgagcttttaccaaaaagctgttccatatcctgatcctggtagttggcgggatatcttcaatcacgtcatgcagcagcgccgccatcagcgtttcatagtcagtttcatctcggccagaatgcaggcaaccgctaccgggtgcgtgatatgggttcaccgcttgaacgtgtttgcccctcgtgagcatcacgtgcaacggatacgcctgccgcagacgcttgatttggtcttccggcagcggctcctgctcttgctgttcctggcgttcgcgaacgtcgaggatctggttgctgatcagaccttcttcgatttcgcacagcgcgagcatgttagccttacgtgccggagcacagcgttttctgcccagccgctgagcgccaatgacacgctgaaaaataactcctcgccgcttaccgttcaagccaacgggcgcacaggcacgcgtagtggcggagatcagcgcgatatggcgctggatgtgccgatgatgcgtctggttccggtaaaacgctggtcgccgccctcgccgcgttgcgtgcgatgcccacggcaaacaggtagcattgatggcaccaaccgaattactcgccagcagcacgccaataacttccgcaactggtttgcaccgctcggtatcgagtgggctggctcgccggtaagcagaaaggtaaagcacggctggcacagcggaagccatcgccagcggtcaggtgcagatgattgtcggtacacacgcctcttccaggaacaggtgcagtttaacggcctggcgctggtgattatcgagaacagcatcgttttggcgtgcatcagcgtctggcattgtgggagaaagccagcagcagggcttccatccgcatcagttgatcatgaccgccacgccgtcccccgcacgctggcaatgactgcgtatgccgatctcgatacctcggtatag

SEQ ID NO: 139706 - DNA, 3011 bp, Homo sapiens
atgtgggctgcgcagcacatcgcccacactcgcccggaaaatttcatcacctccagcggtttaggtaccatgggttttggtttaccggcggcggttggcgcacaagtcgcgcgaccgaacgataccgttgtctgtatctccggtgacggctctttcatgatgaatgtgcaagagctgggcaccgtaaaacgcaagcagttaccgttgaaaatcgtcttactcgataaccaacggttagggatggttcgacaatggcagcaactgttttttcaggaacgatacagcgaaaccacccttactgataaccccgatttcctcatgttagccagcgccttcggcatccatggccaacacatcacccggaaagaccaggttgaagcggcactcgacaccatgctgaacagtgatgggccatacctgcttcatgtctcaatcgacgaacttgagaacgtctggccgctggtgccgcctggcgccaaaaccttagaacgtgttttacgcgtggtgcgtcatcgtggtttccacgtctgctcaatgaatatggccgccgccagcgatgcacaaaatataaatatcgaattgaccgttgccagcccacgagcacaaccacatcacaacaaatccgcgcctgagcgcaaaaggaatatcagaatgaccacgaagaaagctgattacattgggttcaatggggagatggttcgctgggaagacgcgaaggtgcatgtgatgtcgcacgcgctggactatggcacttcggttttagaaggcatccgtagctacgactcgcacaaaggaccggtatttcacgccgtacatcaacccgaaaaacggccgccgaacaccgacaacgggcgctccgtgaatacggccctatattgtcatagggttacatgtccctgtaatcacttcacctgggttctctctaagaacgctccccgttggcaccttttccttgtcaaccataaccggaccgtcaaagcatggttatccaccagtaatatggctgccataacactgatgccatttgattccatcttgtcaaaatatgctttcataactagcccgaaatcaccgcaggcagcacgcacgcccctcaggacggctggaaaccacgccaagtctgttttgcatttatgtgaggtggtccaggtaacggttgttgttggaatgcttctggttaggtcaccagaacgctgtgacgtacagagtgacatcaaggggcacaagggtcacgcacggcccacagggacgcctggagttcgcgaaacgttccgagacctaaagccgacggacgaaccaatacggcacactgccgacacacagggggcccgcaaaacaggcgagacacacaacacattccgtcttggcaaagaaacaattctgttacgtaccggctggaccgcgttcgatgaagaaaagaccgaactgatcaaccagacggtgacctgtcatatcgacctgattttgcaaggcattatcgcaaaggagtttgtcagtcgatcgcacaacaaacccgtgggcatccgtctcagcagctctgcacccctcgccagcgccattgccaagccttggccactggcccgtcgttttcacacaccgtccgacaacaatccacgcacatattatccggacgctaagaccttgcggctggttacagtcaggctgcaacgacggccccgacaccagatacgaccctatacacccaaatcaagatattggcagccaggcaccttgaaaattgaattttatgatctaaatctaacctctcaggggatgtgtctctcttctggcgtcttcctcggtgtgtctcccgaggcgcttttacgacattgggcccgggttatgcccttccctatggtccgccgaggtggtaggcggttgcgccagcttcacatcctggataggcaggaacgtttccctatcatactcctgtcccgggtctcatgtgtctcagttcaaacagacactgccgtctatcttcaagctgcaatgaagctgagagccacagaaaacacctgtaccatggtttcagggaggagtctcttccctcagccgaaaacagacagctttgctggtcatctgttctccactgcgaggacgctgccactcagtgtggagagaggaaggggttctgcctatggtgcaagaaggtcggactcggcagctggtgttcagccaaaagcgaccgatttcagacatcagcacccaactgacgcgtttccgggctgtgaagttgctgtcagcgacgcgccgagcggtcagttgattgtggtggtggaagcagaagacagcgaaacgctgatccaaaccattgagtcagtacgcaacgtagagggcgtgctggcggtgtcgctggtttatcaccagcaggaagagcaagctaacgccgttgcggccgctgcggcggctgccggtctcagcgtgccgggcgttgcccgcgccgttgttggtcagcaggaagccatcaaatgggataaagcgccgtgccgtttctgcggtactggttgcggcgttctggtcggaacgcagcagggacgtgtggtggcctgtcagggcgacccggacgcaccggttaaccgtggcctgaactgcattaagggctatttcctgcccaaaatcatgtacggtaaagaccgtttgacgcagccgctgctgcgtatgaaaaacggtaaatatgacaaagaaggcgaatttaccccaatcacctgggatcaggccttcgatgtgatggaagagaaattcaaaaccgccctgaaagaaaaagggccggaatcgatcggtatgttcggttctggtcagtggactatctgggaaggttatgccgcgtccaagctgtttaaagcgggcttccgttcgaacaacatcgacccgaacgcgcgtcactgtatggcgtcggcagtagttggctttatgcgtacctttggtatggatgagccgatgggctgctatgacgacatcgagcaggctgacgcgtttgtgctgtggggcgcaaacatggcggaaatgcaccc

SEQ ID NO: 139707 - DNA, 1953 bp, Homo sapiens
atgacctttcgcaattgtgtcgccgtcgatctcggcgcatccagtgggcgcgtgatgctggcgcgttacgagcgtgaatgccgcagcctgacgctgcgcgaaatccatcgttttaacaatgggctgcatagtcagaacggctatgtcacctgggatgtggatagccttgaaagtgccattcgccttggattaaacaaggtgtgcgaggaagggattcgtatcgatagcattgggattgatacctggggcgtggactttgtgctgctcgaccaacagggtcagcgtgtgggcctgcccgttgcttatcgcgatagccgcaccaatggcctaatggcgcaggcacaacaacaactcggcaaacgcgatatttatcaacgtagcggcatccagtttctgcccttcaatacgctttatcagttgcgtgcgctgacggagcaacaacctgaacttattccacacattgctcacgctctgctgatgccggattacttcagttatcgcctgaccggcaagatgaactgggaatataccaacgccacgaccacgcaactggtcaatatcaatagcgacgactgggacgagtcgctactggcgtggagcgggggccaacaaagcctggtttgggtcgccgaagcatccggggaatggggcgtgctggcctgcaccctttttgcctggaatcgcaactactttgttttgctattcgttggcgtctttcttagcagctttggctcgaccgctaacccgcaaatgtttgcccttgcccgtgaacatgccgacaaaaccggacgtgaggcggtgatgttcagctcttttttacgcgctcaggtttcactggcatgggtcattggcccaccgctggcttatgccttagcgatgggtttcagctttacggtaatgtatctgagcgcagcggtagcgtttattgtttgcggtgtgatggtgtggctgtttttaccgtcgatgcgaaaagagcttccgctggcgaccggcacgatcgaagcgccgcgccgtaaccgtcgcgatacgctgctgctgtttgtcatttgtacattgatgtggggctcgaacagcctgtacatcatcaacatgccgctatttattatcaacgaactgcatcttcccgagaaactggccggtgtgatgatggggaccgccgccgggctggaaatcccgacgatgttgattgccggatatttccgccaaacgtctgggcctacggcttacgggcgaagtgtaggccggataaggcgttcacgccgcatccggcagtcgtgctattatcaacgcatattcagtttattggcgtgcgaactggccaacgcgctggaacgcccggaaaacttctgcgggatgcacttctttaacccggtccaccgaatgccgttggtagaaattattcgcggcgagaaaagctccgacgaaaccatcgcgaaagttgtcgcctgggcgagcaagatgggcaagacgccgattgtggttaacgactgccccggcttctttgttaaccgcgtgctgttcccgtatttcgccggtttcagccagctgctgcgcgacggcgcggatttccgcaagatcgacaaagtgatggaaaaacagtttggctggccgatgggcccggcatatctgctggacgttgtgggcattgataccgcgcatcacgctcaggctgtcatggcagcaggcttcccgcagcggatgcagaaagattaccgcgatgccatcgacgcgctgtttgatgccaaccgctttggtcagaagaacggcctcggtttctggcgttataaagaagacagcaaaggtaagccgaagaaagaagaagacgccgccgttgaagacctgctggcagaagtgagccagccgaagcgcgatttcagcgaagaagagattatcgcccgcatgatgatcccgatggtcaacgaagtggcacctgctggggaacagccaatttaa

SEQ ID NO: 139708 - DNA, 2857 bp, Homo sapiens
atggcggcccggacaaggggtacccacacccagcgcaaccggcataagtacaggaaatcaacgactcaccggcgaccacacccagcaccaccctacggccaactgccacggggccaacagcgaacagcagggcgaccaaaagcaaccagggcacgcaagcgcggggggcagccctcaacgccgggaaaacgcccacacaggggcgcccacgacagcccggcgcaaaaacaagctcacaggcgacacaggaaccggccgacacgacaagccgacccgcagtctacggccccgcgggaacaccgaaaccgcacgcaagcaaagccaacagtggcgtcccaaggcgcaccacggtcagggacacggctgtcagccgccaagagcgcgcggccccgacgaaccacgcggcgccaccagccgcgccgcctcgcaggaaatgcctttccaactggacgtttgtacagcacaattctattttgtgcgggaggcgttgtggatttctcaatcatggtttacgcagttattgcgttggtgggtgtggcaattggctggctgtttgccagttatcaacatgcgcagcaaaaagccgagcaattagctgaacgtgaagagatggtcgcggagttaagcgcggcaaaacaacaaattacccaaagcgagcactggcgtgcagagtgcgagttactcaataacgaagtgcgcagcctgcaaagtattaacacctctctggaggccgatctgcgtgaagtaaccacgcggatggaagccgcacagcaacatgctgacgataaaattcgccagatgattaacagcgagcagcgcctcagtgagcagtttgaaaacctcgccaaccgtatttttgagcacagcaatcgccgggttgatgagcaaaaccgtcagagtctgaacagcctgttgtcgccgctacgtgaacaactggacggtttccgccgtcaggttcaggacagcttcggtaaagaagcacaagaacgccataccctggaccacgaaattcgcaatctccagcaactcaacgcgcaaatggcccaggaagcgatcaacctgacgcgcgcgctgaaaggcgaccataaaacccagggcacctgggccgaggtactattgacgcggtcgctggaggcttccggtctgcgtgaagggtatgaatatgaaacccaggtcagcatcgaaaatgacgcccgcttcgcggatgcagcccggatgtcactcgtgcgctctgccgacagggaaaagatcgtggtgatccgactgccgaaattgaccccgactacgctgctggtggcgctgcgcactatcgccaacctgtggcgttatgagcatcaacgccgcaacgcccagcaaatcgccgatcgtgccagcaagctgtacgacaagatgcgtttgttcatcgatgacatgtccgcgattggtcaagtctccaccagagcgcaggatcaattatcggcaggcaatgcagaaactctcttcagggcgcggagatgtgctgcgcagcagagcctttcgcgtttagatacgatgagcgctggacccaacaagaaaaataagccgcccatttcgcacattgccaggcctgacgcaacctgcttggtgaagcggccgatccggtatcgggccctcattcggctatctaccgtccagactggccgaaaagcggggattgtgcctgccaagggccgattaaaggttcggctaatcggccagcggttgttccccacgtacacggaccgcagtgaagatctggaagtgttcctcaatgtctttggcgaattaccacaacccttgattgacacgcaaatccttgctgccttctgcggacgcccgatgtcatggggtttcgcttccatggtggaagagtattccggcgttacgctggacaagagtgaatcgcgcaccgactggctggccagacccgctgccggaacgtcagtgggaatacgcatcgccgaatgtctggtatctgttaccgatcaccgccaagcttatggtagaaacggaggcctccggctggctacctgcggcgctggatgaatgccgcctgatgcaaatgcgtcgtcaggaagtcgttgcgccggaagatgcctggcgtgatatcaccaatgcctggcaattacgcacacgccaactggcctgtctgcaactgttagccgactggcgactgcgcaaggcgcgagagcgcgatctggcggtgaactttgtcgtgcgtgaagagcatttgtggtcggtagcgcgttatatgccgggaagtttaggcgaactggacagcctgggtttatccggtagcgaaatccgctttcacggtaaaacgctgctagcgctggtggaaaaagcgcagacattgccggaagatgccttaccgcagccgatgcttaacctgatggacatgccgggttatcgtaaagcgtttaaagcgattaagtcgctgattactgacgtgagcgaaacgcataagatcagcgccgaattgctggcatcgcgtcggcaaatcaaccaactgctgaactggcactggaaactgaaaccgcagaacaatttgccggagctgatttccggctggcgtggaatatccgcagtaaaatcttccgaagccggactgggcgcgctcagcgccacatccggcttcggcaaactacaaatccaacaccaggcgtttacccttcgcacgcgaacaacagatcaacatactttgctggctggcacgctcttcatcgctaaaatattgatcccgatggtcagcttcaccttccagtattgctgtttcgcagttccgcaggccacttactgccatcgtatagcgccgattttgggaaatggcgcaatgaaaccgggaagaaaaataagctaa

SEQ ID NO: 139709 - DNA, 3318 bp, Homo sapiens; identical to SEQ ID NO: 138483

SEQ ID NO: 139710 - DNA, 531 bp, Homo sapiens
atcgcgacccggtttttccagctctttgatgatgtcggttacggtcggcacacggaatttctcatcagtaaaagtcaaacgctttcaggttacgcagttcgctgctgttacccatcagatctttcagtgcctgctgtgttgctgcccgaatgccggaacagaagcagtgttgagatcgacgccaacggcgtttacgcagtcttctactactgcgtccagtttgcgggccagttgcgtctggctgacgtcatgctgatactgacctacgccgatagatttcggatcgattttcaccagctccgccagcggatcctgcaaacggcgggcgatagacaccgcgccacgcagcgaaacgtcgagatccgggaactcctgtgcagccagctcggaagccgagtaaaccgacgcgcctgcttcgctgacgattactttctgcgcggtcactttcgggaactgcttctgcacatcgagatagaaacgctcagtttcgcgggaagctgtaccgttcaccgactcgctacccagttcagg

SEQ ID NO: 139711 - DNA, 1404 bp, Homo sapiens
tcagtgcctgccaaagatgaatcttagacactgtctgatgctgaggcatataattcggtgttcctctcctcccttgaggactccgggtatatggcgcgtgcggcgtttgtgatggaccgtctgatgcaggcgctgggcttgccggggaaatcctttgtgccgctgatcgtcggtttcggttgtaacgtaccgtcggtaatgggtgcacgtacgcttgatgcaccgcgtgaacgtctgatgaccatcatgatggcaccgtttatgtcctgcggcgcgcgtctggctatcttcgcagtattcgcggctgccttcttcgggcagaacggtgcgctggcggtcttctcgctgtatatgctgggtattgtgatggcggtgctgactggcctgatgctcaagtacaccatcatgcgcggtgaagcgacgccgtttgtcatggagttgccggtctatcatgtaccacacgttaaaagcctgattatccagacctggcagcgtctgaaaggcttcgttctgcgtgctggtaaagtgatcatcatcgtcagcattttcctgagcgctttcaacagcttctcgcccggtcttcaaagcaattggcgtgcatgaagataactggcaggcaacgttggccttgttacaaggtgcattggcgaacgacgtgtagtgggtacgctcacaacctccagttcgggtcaaccggctgggtaaaatccaggtcttcaaacaaactgttgccagaacgtcccccgtgacgcccccgccggaaactggtgttgttgttaacgtcggttcttcaacgacgctggcaacgcctgcagcatcgacatccagccgaggcatcaaatcctgggcgataccgtgaccacgctgttgcaaaccagagtagctggtgacgcgccagttatcgccgggcaatcgttgtaacgtcttcgcattcagctctgctgtagaaacatcattaacctgccagggttggttatcaccagtttgtgccgtttgccaggcaatatcatcatcgcataacgcttcaatacaggtgcgaagccctgccgcatcttgcggttcccctttttgcagcaaacgcccgagcgcactttggtggacgtcggtgtcaccttttttatcgccacgacggcgcaccagcggtgcaaacgccgagagtgtcagcgccacgtaaagcaaacgcagatcttccgccagacgttcggcctccgcgaggtcgacgctttctggcgcagcattaagatccagaactgcctcaaacgagtggcgatcgtgataaaacgcctgctcctggacgcgggaattggtgataaacggcagccaaggaccaatgggatattccagcccctttcgatttgtggatcgggacaaactgcaccagatgttatcactttcgagacgcat

SEQ ID NO: 139712 - DNA, 1758 bp, Homo sapiens
  misc_feature (1)...(1758): n = a,t,c or g
atgattaacatatgtccggcaatcactgacgcgaatgcgcccgttatcactactcagagcaagattctcgatgacgctaggatcccaagtcgtagcgcttacgatggtacggtgttcccacctaacgttgaaggtggtcgttttgtctcatggctggcaagccaggaacgtaaagcgtttcactggatggcgagccataagcctgatctggtcatcaaactcaatgttgaccttgaagttgcctgtgcacgtaaacccgaccataaacgggaatcgctggcgaggaagattgccataacgccacagttaacctttggtggtgcacaactggttgatatcgatgccaatcagccactggaacagcgttacggtgccccacgcctgacggatgaactgcgtgctcagggttacccctttaacgtaaaaaccgtggcggcaagcctgcgccgtcagggactgagggcaaaggcctcccggaagttcagcccggtcagctaccgcgcacacggcctgcctgtgtcagaaaatctgttggagcaggatttttacgccagtggcccgaaccagaagtgggcaggagacatcacgtacttacgtacagatgaaggctggctgtatctggcagtggtcattgacctgtggtcancgttgccgttattgggctggtcaatgtcgccacgcatgacggcgcaactggcctgcgatgccctgcagatggcgctgtggcggcgtaagaggccccggaacgttatcgttcacacggaccgtggaggccagtctgttcagcaatttcgggcactgaagcggcatattacagcttcccgcgaaactgagcgtttctatctcgatgtgcagaagcagttcccgaaagtgaccgcgcagaaagtaatcgtcagcgaagcaggcgcgtcggtttactcggcttccgagctggctgcacaggagttcccggatctcgacgtttcgctgcgtggcgcggtgtctatcgcccgccgtttgcaggatccgctggcggagctggtgaaaatcgatccgaaatctatcggcgtaggtcagtatcagcatgacgtcagccagacgcaactggcccgcaaactggacgcagtagtagaagactgcgtaaacgccgttggcgtcgatctcaacactgcttctgttccgctgttaacccgcgtggcgggcctgacgcgcatgatggcgcaaaacatcgttgcctggcgcgatgagaacggtcagttccagaaccgtcagcaactgttaaaagtgagccgtctggggccgaaagccttcgagcagtgcgcgggcttcttgcgcattaaccacggtgataacccgctggacgcgtctaccgttcacccggaagcctatccggtggtggaacgcattctggcagcaacacagcaggcactgaaagatctgatgggtaacagcagcgaactgcgtaacctgaaagcgtctttccttgataatgaagaaaactggccgctgttacttgatgcgcttattcctgtcgccaatacctgcgaaatgatcctgatgcccgcctgcttcggtctggccgatgacaaactgtggcgttggttgaatgaaaaactaccttgttcactgatgcttttgccaacgctgccgccttccgtgctgggcattcgtctgcaaaaccagttacagcgccagtttgtgcgccagggtggcgtgtggatagaatgcggcgatggcggcgataccaccacgattacgattacccaacgggatttataa

SEQ ID NO: 139713 - DNA, 1881 bp, Homo sapiens; identical to SEQ ID NO: 122823

SEQ ID NO: 139714 - DNA, 4332 bp, Homo sapiens; identical to SEQ ID NO: 119129

SEQ ID NO: 139715 - DNA, 4173 bp, Homo sapiens
ttatttctgtgggcgcatcgccgggaagagaataacgtcgcgaatagtatggctgttagtaaacagcataatcattcggtcgataccaatacccagaccagcggttggcggcagaccatattccagcgcagtcacgtaatcttcgtcatagaacatggcttcgtcgtcacctgcagctttagcattaacctgttcctggaaacgttcagcctgatcttctgcgtcgtttaattcgctaaaaccattaccgatttcacgaccaccgatgaagaattcaaaacggtcggtgatttccgggttaacatcattacggcgtgccagcggggacacttctgccggatattccgtaataaaggttggctgaatcagatgtgagagagcatcacgtcgtgcccgtaacggcacgatctgctgatggcggcccctgccggacggcgtgcaacgatgggcctcgatccgggtctgcgtactggggtaaaagtgacgatggtcgatgccactggcaaactggtggcgaccgacaccatttacccgcacaccggacaggccgcaaaagcagcgatgaccgttgctgcgctgtgtgaataacataacgttgaactggtagcgatcggtaacggtacagcttcccgcgaaactgagcgtttctatctcgatgtgcagaagcagttcccgaaagtgaccgcgcagaaagtaatcgtcagcgaagcaggcgcgtcggtttactcggcttccgagctggctgcacaggagttcccggatctcgacgtttcgctgcgtggcgcggtgtctatcgcccgccgtttgcaggatccgctggcggagctggtgaaaatcgatccgaaatctatcggcgtaggtcagtatcagcatgacgtcagccagacgcaactggcccagcaaactggacgcagtagtagaagactgcgtaaacgccgttggcgtcgatctcaacactgcttctgttccgctgttaacccgcgtggccgcgcgggtttcaaccgccagacgggttgtcgtgcatgctggtgttccactgtggcggccgccgggggtgacccatttttgtaccagtcgccatgtcttcccattcgagttcccccgattccggatggcccgtgcgccaccggtcgtttcgacccgagtttgaggaacatgaagtcctcgttttcggtgccgcgcttcatcccccactcttccggtttgaaggtcagggcttccatctccagatcctgtttggctttggtcagctttccaggtttgcggcatcatgatgcgtcgcaggttcgggtgaccgtcgaaagtaatgccaaacagatcccaggtttcacgctcataccagttagcgttcgggaacagtttggtgaaggtcggtacgtgcaggtcgttttctgccagcgccaccttcagcatgatgtcgcggttacgatcgatagaaatcagatggtagaaaacggaaaaatccgcggcaggtaacccttcgcggtgtgtgcgcagacgttcgtccatgccgtgtaagtcaaacagcatgacgtaaggtttcggcagtttctttaagaaatcgccaacttccagtaattgttcacgcttgatccacacaacgggaaccccggtgcgagtcgcctgaacagtaaaggcatccggcccaaaacggttgcgcagttcgccaatcaccggatcatcaagatgatcgcgggtctgccaggcgggttcttgcgcggttaagtcggtcatattgttcaccattgcaaatggtccgtggtgaccagctggtggggggatggcggcgatatcttccggcgcggcatcatttttgaagatccggtggatgctggcgatagcgtcatcctcgcttatgccgtgcagcgggcaaggataaagcgcgcgataaacatgacccggcatcaggagcctgaccggtgcggtagtgcgaggaagtatgcgtgcgttggctggtgttacgtcgcctttgtcagttcttcgtgctggggatgtttttgagcggtccatggtttggtgtgtggatctgtgcacgtgcaatctacagacagtagcctgtgtattgcgagcacgcgtgtccgctgaccgatccgctgatgacgctgcaaagtcttgccagtggtcatctgcctgtaactcagtatttgcttttccagccagcgtccagccacccatcggatgatgaggtgaaaggcgcatggccgcgcgtaccatccagatgaagctcaggtgaagcgtcaggaagaggtggcgaaagccatctacgaccgccggatgaacagcattgagcaggcgctgccgaggaattacctgattcagaaatgttcctgcttgggcgtccaatgcttcaggctcgactggaaaatttacaggccgtcggtccggcctttgatctcgactatgatcagaatcgggccatgttaaaccaccctgaatgttggtccaaccctggatccgcgttttcagacctatcgctatttgcgtacgccggaagaaccggtaaaacgcgatagcccacgtcgtgccttcctgatgattatgtggggcattgtcggggggtgtctgccgcgcatttcgcgggttccgtgtcgtgtgttcgactgttgtctgcttgtgctcggcctctgtggcgtcatcttgggctggctttgctgcgtgtctggtgccgcactttcctgttgctgtcggctttagcttcggtcttctgtccttgctctgtcgtgtggggccgcctgcttttttcggcttctttgtcggttgtggtttggggcggtgtgtttctctctccgcttgggtcgttgtctccccgtggtactgctcgcctgggtgcggcgtgtcgctctcgtgaggatggcgtcgataatggcgcggtatctttaatcgagatacgtttgccagtgccgttccagccagtgttaacccagataagccctgcgcgcccgccgcctgcatacgtttcaccagcacttctgcgtactgagtcgggtgcagcgacaggaatgccgcgccgaagcaagcggagaaggttggcgtcggttcggtgatgccacgctcagtaccggccagtttggcggtgaagccagagaggaagtgatactgggtttgatcggcagtcaggcgagaaaccggcggcaacacgccgaaagcatcagcagtcaggaagataaccttagtcgcgtggcccgctttggaaaccggcttaacaatgttatcgatgtgatagatcggataagaaacgcgggtgttctcggtttttgaaccatcatcaaagtcgatagtgccatcttcacgcacggtgacgttttccagcaacgcatcacgacggatagcgttgtagatttcaggttccgcttctttcgacagcttgatagtttttgcgtagcagccgccttcgaagttaaacacgccgtcatcgtcccagccgtgttcgtcatcgccaatcaggcgacgtttcgggtcggtggaaagggtggttttaccggtgccggaaaggccgaagaacaccgcaacatcgcctttctcaccaacgttggcggagcagtgcatagaagcgatacccagcgcagttttcgccgccccggtgagggtcgccgcatcaatgatcatttccggtttctgcgcactggcatcaatcagaccatcggcaagcaccagacgcccttcggcatcagtgttcatcacttcaacttttttaccgttgcgataggtgatgatatcgcccagcttgaacgcattgccgctaatcaggttatccgcacagcagaggaacagcttcacgcgcttgttcagtccgcgcgtaatggcaaatgccagcgccccggtaaccgttgccgcgccgcccatgtccgacttcatcgagtccataaacgcagtctgtttgatgcaggcacgcgtacactggcgcttctttatcgccagttgggttgtaatccagccgccagcaataccggagaacgttctgaaccgcgtccgactgtgtgcagccccagggacgttatgtctcacgacgtttgtgtcttcttccggtgatcgctgaaacgcactttgtaaccgatgcaaccgcccggctccgtgtttcagatcttccgcaatacggttcgccactgttcttgccgccagacgacacgactgggtatggccgatcagtcctttaatcccgcgccccagctccat

SEQ ID NO: 139716 - DNA, 4402 bp, Homo sapiens
cgggcgatgcaagagcagttggccttctcccaactcgtacggccagttcgcgccgttctgccagtaacgctaataatttttcatccagcgcgctattatctctcgcagcgccagtaacgggtattccgatgtcatagtgttgctcttcttcaacttcttcgacgaagttggcgtctttcaccgatgttgcggcacgacgtgcttcgcctttgttcttccagtttattgaactcgccgttccagcttgttgatcaattcgttaattgcggtgtacatatcttcatgtttaccactggcaaccagaacgccgttaggtgtattgattgtggcgtcagcaacaaacccttgtggctctttggacagaatgatatgtggattaatcagatgtgtttgccatttttccagtttggcgagacggtctgcgacatgttggcggatggccggagtaatttccatttgtttgctggtaatgttcattgtcataaattttacctcttgtcttcccgtcttggtgaattcagcataccgttcttttaacagttgctgacggttctggaactgaccgttctcatcgcgccaggcaacgatgttttgcgccatcatgcgcgtcaggcccgccacgcgggttaacagcggaacagaagcagtgttgagatcgacgccaacggcgtttacgcagtcttctactactgcgtccagtttgcgggccagttgcgtctggctgacgtcatgctgatactgacctacgccgatagatttcggatcgattttcaccagctccgccagcggatcctgcaaacggcgggcgatagacaccgcgccacgcagcgaaacgtcgagatccgggaactcctgtgcagccagctcggaagccgagtaaaccgacgcgcctgcttcgctgacgattactttctgcgcggtcactttcgggaactgcttctgcacatcgagatagaaacgctcagtttcgcgggaagctgtaccgttaccgatcgctaccactttagagcgcactctcatagagcgcactcgcaacttctgtgatgtggtaagcaacaccctgacggcagaacccagccgtttcaccactgcggtagataaaatcgtgctcaaccgtttcctcggtctgccgattttcctctttgtgatgtacctgatgttcctgctggctatcaacatcggcggggcgttacagccgctgtttgacgtcggctccgtggcgctgttcctctccttccttgaggactccgggtatatggcgcgtgcggcgtttgtgatggaccgtctgatgcaggcgctgggcttgccggggaaatcctttgtgccgctgatcgtcggtttcggttgtaacgtaccgtccgtttcaatatatggccagatggagccttcgcggccggcatggctgtcttcgccggtgccgctggcgaccgatgagacatcatccatattggcgaccggtacgacaattcgtatctgcggatggcgcattgcgggcgggttgactaccgtaaccgggcgatcgccaccaagaaatgctgccacatcgctggctgagcgcacagtggcagaaaggccaattcgctgtgctgaggtgtggagcagcgcatcgagccgctccagacttaacgccagatgcgcaccacgtttactgcccgctaccgcgtggacttcatcaataattaccgtttcgacgccgcgtagcgtttcgcgcgcgcgggaggtcagcatcagatagagtgattcgggtgtggtgatcagaatatccggcggattacgggtgagtttgctgcgttcctgtgcaggcgtatcgccagtacggatccctacgcgaagattgacttccgtttcgccgcgccgccgccgttcatcggcaatacccttcaacgggatctgcaagttgcgctgaacgtcggtgcccagggcttttatcggtgaaatatagaggatgcgtgaggttttacgcttatgcgcctcgcgggtatcttcgccgccttcgcggaagagccgatcgagggcgtagagaaatgctgccagcgttttcccggagccggtcggtgcaatcaccagcgcatgttcgcttcgcgccgccacagccaggttgcggctgacgacacagctcctggcagaagagcaaaggtgaagaaggatggtcgaccctggtgcggaactggggccaatgcccgttgaagacctggcgcaacggcatacaggcagcagtgaagaggttgcgtcgtatctggaaaatcttcttgcagtaaaacgaatcttcccagcgatgataagcggacaggagcgtcttgcccgcttcgcgacctctttctgcgctatctccgggctcatgctctggtcacggctgaacaactggctcatgagtttagtctcggtattgccattgtcgaagagcagcttcagcaactgcgtgaacagggtctggtgatgaatctgcaacaagacatctgggtgagcgatgaagtatttcgtcgtctgcgtttgcgctcgctgcaagccgccagagaagcgacgcgtcccgttgcagccacgacctatgcgcgattgctgctggaacgtcagggcgtattacccgccaccgatggtagcccggcgctctttgcctcaacatcgccaggcgtttatgagggcgtagatggcgtgatgcgggtgatcgaacagcttgctgcgagcgctatcaacgcctcactctgggaaagccaggagttcgtctatgggaaaccggtttatgccgttggcgagaactacagccaggggcaatattatctcgccagtttcgccaataaaatttggctgtctccgcaaggcgtggttgatctgcacggctttgccaccaacggtctgtactacaaatcgttgctggataagctgaaagtttccacccatgtgttccgcgtgggtacgtataaatctgccgttgaaccgtttattcgtgatgatatgtcaccggcagcccgcgaagctgacagccgctggattggtgagctgtggcaaaactatctgaatactgttgccgctaaccggcagatccctgctgagcaggtattccctggcgcgcaagggttgcttgagggtttaaccaaaaccggtggcgataccgcgaaatatgcactggaaaacaagctggtcgatgcactggcatcgagtgcggaaatcgaaaaagcactgaccaaagaattcggctggagtaagactgataaaaattatcgcgccatcagttattacgattacgcattgaaaacgccggcagataccggtgacagcatcggtgtcgtctttgctaatggcgcaattatggatggcgaggaaactcaggggaatgttggcggtgataccactgcggcacaaatccgcgacgctcgccttgacccgaaagtgaaagcgattgtcctgcgtgttaatagcccaggcggcagcgttaccgcgtctgaagtgattcgcgctgaactggcagcagcccgggcagcgggtaagcctgtggttgtatcgatgggcggcatggcggcatctggtggttactggatttccacgccagctaattacattgtggctaaccccagcaccctgaccggttctatcggtatcttcggcgtgatcaccaccgtagaaaatagtctggattcgattggtgttcatactgatggtgtctcaacttcaccgctggcggatgtttctatcaccagggcactgccgccggaagcgcagctgatgatgcagttaagcattgagaatggctataaacgctttatcacgctggttgctgatgcgcgtcattcgacgccggagcagatgataaaattgcccagggccacgtctggaccgtctcggggatttcgatgatgcggtcgccaaagcagcagagctggcaaaagtgaaacagtggcatctggaatattacgttgatgaaccgaccttcttcgacaaagtgatggacaacatgtctggttctgtccgggcaatgttgccagatgcgttccaggccatgttacctgcaccgctggcctcgtatcaggtgcgctccccctgcctcacgtatatacttttgctctttcgatatcattcatatcaatatcatgcaaaagaaatcaatttacgttgcctacacgggcgggaccatcgggatgcagcgttccgagcagggttatataccggtgtcaggtcatctacaacgccaactggcgctgatgccggaattccatcgcccggagatgcccgatttgccattcatgaatatatcccgcgtaatggatcctccagatttaaccccggaaaactggcacctcatgctcgccatatttacgcccatgacgaccataagggctggcaattggccgcgcccaccaagggaataccccttgcccgcgcccggccagaactggacaccgcgctttaa

SEQ ID NO: 139717 - DNA, 1668 bp, Homo sapiens
atgctgttaggcgagcaggaaaacgtcggctggatcgatttcgttccaggtgaaaatgccgaaacgctgattgaaaagtacaacgctcagttggcaaaactcgacaccactaaaggcgtgctgtttctcgttgatacatggggaggcagcccgttcaatgctgccagccgcattgtcgtcgacaaagagcattatgaagtcattgcaggcgttaacattccaatgctcgtggaaacgttaatggcccgtgatgatgacccaagctttgatgaactggtggcactggcagtagaaacaggccgtgaaggcgtgaaagcactgaaagccaaaccggttgaaaaagccgcgccagcacccgctgccgcagcaccaaaagcggctccaactccggcaaaaccaatggggccaaacgactacatggttattggccttgcgcgtatcgacgaccgtctgattcacggtcaggtcgccacccgctggaccaaagaaaccaatgtctcccgtattattgttgttagtgatgaagtggctgcggataccgttcgtaagacactgctcacccaggttgcacctccgggcgtaacagcacacgtagtgatgcatgttggaatgcgtgcgcagcgagctagcgtgtatgtgggcgccgtgggattagttctgacgcacctgctggcacatcgcaaatttttgctgggaagttttttgctgctggcggcaacgctggtagtcatggcctgtttgccttccggcagttcattaacgctgctgctttttgttctcttcagcaccaccatttcggcagtcagtaatctggtgggcattttgcctgcggaaagttttcctactgacattcgctcgctgggcgtcggttttgccactgccatgagtcgacttggcgcggcggaggtgcgaatgaacattctgttagcgtttaaagccgaaccggatgccggaatgctggcggaaaaagagtgcagcgcgctcagaccagtttggggcgaaaagcagaaaaatcgccagagggatagcgcccggaaagcatatccagcgtggcgtcaaaaacacgtcttggcagatctttccacggtgcggcacggcgtacgcgggagtaccattcgtctacctgtaatgcatccatcgccgcggcggcaacggtttgctgcgcaaggacacccggatacaacgtccacgccgccagcgtctgtggatactaccgcaaccaacacgcaaacacctgccgtaactgcgccagcaccagctgttgatccgcaacagaatgcggttgtttcgccttcgcaggcaaatgttgataccgccgcgaccccggcaccaacggcagcaacaacgccagatggtgctgcgccgttgccaaccgatcaggctggcgtgaccacgccggtggctgatccgaatgcgctggtgatgaactttactgccgattgctggctggaggtcactgatgctaccggtaaaaaattgtttagcggtatgcagcgtaaagacggtaatttgaacttaaccggccaggcaccgtacaaactgaaaattggtgcgccagccgcagtacagatccagtatcaagggaaacctgtcgatctgagtcgttttatcagaactaaccaggttgcgcgtctgaccctcaatgccgaacaatcaccggcgcagtaa

SEQ ID NO: 139718 - DNA, 1236 bp, Homo sapiens; identical to SEQ ID NO: 128998

SEQ ID NO: 139719 - DNA, 3061 bp, Homo sapiens
atgctcgatcgtgaaggcaatccgattgaatcgcagttcaactatacgctggaagcggcacaatccagtttacctatgacgccgatgaccctgcggggcatgtatttttatatggctgatgcggcgaccttcactgattgcgcgaccggaaaacgtttcatggtagcgaataacgcagagctggagcgtagctacctggctgcgcgcggtcacagtgaaaaaccggtgttactgtcagtagaaggtcactttacgcttgagggtaatccggataccgacgagagttctcagcgcctgcgtatggaaggcaagcgcgtggcgctggtgcctaccatgggtaacctgcacgatggcccatatgaagctggtcgacgaagccaaagcccgcgccgatgtggtcgtcgtcagtattttcgttaacccgatgcagttcgaccgcccggaagatctggctcgttatccacggaccttgcaggaggactgcgagaagctaaacaaacgtaaagtggatttagttttcgccccttcggtaaaagagatctacccgaacggtactgaaacccacacttacgttgacgttcctggcctttcgaccatgctggaaggtgccagccgtccgggacattttcgcggcgtttcgactattgtcagcaagctgttcaacctggtccagccggacatcgcctgcttcggtgaaaaagattttcagcaactggcgctgatccgcaaaatggttgccgatatgggcttcgatattgagattgtcggtgtgccaattatgcgcgccaaagacggtctggcgctaagtcccgtgtgcgaaaagcgcggctggaaaaaatgggcgcagcagcgtggactgcgcaacatgcaatttttcccgctgcaatcgtatgacgctttacccgcactgctgaagatgggcgattgccatctggtggtgcaaaaacgcggcgcggcagatgccgtattgccgtcgaaactgaccaatattctggcagtaggcggtaacgcggtgattactgctgaagcctacacagaactggggcagctttgcgaaacctttccgggcattgcggtttgcgttgaaccggaatcggtcgaggcgctggtggcggggatccgtcaggcgctcctgctgcccaaacacaacacggtggcacgtgaatatgccgaacgcacgctcggggcgttcatacattccgagccccatgtcgttatcttcgggcacattgatctgaattttcgggcagccacgagcaatcagctttttctccagccgattaagcaacgcattggcaatcccacgcccacgaaactctggatgcacgccaagataataagcagacccgcgatgcccgtcataaccgcccatcaccgttccgaccacgtcaccgtttacctcagcgaccaaaaacaaactgacgtcatggttcatcttacgctcgatgtccatttccggatcgttccacggacgcagcaagtcgcaacgctcccaaagggtgatgacctcttcgaaatcttcctggcgaaatacgcgtatctccatggtattcgttacctttttgcggaaaataacaaaatggcggaaatcgcccaattcctgcatgaaaattatttgagcgttgacaccacagtggaagtatctattaccgtaacccgcgatgaaaagcttatcgcgtgcggtggaattgccggaaatattattaaatgcgttgctatcagtgaatccgtccgcggtgaaggactggcgctgacattagccactgaattgataaacctcgcctatgagcggcacagcacgcatctgtttatttataccaaaaccgaatacgaggcgctgttccgccagtgcggtttttccacgctgaccagcgtacccggcgtgatggtgctgatggaaaacagcgccacgcgactgaaacgctatgccgaatcgctgaaaaaatttcgtcatccagggaacaagattggctgcattgtgatgaacgccaatccctttacgaatggacatggtgaccgtattcaccgcattccggaagatcgcaaaaagaaaaaaggcaaacgtaaaccgccattctggacgcgtattgcgctgattgtttccgctgcgggcgtggcgttttcgcacggcgcgaacgacggacaaaaagggatcggcctggtaatgctggtactggtggggattgcccctgctggcttcgtcgtcaatatgaatgcgtccggctatgaaattacccgtacccgcgatgccgttaccaacttcgaacactacctgcaacagcatcctgaactgccgcagaagttgattgcgatggaacctccattgcctgcagcatcgactgatggcacgcaagtaacagagtttcactgtcatccggcaaatacctttgatgctattgcgcgcgttaaaacgatgctgccaggcaatatggaaagttacgagccgttaagcgtgagtcagcgcagccagctgcgccgcattatgctgtgcatctctgatacctccgcgaagctagcgaaactgccaggcgtcagttcacccttccgggtgatcctgtacaactttcgggatctgacgggtcaggacttaaccccggaaaccgtgacgcgtctggctctgcaaaacgagaatatcgttggcatcaaagacaccatcgacagcgttggtcacttgcgtacgatgatcaacacagttaagtcggtacgcccgtcgttttcggtattctgcggttacgatgatcatttgctgaatacgatgctgctgggcggcgacggtgcgataaccgccagcgctaactttgctccggaactctccgtcggcatctaccgcgcctggcgtgaaggcgatctggcgaccgctgcgacgctgaataaaaaactactacaactgcccgctatttacgccctcgaaacaccgtttgtctcactgatcaaatacagcatgcagtgtgtcgggctgcctgtagagacatattgcttaccaccgattcttgaagcatctgaagaagcaaaagataaagtccacgtgctgcttaccgcgcagggcattttaccagtctga

SEQ ID NO: 139720 - DNA, 3039 bp, Homo sapiens; identical to SEQ ID NO: 118706

SEQ ID NO: 139721 - DNA, 1365 bp, Homo sapiens; identical to SEQ ID NO: 129862

SEQ ID NO: 139722 - DNA, 3954 bp, Homo sapiens
ttacgccgcgactttaccgatatcatcgacgctgtgcgggaaaacgacgctatccgccagattgcggtcacaaccaatggttaccgtctggaacgcgatgtggcgagtggccgatgcgggcttactggcattaacgtcagtgtcgacagtctggacgcccgccagttcaagcactatcaacaaatccgcctcctgcaaaatatagttggtgctgcgagccgtgatccccagcatacccagcgacaacggatgcgcttttggcaacatgcccagcgccattaaagtcatggtggtaggcagttgcgctttctccgccagttcacgcacccgtgcgggcgcattgatcacaccgccgcccagataaagcaccgggcgtttggcagcgttaatcatcgccgctgcgtcacgaatgctttcttcgctaaaggcgggggcggcggctttttctgccatagcgggctgtgtttcaatctcaaaaactgccgtttgcacatccttaggaatgtctatccacaccgggcctgggcggcctgattgcgcaatgcggaaggcatcgctcatgacctgcgggagttcttcgatatgtctgaccagatagttgtgtttggtgatggggatagagatgccgtaggtgtccacttcctggaaggcgtcggtgccgatcatcgaggcgggaacctgaccagtgatgcaaatcagcgggatggagtccagccgcgcatcggcaatggcggtcaccaggttagtcgcacccggtccgctacaggccatacagaccgccggtttaccgtcggtgcgcgccattccctgagcgataaagcccgcgccctgttcatgacgggccagaatatggcggatttgcgtgctttggcttaaggcatcgtaaacaggcaggatagaaccgcccggaatgcctgtcacaatcttaatgccctgctgttccaggaaatgaacgataaattgacgaccactgcggcggatgtcgcagttggtagtagttttgcgttgagcatggaagtagtcattggggaccttgttggttttgtgtttaacaatatttatacaagcacagcttttgaagcgattgcggacggtggccacccataattggaccgcaacgatgtaaagcttaccgtagaggaaccctgtaaacgccaatggaggcaaccacgatcggcacagtgccatggtcgatgcaccaaaaccccggtcaatggcgcacacttgatcaaaacgttggtcatgtctgtaattaagatgaccgatctggatcttgctgggaaacgtgtatttatccgtgcggatctgaacgtaccagtaaaagacgggaaagtaaccagcgacgcgcgtatccgtgcttctctgccgaccatcgaactggccctgaaacaaggcgcaaaagtgatggtaacttcccacctgggtcgtcctaccgaaggcgagtacaacgaagaattctctctgctgccggttgttaactacctgaaagacaaactgtctaacccggttcgtctggttaaagattacctcgacggcgttgacgttgctgaaggtgaactggttgttctggaaaacgttcgcttcaacaaaggcgagaagaaagacgacgaaaccctgtccaaaaaatacgctgcactgtgtgacgtgttcgtaatggacgcattcggtactgctcaccgcgcgcaggcttctactcacggtatcggtaaattcgctgacgttgcgtgcgcaggcccgctgctggcagctgaactggacgcgctgggtaaagcactgaaagaacctgctcgcccgatggtggctatcgttggtggttctaaagtatctaccaaactgaccgttctggactccctgtctaaaatcgctgaccagctgattgttggtggtgggaagtgggtgcaatgcagcgtcgttacgcttaccaccgcgtgctgacgctaaagccttcaagcgccgcgcagccgctcccgggcagcgctttattgcagggctgattggtgtcgtaaaaatagggggcagcgcgtgcgcagacgcgccagcgagcagggcgcgggagagtaccgcgtaatcacgacgcacgcgctcgtgagccgccaggtcggtgttccgtaccagtgcgccgatgcgcagcccacccgcgtcggtcacttcaatcttatcgagcccgaggccgttcacatcgataaggtgggtgggcgtttcaatttccagcttcatcaggtccagcagattggtcccgcccgcgataaattttgcgccgggtacgcgctgagcgctaagtgccgcctcggcacagcgacagatgttgccgctcatacgttcacggatctcatcggcagttgtttctggagcggaaaccaaatcgaccgtgacgtgactgggaatgccgtcctgaatctcttttagcaccgctactgatgagcaaatttgcccggaggtgcagtagccgcactggaagccatcatgcttgataaaggccgcctgcatggggtgaagattatctggcgaacccaggccttcaatggtggtgatctcggccccctgatgcatgactgcaagcgtcaggcaggcattaagcctttcgccagcatgatcatgtgccgcgtgggattgcagcagatccacgtaggagtccatactggctgcggtggttgggccaagtgaacctgatggataaccggcaggggttttcgccggacccgcgtagtagatcgggtgatctttgatgtactgcggaagttctttaccggcgtcaatcagctctttcagcttggcgtgtgcaatatctcggcccacgataatggtgccggtgagcgacaaacgagtggataccgggtattgcgaaagctgggcgaggatctctttcatcgggcggttaaggtcaactttcacccgttcgccttcaccggcctggcgcagttcttgtggaatgtactggcctgggttgtgttccagtttttcgatccagataccttcgcggttgattttcgctttaatgttacggtcagcggagcaggagacgcccatgccgaccgggcaggatgcgccgtgacgtggcagacggataacgcgaatgtcgtgcgcgaagtatttaccgccaaactgcgcgccaagaccgagtttctgggcctcttccagcagttcctgttccagctggacatcgcggaacgcctgaccatgttcgatcccttccgtcggcagttcatcgtaatagtgagcgcttgctaacttgacggttttcaggttggtttccgcagacgtaccgccaatcacaaacgcgatatggtacggcgggcaggctgcagtaccgagggtacgcattttctcgacgaggaagtttttcagtttgccgggagtcagcagggctttggtttcctggtagagatacgttttgttggcagagccgccgcctttcgcaacgcaaaggaatttgtactcatcgccatctaccgcgtacaggtcgatttgcgcaggcaggttagtgccggtgttgacctctttgtacatgtccagcgccgcattctgtgaatagcgcaggttatcttcgatataggtgttatagacgcctttcgacagcgtttcttcatcaccgccgccggtccacacgcgctggccttttttaccgacgatgatcgcggtgccggtatcctggcaggtcggcagcacgcctttggcggcgatttcggagtttcttaagaattgcagcgccacgtacttgtcgttttcgctggcttctggatcgtgaagaatagccgcaacctgtttctggtgtgccgggcggagcataaaagaagcgtcgtgaaaggcttgtgcgccagcagggtcagggcttctggttccactttcaggatggtttcgccgtcgaagtcggcaacgctgaacgcgtaatcggtggcgtgattgtgccttgctgagcaaccgggtgataccctgctgacttggtatagagcgcat

SEQ ID NO: 139723 - DNA, 1631 bp, Homo sapiens
atggtggcgagcttgaggtcgcgagccggggcggcaatgctcaacatgccctccggcccgctggcggaaaccagcgcaaccacggtaaaggagaccacctctaacgagaaattccgcggcgtacgtctttatgtcagcgaaaaccagctgaaaatcaccgccaacaacccggaacaggaagaagcggaagagatcctcgacgttacctatagcggtgcggagatggaaatcggcttcaacgtcagttatgtgctggatgttctgaacgcgctgaaatgcgaaaacgtccgcatgatgctgaccgattcggtttccagcgtgcagattgaagatgcggccagccagagcgcggcttatgttgtcatgccaatgagacttggcaaaaccagcgtgctggaagccatctatacgctcggccatggtcgggcgtttcgcagtttgcagattggtcgcgtcattcgccatgagcaggaggcgtatgttctccacgggcgattacagggcgaagagcgcgagacagcgatcggcttaaccaaagacaaacagggcgacagcaaagtccgcatcgacggtacagacgggcataaggtcgcggaactggcgcacctgatgccaatgcagttgataacgccagaagggtttactttactcaacggcgggcccaaatacagaagagcattcctcgactgggggatgctttcacaacgaaccgggatttttcacgtctggagcaatctcagccgatggtcaagccagcccaatgggggcctagccaagtggacacgttcgaacagataccccggggataagagatatccccgggggacaataccctggcccggaatagcgacacacacacaccaagcgaagcacagccaccagaacatgccaaagcaaagcgttccggccattgctgcggtacgcggcctggggtcgatgattgcggtagagtttaacgatccgcaaacgggcgagccgtcagcggcgattgcacagaaaatccagcaacgcgcgctggcgcaggggctgctcctgctgacctgtggcgcatacggcaacgtgattcgcttcctgtatccgctgaccatcccggatgcgcaattcgatgcggcaatgaaaattttgcaggatgcgctgagcgattaatagcccaacgcaataatgtctgatgcgctgcgcttatcaggcctgcaaacgacgtattgattatgtatgccgaataaagcattcacgccgcatccggcaagttgtattgctcaacttcgctaaatctggtgctttttcaacaacgcgcggaactgatgataagttaaccccagtaattcagccgcgcgcttctggttatatttcccttgttgcaaactgagttgcagcaactctttttcctgctgcatctgaaactcacgtaaatccagcggcagtgttggaagcgaggtggtttctgaaacggcgatagcgtcttcaggcggacgccgtttaaagggatcaataatgatgtcatcaagcggataatcgctggtgccgtggcgatacactgaacgttccaccacgtttttcaattcacgaggggatcgctctagagtcaacgggcagtcagtcaagtcgaaattcagcctttttagctctgccat

SEQ ID NO: 139724 - DNA, 1255 bp, Homo sapiens
atgcgctatgagagcatgatctctaagagaggaaaggagtacgatgtgaagaagggcgtccccccctcgtccaaagctcgtacgcgaacttctctctttgaatgggttacctatggcctgaatttccctgctctttgggccctccacgcgccatggcgctctgggactattcgccttgggcagtgtacccggggagtgggtgggcatggcggggacaccccctgctggcgcactctacccctggctttttctgcatgcaagtattcgggctgtgcaccctggtacccccatactttcgtgggcctacctggcttgtcccacctttcccaggaaattcttttgggtattcgcaagacggaccaatggttaaatccccttcaaagtaccttccaagacgtttgtgatcctcagcaggaattttccagattctgcgttgtttacgccttgagttatatccgtaagattacacggcatttcaacacaggactccctcgcacgccatcgaacgcttgtttaaatcagacatcgaagcgaagcaggtggcggcgattattttcgaaccggtgcagggcgagggcggtttcaacgttgcgccaaaagagctggttgccgctattcgccgcctgtgcgacgagcacggtattgtgatgattgctgatgaagtgcaaagcggctttgcgcgtaccggtaagctgtttgccatggatcattacgccgataagccggatttaatgacgatggcgaaaagcctcgcgggcgggatgccgctttcgggcgtggtcggtaacgcgaatattatggacgcacccgcgccgggcgggcttggcggcacctacgccggtaacccgctggcggtggctgccgcgcacgcggtgctcaacattatcgacaaagaatcactctgcgaacgcgcgaatcaactgggccagcgtctcaaaaacacgttgattgatgccaaagaaagcgttccggccattgctgcggtacgcggcctggggtcgatgattgcggtagagtttaacgatccgcaaacgggcgagccgtcagcggcgattgcacagaaaatccagcaacgccgcgctggcgcaggggctgctcctgctgacctgtggcgcatacggcaacgtgattcgcttcctgtattccgttgacattcccggatgcccaattcgatgcggcaatgaaaattttgcaggatgcgctgagcgattatagcccaagcaataatgtcttatgcgctgcgcttataggctga

SEQ ID NO: 139725 - DNA, 598 bp, Homo sapiens
aattttaagatattgtcataatttatctaattactttttctaaattctaacttaatagtgcttataaactacttttaatttgttgatggaaaacctaagtgttaagtgccttccttagcctacacacaatgaatgcaattttcaagtccagttgccaaatatggtttattagaagagaaccaccctggcagaaggaagccaggaagaattgatgagggtcaaccacagctagggcatgattaccctgttataaggtgtagaaaacgttgcccaggacaacatcacgcccgttgatacgaatcacatctgtaactgccctggagaatgttgaaataaaaatgagagtctcccaggaactgagcagttcaagcgcgccttcaggaacgacgtccactgtttctcccaggactctttgagatcctcccatatcattcttacaaacctgagccactcttgggaaaactacctgcagaggaaaaacacatagggaaaattaaatgcattcattttgcaaggagatcttagtagaatctgcattccttgaaaacagaaacaaaacaacaaggtgcttaatactgtttctaaaatcagtaacaaa

SEQ ID NO: 139726 - DNA, 2090 bp, Homo sapiens
atgaggggccacaattggattgacatggaccaagcccgtcaacaatccacgccacacacagacaggaaaatatgccacaagaacgacagaccgcggacaacacccctgagaaaaatagacgcacatccccacactttaataattttacccgcggagagcacattatcaaccacgaaatacaaattacgagctcttctggtcgagaacacaaataaggacaaaagcgccgtcagtgttgtcttcagaggctctgtcttgcatcagcaggctgcaaattttcctaacttgatgctctgcttccaattaaagaacggtgttaacgcctgcaatgacttcataatgctctttgtcgacgacaatgcggctggcagcattgaacgggctgcctccccatgtatcaacgagaaacagcacgcctttagtgaaagcgttccggccattgctgcggtacgcggcctggggtcgatgattgcggtagagtttaacgatccgcaaacgggcgagccgtcagcggcgattgcacagaaaatccagcaacgcgcgctggcgcaggggctgctcctgctgacctgtggcgcatacggcaacgcctgcaaacgacgtattgattatgtatgccgaataaagcattcacgccgcatccggcaagttgtattgctcaacttcgctaaatctggtgctttttcaacaacgcgcggaactgatgataagttaaccccagtaattcagccgcgcgcttctggcgagtacaacgaagaattctctctgctgccggttgttaactacctgaaagacaaactgtctaacccggttcgtctggttaaagattacctcgacggcgttgacgttgctgaaggtgaactggttgttctggaaaacgttcgcttcaacaaaggcgagaagaaagacgacgaaaccctgtccaaaaaatacgctgcactgtgtgacgtgttcgtaatggacgcattcggtactgctcacctgcgcgcaggctttctacttaccggtatcgtgtaaattgcgctgctcgttgcgctgcgcaggcccgctgctggcagctgaactggacgcgctgggtaaagcactgaaagaacctgctcgcccgatggtggctatcgttggtggttctaaagtatctaccaaactgaccgttctggactccctgtctaaaatcgctgaccagctgattgttggtggtggtatcgctaacacctttatcgcggcacaaggccacgatgtgggtaaatccctgtacgaagctgacctggttgacgaagctaaacgtctgctgaccacctgcaacatcccggttccgtctgatgttcgcgtagcaaccgagttctctgaaactgcaccggctaacctgaaatctgttaacgatgtgaaagctgacgagcagatcctggatatcgtcagagatctggatgcagcgaatgtcgttattaatgctgtattcagttacgtcaccaatgtatggggatgggcatttgaatggtatatggtggtgatgcttttcggttggttctggctggtgtttggcccgtatgccaaaaagcgtttaggtaacgaaccgccagaatttagcaccgccagttggatctttatgatgttcgccctcctgtacgtctgctgccgtactgttcggctcggtagagaaatacaccgaagggcgcaaatcgttcatattgatattgagccgacgcaaattggtcgcgtgctgtgtcggatctcggtattgtctctgatgctaaagcggcgctgacactgctggtgaagtggcgcaggagatgcaaaaagcgggtcgtctgccgtgtcgtaaagatgggtcgccgactgccagcagcgtaaacgcactttgctgttataagtgtagaaaacgttgccaggacaacatcacgcccgttgatacgaatcacactgtaactgcgtttgtttagcttctcgcagtcctcctcaaggtccgtggataacgagccagatcttccgggcggtcgaactgcatcggttaacgaaaatactgacgacgaccacatcggcgcgggctttggcttctcgaccagcttcatatggccatcgtgcaggttacccat

SEQ ID NO: 139727 - DNA, 987 bp, Homo sapiens
atgaaagttaaagtactgtccctcctggtcccagctctgctggtagcaggcgcagcaaacgctgctgaagtttacaacaaagacggcaacaaattagatctgtacggtaaagtagacggcctgcactatttctctgacaacaaagatgtagatggcgaccagacctacatgcgtcttggcttcaaaggtgaaactcaggttactgaccagctgaccggttacggccagtgggaatatcagatccagggcaacagcgctgaaaacgaaaacaactcctggacccgtgtggcattcgcaggtctgaaattccaggatgtgggttctttcgactacggtcgtaactacggcgttgtttatgacgtaacttcctggaccgacgtactgccagaattcggtggtgacacctacggttctgacaacttcatgcagcagcgtggtaacggcttcgcgacctaccgtaacactgacttcttcggtctggttgacggcctgaactttgctgttcagtaccagggtttcggtatcggtggtgcgatctccagctccaaacgtactgatgctcagaacaccgctgcttacatcggtaacggcgaccgtgctgaaacctacactggtggtctgaaatacgacgctaacaacatctacctggctgctcagtacacccagacctacaacgcaactcgcgtaggttccctgggttgggcgaacaaagcacagaacttcgaagctgttgctcagtaccagttcgacttcggtctgcgtccgtccctggcttacctgcagtctaaaggtaaaaacctgggtcgtggctacgacgacgaagatatcctgaaatatgttgatgttggtgctacctactacttcaacaaaaacatgtccacctacgttgactacaaaatcaacctgctggacgacaaccagttcactcgtgacgctggcatcaacactgataacatcgtagctctgggtctggtttaccagttctaa

SEQ ID NO: 139728 - DNA, 1183 bp, Homo sapiens
atgatggcagtatccgcaccctatgtaggcgacaacatcgacgatggcggaatatacacgcaaagcgagacccatacaatcagttccgattgtgtgctggacaccgccgccatgtggactccactttcggccgtgataggctgcaccactaaccctgctcagtacccagcaaacgctgctgaagtttacaacaaagacggcaacaaattagatctgtacggtaaagtagacggcctgcactatttctctgacaacaaagatgtagatggcgaccagacctacatgcgtcttggcttcaaaggtgaaactcaggttactgaccagctgaccggttacggccagtgggaatatcagatccagggcaacagcgctgaaaacgaaaacaactcctggacccgtgtggcattcgcaggtctgaaattccaggatgtgggttctttcgactacggtcgtaactacggcgttgtttatgacgtaacttcctggaccgacgtactgccagaattcggtggtgacacctacggttctgacaacttcatgcagcagcgtggtaacggcttcgcgacctaccggaacactgacttcttcggtctggttgacggcctgaactttgctgttcagtaccaaggtaaaaacggcaacccatctggtgaaagctttactagtggcgtaactaacaacggtcgtgacgcactgcgtcaaaacggcgacggcgtcggcggttctatcacttatgattacgaaggtttcggtatcggtgtacacccagacctacaacgcaactcgcgtaggttccctgggttgggcgaacaaagcacagaacttcgaagctgtagctcagtaccagttcgacttcggtctgcgtccgtccctggcttacctgcagtctaaaggtaaaaacctgggtcgtggctacgacgacgaagatatcctgcaaatatgttgcatgtcagacccgacacaaaatcgccaggccagtgccaagctcgccctgccttgccaggtcgcactcctcagcagtgcatccccccatcatgcattcacaccttccacaagcatcatccaaccagctcacatcattattcattcttcaccaccaccatgggcatcatcacacagcatttccacacatcagcagcacacacagtgttcatcgtcatccaacacacttgcagtgcactag

SEQ ID NO: 139729 - DNA, 1980 bp, Homo sapiens
tcattgccagagtcgtgtcccaaatgcgaacatcctcgtgcttacttcatgcagcttcagacccgctctgcagatgagccgatgaccaccttctacaagtgctgcaatgctcagtgtggacaccgatttgaacaggctacgaaacgatgagaggccgctgcagaccacatcaccgacccagacggcaccgcgcgcctggttgagttccagagccacttcgcaggttttattgccactgtagcgaaaatcgatagtggggtatttcttatccacgtccatgacaaactcgccgttttcatcggttcgggttcggccgatatggttgttaatccgtgcgttagccagcagtgtgccgtcttccgcacggatacgaccggagacggtaaccatctgcttcacctctggctcaatgacagcgacattgcctggatagagagtcagacgacttttgcggccgctgacgatatcgtaactgtcgagtgagtttttgctgttctgtaactccacctcatatcttccatagggagagagcgggagatagttacgcttgccgttaagcgggaaaatccgcccgttgattttggcgctgatctgaccgtcgtcctccagcccggtgttgaatatcaccccagcgttgccatcagtccgcccgctggcagcaatgtttttaccctgccagccgacgctgccattggcggtcaagttggtattgacgtagccgtccgccgcgctattgacgttcagcgttccgctggcgtaacgagcgtcgaattgtgcatacgccccgccgccggcgtttcgcgcagtattcctcgctcgtttcatctcaattgtgtctctgggtttgctcggcgtcgcggtgccggtgcagatccagatgatgacacattccacctggcaggtggggctttcggtgacgctgaccggcggcgcgatgtttgttggcctgatggtcggcggtgtgctggcggatcgcttgctaccgttgttaagccttccggcgttgccaccgccaccgcagccgcgtgagcatccgttgaaatcattactggcaggatttcgttttctgcttgccagcccgctggtgggcgggattgcgctgctgggtggtttattgacgatggcgagcgcggtgcgggtactgtatccggcgctctggccctggttgccctgggtggccggtgtccgtgctctctggctcgctccgggcagtgcgcctctcgtgcttagaggctcgccgcgggagcattcaggaggccttcccggaggtaggctgttgggaagaagggtccagctcggggagcattcagggaggccttcccggaggtaggctggtgggaagaaggggtcagcgccgggagcattcaggaggccttcccggagataggctgctgggaagaaggggtcagcgcggggagcattcaggaggccttcccggaggtaggctggtgggaagaaggggtcagcgcggggagcattcaggaggccttcccggaggtagggtggtgggaagaaggggtcagcgccgggagcattcaggaggccttcccggaggtagggtggtgggaagaaggggccagcgtggggagcattcaggaggccttcccggaggtagggtggtgggaagaaggggtcagtgtggggagcattcaggaggccttcccggagatagggtggtgggaagaaggggtcagtgtggggagcattcaggaggccttcctggaggtagggtggtgggaagaaggggtcagtgtggggagcattcaggaggccttcccggagatagggtggtgggaagaaggggtcagcgcggggagcattcaggagccttcccggagatagggtgctctggtccggcgcgtcgtcgcgctgcctccgtctttgttgtcttgtggtccgcgttgggcggctggcggttcgcgttgctgcctcgctgtttctgtctcttggtgtgtgtggggttgtctgttcggtggtcat

SEQ ID NO: 139730 - DNA, 3462 bp, Homo sapiens
tcaggcgggtcgtgcaccgagatccagcgctgtcttccaccagcgaataatcaatacgaattcaacgcggtataaattcggcagtaccataaacggcacgtaagcgtaaacaatgccgatataaacggccagattggtatgcagaatggtcagcggttgatcgataacccccagccacagcagaaaattattcagcacaccgttgttttttaatattcccatccaggcataaacgcggatcagaaacgaggtccacgacggcaggatcaccagtagtaataaaatattacgggtcgaaggcttactgtgcgccaccgcccacgccagcggatagccgatcagtaaacagcaaaatgtcgaaatcgcagccacctgtttcctctggatcggcagatcgcagagcagcgggtcctgcaccaccatagccagaccctcctggaacacgtccatggcctcggagtgcggcagcgcctcttcttcgtcctcatcttcctcttgcgcctcggtcccacccgcggcctccgtctcctccagggccgcccctctcagccgggctctgcccgcactgccagcccgcactagggaggccaagcgcgcacgcgcaggaactgcggcccgccccagcgaggccgcccagccactggcgcgccggggggggtggggcggctgcagtgaccaatgacaagtgcgagacagcctgcagcagggccgggagcgcagaatcgccctgtctattggttggttggtgtggcgggaaggctgccaggaccaatgtgagctcgaggcgggcggcgcctcggcgctgacccggcgtgggagctgccgggagttggaccctgcgccgttcgcgaccatgctgctgttctgccccggctgcgggaacgggctgatcgtggaggacggaccaacgctgccacgcctcgaccgatgcggtccccccttcataaagatcggccagattgttttgcgcgtcactatggccttgtaatgcagctgtttgtaccagaaaaatgccagcgcatagtcttttgcgactccgttgccatttctgtacatccacccaagattattttgcgcataagacattccgctctccgcggctatctgataccagacaaccgcttctttataattgggggcttctccacgatccagtgtccagccaagggcgttggaagcgaaagtatggccttgtagggcagcttttttcagccagaagatggcttgctcattatctttatgacggcttttatcctcggtatacttttgccctaaggaatactgtgcttcacaatgaccttgctcagcggccagcttcagccagtaaaaggctttttcgtcgtccggagaatcaattgcgctatcgcgattataataaaacccaacaatatattgagcctcgcaatcgcctttttcagcacgttcgataatctcatcgataaatccggcgacaaaacggtctgccggatagtggtacagctccagcggtttcccaacctgcgccacgcgaccggcgtccagcaccacgattttgtcggccagcgtcatcgcttcgacctgatcgtgggtgacgtaaatcattgtgcggcccaggcgtttatgcagacgggagatttcgatacgcatttgcacacgcagtgcagcatcgaggttggagagcggttcatcgagcaaaaatacgcttggctcggccaccagcgtacggccaatcgccacacgctgacgctgaccaccggagagcgctttcggtttgcgatccagcaaatgcgccagttgtagcacttccgccacctggttaacgcgttggttaatcacctctttttttgcgccagccagtttcaggccaaatgacatgttttctgctactgacaggtggggatagagcgcgtaagactgaaacaccataccaacgccgcgttctgctggcggagtgtcattcatccgtttctcaccgatgaacaggtcgccgctggtgatcgtctcaagcccggcaatcatgcgcagtaaagtcgatttaccgcagccagacggtccgacaaacaccacgaattcaccttcatggatatcgagattgatatctttagcaaacgccgatatacaacactgaagaagcggcgccactgaagcccgccatacggcgcattgacagagcgcggaatcaaacgaagggccacggtagctgatgcctgcattgggcagcattaagccgatgcgttcgccttcaacactgtatttttcaaggatgcgtccaacaaacagcgttttcgtaagcaatttgcgataggagtctggggtaaagttgacgtcttcgacacatttcttcccggctccgaagcggtacattgcactcagtaaagattcgtacagcgtttcacgcgggcgcaccgccattcgcgcttccatcattatttgatgcagcatttcgccagcgattttgcgacggtcacgggcacgcggcgcatccggcatcgccacctgcgttggtggcaaaatatgcagagtaatttgcgggaacaagcgacgtttaaccagacctttcaggcggctgaagtgcgtaagttccgccccttcaatacgcacaggaataaccgttgcaccagacttcgccgcgacaaaacccgcgccatcgtagattttcatcagcgagcctgtcgtggtgatgcgtccttcagggaaaatcaccactggtcggccctgttccaccagacgtaccagatgtttaatagccataggttgcgtcgggtcgagaggaacaaagtcgataaatgatttcagccaacgcatataccactgttggcttattgaggtgtaaacggcaaacacgaaagaacgtttttgttcttcgttcttctctgactcctctcttttctccgtgtaaacatgcacaccgacatacacgatgagatcaaagacccacagagcacagacactcaagaggagaacgaagaactctagaggatccccttcacgcagctcagccagttcgaccagcgcatcctggtaacgaccttccgtaaagtacggctccagcttgtcacgtagcaccacaacctgcatcgccagtttaatttcttccggctgtttgttcgccgccgccagtgcagcagctgcatccagggtacggaaatgcgataccgctttcatacgggcatcgaaatcagccggacgagtcggacgacgcgccagtaccgcctggatggtgtcaacggtataaccttcgtcctgataccaggcgcggaagcgaccgagcataaagtcgataacatcatcaactacgttggcattagtcagcttatcgccatacagacgcaccgcttcttcggtcagcgtttgcagatcaaggttgaggttcttctcaacgataattcgcagcacgccaagcgcggcacgacgcagcgcaaacgggtctttgtcgcctttcggatgctgaccgataccgaagatacccgccagggtatccat

SEQ ID NO: 139731 - DNA, 844 bp, Homo sapiens
taccaatctgaagggggagctgccgggagttggagcctgcggagttcgagaccatgctgctgttctgccccggctgcgggaacgggctgatcgtggaggagggacaacgctgccacccgctgtggcctgcaacacgtggcccctacgtgcacaacatcaccccgcaaggtaacacaatctggaagtacccaaaactgaaagaatgtgggagtgatgtgcttggtggagcagctgcctggggagaatgttgactctactgcagagtcgtgtcgcgaaatgcgaacatcctcgtgcttacttcatgcagcttcagacccgctctgcagatgagccgatgaccaccttctacaagtgctgcaaatgctcagtgtggacaccgctggagggattagggccagggatggcccagctgccctagtgtgtgcttgccttgtccctcggggtagatgcttagctggcagtatgagtcgtgtgtcctgagggtctttgctagtgtggtggaaagataaaccttttgaggtgaagagccagggggtcaggaaatatggcctatctgccaggcagggtggatgaagtcatgaatgtctgggagtttttctgtgtggggaggagacagagacccataactaaatatgctctgtgtaaagtcctattctttcatcttccactttattggcagttgacattcccttactcccaatcaacactcttaaatatttgtactgtttgtaaaacttagtacatgtccctaaatatttaactgttacttgtaaacttgtgtaatttattatttattttaatcaaaattctgaatatttcatttaaatgaaagttggaatattgc

SEQ ID NO: 139732 - DNA, 567 bp, Homo sapiens
ctaccgactataccctttgtgttgcagacaatccatgcagattcgagcgaacatggcatactcactaaaacacaaaagaaactccgaggacacccagcgttttagcggcgtgtagcgtgtgcgtccacgggcaaacgaggaggcgtaaagggtgaactccgtcaccgcatacgaccagttaaaacctggcggcgggattgtcaccgcctcgctggcgtcgcgcaataaggtaatatgtggatgaaacggacgattgctttgaaaacaaccgctgcgggcagcctgtgaacggagcatattcgccagctggattaagccgcgtggcggctgacgcatccctaaccacaccacacgcgaaatagactttaagatccctgacactgcatcagcacgataaaacgcgtaccgaactactgaatgatgtcgcaggggcgctggctcttgatgacaaactcggacgtagcaccaatcaactttccggcggtgaatggaccccctccttggccagacccttcctcctgcttgggccacgcaagatgcgcctgcttccccttcaccttccgccat

SEQ ID NO: 139733 - DNA, 891 bp, Homo sapiens
cattgtgatggaaagcattttactggcgttggcaaaataatgtctattgggatgcagttacaagatgttgcggaatctacccgcctggggccgctttctggcgaggttcgggctggggagatcctgcacctggtgggcccaaatggggccggtaaagagtcccttactggccgggaatggccggaaatgcccaccgtaaagggaaccatccagttcccgggccaccccctggaagcatggtccgcaaaaaaaactcgcgttgcttcgcgcctatcttttcccaacagcagacgccgccgtttccaccgccggtctggcactacctgacactgcatcagcccgataaaacgcgtcccgaactactgaatgatgtcgcaggggcgctggctcttgatgacaaactcggacgtagcaccaatcaactttccggcggtgaatggcaacgcgtacgtcttgctgcggtggtgttgcaaatcacaccacaagccaatcccgcaggccaattgctgcttcttgatgagccgatgaacagtcttgatgttgcgcaacaaagtgcgttagacaaaattctgagcgcgctgtgtcagcaaggactggcgattgtgatgagcagtcacgatctcaaccacacattgcgtcatgcgcatcgggcgtggttgctaaaaggtggaaaaatgctggccagtggacgcagggaagaggtgctcacgccgccaaatctggcgcaggcctatgggatgaattttcgccgtctggatatcgaaggtcacagaatgctgatttcgaccatctgatttcattagtatcttgaaaatcgggtaattacgccgctaaattaatgcaagaataaaaaacagaggaaccgtacggaatgcgtttctgccttatttt

SEQ ID NO: 139734 - DNA, 430 bp, Homo sapiens
aatcaggttgacgcgctgcgccttccaggaatttacccccgaggatgccgataccgatcgcagcaccgattgccgccagacccatcatcacagcggcagccatgtacagcagatccatattcaggttttccatgacagtctccagtttgtttcagttaaaacgtagtagtgttggtaaattaatgttcttcagacgccatcgacagatagacgatcgtcagaaccatgaagatgaaggcttgcagcgtaatgatcaggatgtggaaaatggcccacggcacattcaggatccactgtgaccaccacggcaagagaccagcaatcagaatgaagatcagctttccggcgtacatgttaccgaacagtcgcaaaccgagggaagctggtttggacagcatgcttaccccttctaggattagtcgacacaatg

SEQ ID NO: 139735 - DNA, 796 bp, Homo sapiens
ggtatctgttttgcggaccttccaccaggtgatcaccgccaccagcagcgtaaaaccgacaaaactcaagatttgtaacgaattcatctcatagcccttatttatgtttatgtcccggacgcatgaatatagggagaggtaaaatgcgtcgggtcaggcagtcagattcttaaaatacaaacgtcgtatccctgaacggattgttttctgttaagttcaggttgtaagcataattcgccggagggattttaaaatgaatggaaaattgcaaagttcagatttaaaaaccggaaactccggacaatattccccttattgattaaagaaaattgtgatcttcaaccggaattttttttgatctcggtctgggcatacctacgccgacgagcattaccgggtgatctggccgcgggacaagaagaaaccgcttatcgccaactcatgggttgcggtgtataccgtacaaggatgtgggaaaattcttttaaagaatggcgaacaaataacactgcatggcaactgtattatattcttaaagccaatggatattcactcttatcactgtgaaggtttagtctgggaacagtactggatggaatttacccccaccagtatgatggatattcccgttggtcagcaaagcgttatttataatggcgaaatttataatcaggaactcaccgaagttgctgagttaataacttcaccagaagcaataaaaaataatctggcagtcgcttttctgacgaaaattatttatcagtggatttgtcttatgtacgcagatggtaaaaaa

SEQ ID NO: 139736 - DNA, 976 bp, Homo sapiens
atgaatggaaaattgcaaagttcagatgtaaaaaacgaaactccgtacaatattcccttattgattaacgaaaatgtgatctccagcggaatttctctgatctcgctctggcatacctacgccgacgagcattaccgggtgatctggccgcgggacaagaagaaaccgcttatcgccaactcatgggttgcggtgtataccgtaacaggatgtgggaattcggaccgtttaaataacattcgcaccctccgtgcagatggctcgcgaattctccattgacgttcttgacgaaatgctccaacaattcagggttgtcactcctgacagacccgaacataaacaactgccacagcatgaactggcagagcgccaggaaaaaattagcacctggctggagctgatgaaagctgacggaattaacccggaagagttattgggtaatagactctgctgctgcaccacgcggctgggaaaaaacgccagcccggttcggcgaaatatttattcacccgatgttaacggtgaaactaaaacctggaccggtcagggccgtacaccgaagccaattgctcaggcgctggcagaagactgtcatggaaaacctgaatatggatctgctgtacatggctgccgctgtgatgatggctctgcgggcaatctgtgcttcgatctgaatcgacattgcggcctgggtgtgcggttacgaccacgaaaaatcaatggtgattaccgctcacggttttgccatgccggtgaaacaggcgtttgcgccggtgctgaaactacgcaaatggctgaatccggtgtctctggtgccgggctggcagtgcgaggggaacgcgatggcaaacgatcgcctttgcaaatcgccataatgatgaatggcagcagcgggcaggcaatcagcagcaacgtgatcatcctccaactttttctggtggaggtgataaaatctttaaggatgctctatatgtag

SEQ ID NO: 139737 - DNA, 1362 bp, Homo sapiens
atgaaccgaccggacgggctggatgtgtcggtgcaggcccgcctgctcgacctgctgcgcggcctggtggtggagctgaacctcgcggtggtgattgtcacccatgatttaggcgtcgcccgcctgctggcggaccgtttgctggtgatgaagcaggggcaagtggtggagactgctggtgtcatcggttttgcagaattgagccggtgccggatgcggcgtaaacgccttatccggcctacaaatgcgctccccgtaggtcggataagacgcgtcagcgtcgcatccgacacccgaaccacgaggcgaaaaatgattaacgtacaaaacgtcagtaaaaccttcatcctgcaccagcaaaacggcgtgcgcctgcccgtcctcaatcgcgcctcgctcaccgtcaacgcgggcgaatgcgtggtgctccacggccattccggcagcggcaaatcaagctctgctacgctcgctgtacgccaactatctgcccgacgaagcgcgcaaagtggtggaaatccgcaaaatcaccgtcggctgggtgagccagttctgcgcgtcatccgcgtatctcagactggaagtgtgatgcagcgctgtcgataccgggtccggttaagctgcgcccacaaaagcgaagacctggaccaacaacaggtcttcggtggcgaaggcattgaaacgttcctgtatgtgatctctggaaatatcactgccaaagccgaaggcaaaacatttgccttaagcgaaggtggctatctttattgcccgccaggctccttaatgacgtttgttaacgcccaggccgaagacagccaaatctttttatataagcgccgctatgttccggtagaaggctatgcaccgtggctggtttctggcaatgccagcgaactggaacgcattcattatgaaggcatggacgatgttattctgctggattttctgcccaaagagttaggttttgatatgaacatgcatatcctctcttttgcaccaggtgccagccacggttatatcgaaacacacgttcaggaacacggtgcctatattctttccggtcagggggtttataacctcgacaataactggatcccggtgaaaaaaggcgattacatctttatgggcgcttattctttacaggctggttatggtgtagggcgtggtgaagcgttcagctatatttactcgaaagattgtaaccgcgacagaagagaaaagaagagaagcgagaacgaacagcagaagagcacacgagcagcaaagaagagaacacaagataagaagaaagaaagacaagcgaagacaaagaaacaagagaaaagagatgttgtagcagtccgcggtgtggcccccaaatag

SEQ ID NO: 139738 - DNA, 921 bp, Homo sapiens
atgttttatcaaaaggtcggcgacaactcaatcgacagctggaaaaacgcgggccgtgtctttaaagacagcgataagttcgacgccaacgatccgatcctgaaagatcagacgcaagaatggtccggttctgcaacctttacatctgacggaaaaatccgtttattctacactgactattccggtaaacattacggcaaacaaagcctgacaacagcgcaggaggggaaaatggagactcagagagggagtgacttttcccccaggtcacacagcaaggaagactatgatgcgcaaaatgctgctggcggcacactttcagtgacggcaatgaccgctcacgccgactaccagtgcagcgtcacgccgcgtgacgatgtgattgtcagcccgcaaaccgtgcaggtgaagggcgaaaacggcaatctggtgatcacgccagacggcaacgtgatgtataacgttactgccggcaatatcggcgagcggctgatggcgaccggggcacgtcattacggcgatattcgtgctaccgcgcagaagtggctggaagaggtggagattcccgccaaccggatcgacgacctgccgaccaccttttccggcggtatgcagcagcgtttgcagattgcccgcaacctggtgacgcatccgaagctggtgtttatggatgaaccgaccggcgggctggatgtgtcggtgcaggcccgcctgctcgacctgctgcgcggcctggtggtggagctgaacctcgcggtggtgattgtcacccatgatttaggcgtcgcccgcctgctggcggaccgtttgctggtgatgaagcaggggcaagtggtggagagtgggttaaccgaccgcgtgctcgacgacccgcatcatccgtatacacagctgctggtgtcatcggttttgcagaattga

SEQ ID NO: 139739 - DNA, 693 bp, Homo sapiens
atggggcggcgcgctcgtggcgttgggtgtgttgtctcgcgcgtgtggtgtgggccggcgtgcgcgtgtagcctgcgccggtggctggcgcacactgtccactgggtcttcacagaagctcagagcatcaagagccacagctcagacatgtggccagatggcctagctcttagtcctggctgtgccatgggaccttcaggaagttgctcccggggaaaaaacgtagggggggcaacaaaaaattttaggggcgtccacaacatctactgccacaagccaatccccaccacacaacacgagtcgaaatacgcacgacaaactacaacagaagagtgtacacaaaccagttcccacgacttccggaccactttttccgccgtaatgcagcagcgtttgcagattgcccgcaacctggtgacgcatccgaagctggtgtttatggatgaaccgaccggcgggctggatgtgtcggtgcaggcccgcctgctcgacctgctgcgcggcctggtggtggagctgaacctcgcggtggtgattgtcacccatgatttaggcgtcgcccgcctgctggcggaccgtttgctggtgatgaagcaggggcaagtggtggagagtgggttaaccgaccgcgtgctcgacgacccgcatcatccgtatacacagctgctggtgtcatcggttttgcagaattga

SEQ ID NO: 139740 - DNA, 1571 bp, Homo sapiens
ttataagaacccgtacatcgcggcgaagatccagccgaagacgcacgatacgctcacaccaatcaaccccggcagaataaagctgtggttgatgacgaagcgaccgatgtgggtggtgccggaacggtcaaactgaatcgctgccagatcgctcggataagtcggcaggatgtaataaccgtagcaagccggtgctgaagccacgatgtatgccggatcaacgccgatcgccagcgcgaccggaacaatcgccgccagcgccgcagcctgagagtttacaaacttggaaaccagcagcagaacaatggcataggcccacggatactctttcaccatttcacccagtacgccctgaatttcagacatatgcgcaccgaacatggtttctgccatccatgcgataccgtacaccgccacgatggcgatcataccggaacggaagacttcgttttttgagatagacgcgggattggttttggtcaggataataatcagcgccccggtcagcagcataaacatctgaataaccagtaccatcgacagcggtttgccgccgaaggatggacgcaggtccgaatcagcaccaagaagggcgactacagcgattgccccgaggaaaatccacattgccagccagttgctggtcgttatcattattcgctcgttggtcgggtgtcgaatgcgacgctggcgcgtcttatccgaccaccgcgggttcagctccaccaccaggccgcgcagcaggtcgagcaggcgggcctgcaccgacacatccagcccgccggtcggttcatccataaacaccagcttcggatgcgtcaccaggttgcgggcaatctgcaaacgctgctgcataccgccggaaaaggtggtcggcaggtcgtcgatccggttggcgggaatctccacctcttccagccacttctgcgcggtggcacgaatatcgccgtaatgacgtgccccggtcgccatcagccgctcgccgatattgccgcctgccgacacctggcggcgcaggccgtcgagtggatgctgatgcaccacgccccattcggtacgcagcaggcgacggcggtcggcctcgctcattgcatacagcgaacggttctcgtagtgaatttccccctgactccctctcgaacgataatccgacacgctgaaatgagttaagttgtagtcgcgggcataaccagccatcactcccaaacgccaactgtcactatcggtaaaaccaccggttaacagatcgccccctaactgcgagacgtagcgatgcgaggtcgttctcaactgtccgttgctgtcacgccaggcattatgcccgccaatttgacgtagccaaagtcggcttgaacgctcctgttcagttacaggatcgatgtagcgcgtttcacccgcacggtcgttcagacgcataacaaaaagagtgttagcagctgccaggttagcgacgtaacttccagcttcggggcgcaggacgggggtaggcgtttctgttgattctgaatttccctctgagctgttatcctcctcattcactgactgataacttgtcaaataccagtttttgc

SEQ ID NO: 139741 - DNA, 2547 bp, Homo sapiens
atgggggacccaatggccaaaacccatggggtcaccaaggggaacaaccgcccgggtttaacagaccaatgggggccccccgtgctgggttcttctgtgccttatggcgtgcccggcttatatattataacccccaaatttaatcaggggcctttacccccggggccccgcaccaccccctttaggaacctcgtaaatgggcaaatttacccaggcagtaatatacaacgtttccaggagccgtatgggcggcgcttgtggcataaaccttacgcccactatattcccgtttcaccaccaaccacccaccacgacccagaattactagctctgtaccagaccccaaggattatcatcgtgtcagtgtacatacagtcaaaaccgtgtcttgccctgcgcggtgctggatataatgaaggttttcgctaccgtaatctattcgatcagtctttgacgtcacccaattacctgtcgattggcttggctgtggtgcggttaccagtattcctgagtaactcgcagtcagtaattgagttctatacagcccgaccgacaatcgaaactgtgccgcaatgggggccaaacttgcaattgcccacggaatttgcactgacgtaccgaggtggtactcggacggccaaggtgtcgtctaggttactagcggtcacggcccccccgcgaggcaatcgacaaaaaaagtcggaacgggtcaatcgtcaagacgagttgggcgaaaaagcccggaccaaggaactatcctatgaattccctagggcgcttttgcccccttctttgtatcccccaccaacgtgtggaattcacccactgggcttgtgtggactttcgggccggcaagcccaattttttcgccccggcaacaggccgccaaggttcgcgatccgcttgcgaccaggcttccgtcggccgccagtgctcttctcgtactgctgcatctgcgcatcaattctccagccgatcgccgccgtcgcgcacgtcgccaattccacggcatccagtacggtggtgatgccgctcgccaccatcagcgcgtctggctgctcatcgccgagtgggcaggccagtcaactttcgggcgcgggggaagaatttatccagattatcggtatgcagctcaatcagccccggcagcgccagccgccttcgccgtccatcgcctccggcaggcggctctggctttcgcaaaggcgcggatttcgccgttctgcacctccagcgaaccgcttaccactcgttttccagcaccagcttaacgttattgataatcatgaagaggctccattgggtgcaggcggtcggcgacgtcattacgtacagcttcgtcatggagatgcctacgatggctgcgccacgggttttggcttcgcgaatcagttcaccaccgcggcgctgtttttggcgtccagcgaggcggtgccacaggcgttcggcacgttcaggcgggtgagaagacgcgcggctttagcggcgcaggcttacgcggaacgccggtatcgagcagcggctgcatcaccacttccagtgctagatacgcgggatgacgcgcagaaactggctcacccagccgacggtggtttgcggatttccaccactttgcgcgctggcgcggtgaccagcaagatatcagcaggggccagcggatattgcagcgcctcttcaggtgagcaccagacagcgcctgatgttcatgtgcctgtaacgtcccgtggaagtcgggtacggccaggcatgaagatggataatccgccccgaaacttctcgctgatggctgcaacatattcacccacagttgcttcgatgcccagttcttcgcgcgcagaacgtctggatccgcacactgtacgatcgccatgttttgttacacgcggcacgctgggctggattgaaaccggtgatttcgaaaagtaccgccggatctgcgtttcttcgccgggggcgaccgcagtattctggctacaaatacaaatctatcgctccgaaatacgccaacggactggatattggcaagtcaccggcggctggcgcgatctcaccttgtctgacgttcgttatgagcgccaggcgtggcggtcaccgcgggcaatctgcctctggctgtcgggcttagtgcctgtggaacagccagtggaggaccccttgacctatttcttcagcgcaggaggattcccgaggatcaccagcaatcgtcaacgtaacggatctcgccgtgagatatcgcgccaagcaactgcgtctcagcatcatccgaagggtgtccgtctcgattaccgggttgtattcgcccggctgatagagcacgcagtgcgccatatgacaggtggcgttaataggcgatcagtatcgcgcacaaccattcgcaccagggcagacgcgctagcgaaacggccgtttgattatctcgactgcgcggggcccaacctgatccaggacaaaagaccccgttattggcctagcacaccgaatgatttccataagggcgaggttatagagccctacgcagcattacgacccattgtggtgagtcggtga

SEQ ID NO: 139742 - DNA, 1213 bp, Homo sapiens
atgttcggtcgggaaggtaacggctttaaccgcgtcaaagaagagttcgaccatgaacgtttcctggtagccctcaccaactacggtacggcgatgtgcgcctttgaagatgcggcgcgctacgccaatcagcgcgtgcagtttggcgaggctattggtcgtttccagttgattcaggaaaaattcgcccacatggcgatcaaattaaactccatgaaaaacatgctgtatgaagcagcgtggaaagcagacaacggcaccatcacctctggcgatgcagcgatgtgcaaatacttctgcgccaatgcggcatttgaagttgtggatagcgcaatgcaggtgctgggcggtgtcgggattgcgggcaaccaccgcatcagccgcttctggcgtgatctgcgtgtagaccgcgtctccgggggatctgacgaaatgcagatcctgacgctgggtcgtgcgtcgagaagaaaatacgagaacagacagcagctattaggagaccataaggagcatatctccacccaaagctcgtcctatccgcatgtgtgcagattgcccgcaactggtgacgcatcgaagctggtgtttatggatgaaccgaccggacgggctggatgtgtcggtgcaggcccgcctgctcgacctgctgcgcggcctggtggtggagctgaacctcgcggtggtgattgtcacccatgatttaggcgtcgcccgcctgctggcggaccgtttgctggtgatgaagcaggggcaagtggtggagactgctggtgtcatcggttttgcagaattgagccggtgccggatgcggcgtaaacgccttatccggcctacaaatgcgctccccgtaggtcggataagacgcgtcagcgtcgcatccgacacccgaaccacgaggcgaaaaatgattaacgtacaaaacgtcagtaaaaccttcatcctgcaccagcaaaacggcgtgcgcctgcccgtcctcaatcgcgcctcgctcaccgtcaacgcgggcgaatgcgtggtgctccacggccattccggcagcggcaaatcaagctctgctacgctcgctgtacgccaactatctgcccgacgaaggtcaaatccagatcaaacacggtgacgagtgggtagacctggtcaccgcgccagcgcgcaaagtggtggaaatccgcaaaaccaccgtcggctgggttgaccagttctgcgcgtcatccgc

SEQ ID NO: 139743 - DNA, 2139 bp, Homo sapiens
atgattccttacgacccttcggtctcgccggccatgtgggtagttttcgtccagccagatacagttcgggatagtcagcgactgaatgtggctgtgaccatcttcgtgctgcagaccttcgccgttcagggtggtacgaccggaagtaccgccgatcaggaagccacgcgcttgctggtcgccagccgcccagcacagatcgccaatacgctggaagccgaacatcgagtaatagatgtagaacgggatcatcggcagattgttggtgctgtaagaggtcgccgctgccagccaggaacaacctgcgcccagctcgttgatcccttcctgcagaatctgacctttctcgtcttctttatagtaagcaacctgctcgcggtcctgcggggtgtactgctgaccgttcgggctgtaaataccaatctgacggaacagaccttccataccgaaagtacgcgcttcgtcggcgatgatcggtaccagacgatctttgatcgacttgttcttcagcatcacgttcagagcacgaacgaaagcgatagtggtagagatctctttgctctgctcttccaacagcgcgccgaagtcttgcaggctcggcagctcaagcttctcggtgaagttcggctgacggcttggcagataaccgtgcagtttctgacgctgagcgtgcagatagaaccttccgggaaggtgatgtacggcagtttttcgatatctgcatcagacaccgggattttctcgttcttcttctcttcgttcctttctctttgttttctctttcgtctgtcttctctgtcttccttttttggcgcgagcagcgaggaagtcggaggtaagcaaggtgagaaggaagaagcgagaaagacaaaacttgtttctctcctcaccgttaattttgttctacgcctttcctcttcggtcttggacccctcctgttgtacactcctccgtcccaaaccgcgtgtatataccacgcgcttcgttacgcgagatgagtcgaccccgttccttggctaccgatggcgctggacatcacatccactgcgcctgcccgacagtttcgcaagcgcattatcgcatcgcttatgccgaccggggcacgtcattacggcgatattcggtgccaccgcgcagaagtggctggaagaggtggagattcccgccaaccggatcgacgacctgccgaccaccttttccggcggtatgcagcagcgtttgcagattgcccgcaacctggtgacgcatccgaagctggtgtttatggatgaaccgaccggcgggctggatgtgtcggtgcaggcccgcctgctcgacctgctgcgcggcctggtggtggagctgaacctcgcggtggtgattgtcacccatgatttaggcgtcgcccgcctgctggcggaccgtttgctggtgatgaagcaggggcaagtggtggagactgctggtgtcatcggttttgcagaattgagccggtgccggatgcggcgtaaacgccttatccggcctacaaatgcgctccccgtaggtcggataagacgcgtcagcgtcgcatccgacacccgaaccacgaggcgaaaaatgattaacgtacaaaacgtcagtaaaaccttcatcctgcaccagcaaaacggcgtgcgcctgcccgtcctcaatcgcgcctcgctcaccgtcaacgcgggcgaatgcgtggtgctccacggccattccggcagcggcaaatcaactctgctacgctcgctgtacgccaactatctgcccgacgaaggtcaaatccagatcaaacacggtgacgagtgggtagacctggtcaccgcgccagcgcgcaaagtggtggaaatccgcaaaaccaccgtcggctgggtgagccagtttctgcgcgtcatcccgcgtatctcagcactggaagtggtgatgcagccgctgctcgataccggcgttccgcgtgaagcctgcgccgctaagccgcgcgtcttctcacccgcctggaacgtgccggaacgcctgtggcacctggcaccatcgacattttccggtggcgaacagcagcgcgtcaacatcgcccgcggctttatcgtcgactaccccattctgctgcttgacgaaactaccgccttccttgacgccaaaacagcgccgcgc

SEQ ID NO: 139744 - DNA, 2342 bp, Homo sapiens
atggcagaggtagaggagaagaagcagcggatcttccgcaagttcacctaccgcggtgtggacctgggccagctgctggacatgtcctttgagcagctgaggcagctgtacggcgcgcgccagctgcggcggctgaaccacggcctgtggcggaatgctgaggctcaagccgcattcgctgctgaggcgcctatgctaggccaagaaggaggcgccgaccatagagaagcaggaagtggtgaagacgcacctgcgggatatgatcatccctcccaagatggtgggcagcagggtgggcgtctacaacggcaagaccttcaaccaggtggagatcaagctggagatgatcggccacgacctgggcgagttctccatcacctacaagcccagcgaggcaaaaaaccaatgaatcaaccgttactttcggtcaataacctgacccacctttacgcgccgggcaaaggctttagcgatgtctcttttgatttatggccgggggaagtgctgggcattgtcggggaatccggctccgggaagaccacgctgctgaagtcgatctccgcgcgcctgacgccgcagcagggggaaattcactacgagaaccgttcgctgtatgcaatgagcgaggccgaccgccgtcgcctgctgcgtaccgaatggggcgtggtgcatcagcatccactcgacggcctgcgccgccaggtgtcggcaggcggcaatatcggcgagcggctgatggcgaccggggcacgtcattacggcgatattcgtgccaccgcgcagaagtggctggaagaggtggagattcccgccaaccggatcgacgacctgccgaccaccttttccggcggtatgcagcagcgtttgcagattgcccgcaacctggtgacgcatccgaagctggtgtttatggatgaaccgaccggcgggctggatgtgtcggtgcaggcccgcctgctcgacctgctgcgcggcctggtggtggagctgaaactcgccgggtgtgattgtaacctcttccccagaccaggactggggctttaccccagagcctcgcctcgccgcccgcttcccaggatccactcactcgtcccggagccgccgcaaccgcggccgccgccatccccggccccggagcctgcccacacccagcgcaccccacagtcgggcgcccggagatggcgtcaagctcgtcccgcccccggcgcgcgtgacccgaaatgagcccgcaccttccgactcagtaactttgggggttccacacgagcccggggcgtgtattgggaccccaattctgacctttgtccgaccctcgacttcagctataaaatgccgctgctgaagaatccactggaacaatattatttggtgcagggcggttttaagcgcactgacctgaacgataccgaatctgactccactacgctggtggcttctcgctactgggatctctccagcggctggcagcgtgccattaacctgcgctggagtctcgaccactttactcagggtgaaattaccaataccacgatgctgttttatcctggggtgatgattagccgcacgcgttctcgtggtggcctgatgccaacctggggcgactcgcaacgctactctatcgactactccaacacggcctggggttcagatgtcgatttctccgttttccaggcgcagaacgtctggatccgcacactgtacgatcgccatcgttttgttacacgcggcacgctgggctggattgaaaccggtgatttcgacaaagtaccgccggatctgcgtttcttcgccgggggcgaccgcagtattcgtggctaccaataccaaatctatcggtccgaaattacccaacggtgacactgaaaggggcctcgaagttgataaccggatcgctggaataccagtacaacgtgaccggaaaatgtaccaagtggcagttcggcgaatggctggcgcccggcgaggtgcgcctggcccccggcgccacgctggccacgcccgagctggtggccagctgctcgaccgagggcctcaacggcctggccgccaatttccacgccgaactgcgcgcccgcctgccctggcacggcggcgcgatgaagccgcgcccggtgcacctgaacacctgggagggcttctatttcgatctccagcccgacaaggtcaaggcgctggccacggccgccgcggcgctcggcgtcgagcgcttcgtgctcgacgacggctggttcaatgcccgccaccacgaccgcgccggcctcggcgactggtggcccgatgcgacgaagttcccgcaggggctgggcgagctggtcgcgcatgtcaaccccttttatgcataa

SEQ ID NO: 139745 - DNA, 285 bp, Homo sapiens
catggagaagccggaagtggtgaagacgcacctgcgggacatgatcatcctacccgagatggtgggcagcatggtgggcgtctacaacggcaagaccttcaaccaggtggagatcaagcccgagatgatcggccactacctgggcgagttctccatcacctacaagcccgtaaatacatgaccggcccggcatcggggccacccactcctcccgcttcatccctctcaagtaatggctcagctaataaaggcgcacatgactccaaaaaaaaaaaaaaaaaaacc

SEQ ID NO: 139746 - DNA, 558 bp, Homo sapiens
atgctggcaggagtcgatggcgtcggcggtatcccgtttgataattaccccttcgcctacatggtaagtaacctggcactggcgattattttgctcgacggcgggatgcgcactcaggccagttcctttcgtgtggcgttaggaccggcactgtcgctggcgacgctgggcgtgcttatcacctctggtttaaccggcatgatggcggcgtggctgtttaatcttgatttgattgaaggcttattaatcggcgctatcgtcggctctaccgatgctgcagcggtcttttctctgctgggtggtaaggggcttaacgaacgtgttggctcgacgctggaaattgaatccggcagtaatgatccaatggcggtctttctgacgattaccctaattgcgatgatccagcatcatgagagcaatattagctggatgttcattgtcgatattctgcaacaatttggtctgggcattgtaataggtcttggcggcggttatttactactgcaaatgatcaaccgcatcgcctgcccgccggattatatccattgctggcattaa

SEQ ID NO: 139747 - DNA, 657 bp, Homo sapiens
cggcgctcagatacttttcgtctatttgtggatggcgcttcgcaaggtgcgaatcgaataaaagtaatgtaatgcgtggtgccattgcaaggcaacgatcgctgtgtttttccaaaccacggcgactcacttcacaaccaataccgcatcagggattttcgttttcataatggctcactcaagcatgctcacgatgatttcaagtacaaaccgtattgtgtaattatttctatagcagttcgctatataggcttgtatacatcgaataatttgaaaatcaaagagataggtagattttcactcgaaagtagtattacgtgtaagtgaggagtaattattgttcggtatcaaagggagacaaaaaaagcgcccgcaggcgctttttagattcagaaaaattgggtattagccaatatattccagtccgttcatatacggacgcagaacttctggtacttcaatacgaccatcagcctgctgatagttttccattactgcaaccagcgtacgaccaacagccagaccagacccgttcagggtatgaaccagacgggttttcttgtccgacttgctgcggcaacgtgcctgcatacaaagagcctggaaatcccaaacgttggagcaggaagagatccccggggccgagtctcgaaattt

SEQ ID NO: 139748 - DNA, 1318 bp, Homo sapiens
cgaaatccgcttcccgattgtagagcagaccccgctattcaatcgtgctattggtgaagtcaccgacgtggttgaaaaagagatgtacacctttgaggatcgcaatggcgacagcctgactctgcgccctgaagggacggcgggctgtgtacgcgccggcatcgagcatggtcttctgtacaatcaggaacagcgtctgtggtatatcgggccgatgttccgtcacgagcgtccgcagaaagggcgttatcgtcagttccatcagttgggctgcgaagttttcggtctgcaaggtccggatatcgacgctgaactgattatgctcactgcccgctggtggcgcgcgctgggtatttccgagcacgtaactcttgagctgaactctatcggttcgctggaagcacgcgccaattaccgcgatgcgctggtggcattccttgagcagcataaagaaaagctggacgaagactgcaaacgccgcatgtacactaacccgctgcgcgtgctggattcaaaaaatccgggagtgcaggcgcttttcaacgacgctccggcattaggtgactatctggacgaggaatctcgtgagcatttttgccggcctgtgcaaactgctggagagcgcggggatcgcttacaccgaaaaccagcgtctggtgcgtgggctggattactacaaccgtaccgtttttggcagtttgccgtcagcggcaaccggttcagtctggaaaccggaactatcaactttttgctgggcaacgaaacgaccatcttcgacgttaatccagtgcagataaccttcactgtcaccgaccaccaggttgccattatacagcaccggagaagtcagcaggcgatgcagcagatcgctttgtgtccacagcgtaacgccgccatcaatggtcaacgccatcacccggtcattttgatcgaccagatagatgcgattgccgtcgacgatgaaatcattcaccgaacccagttcgcgtttccacataatctgaccactgcgcagatcaagcgccgtcaggttaccattataggccagcgcgaaaacaacgccgttaacaacgacgggagtcgtgtcaacatcgctcagacggtcaatttcggtagaaccggtcgcctgggaaatacgctgctgccaaatcatctggccctgttccatcagcactgcgctgacgcgaccattatcgccccccacgacggccgcaccaaaagccgttgtcggcgcagactcgccacgcaaagagagcgaaggcatatcgaggttaactgtccatttgacagcgccgtcagctttgttcaacgcttgtaa

SEQ ID NO: 139749 - DNA, 1218 bp, Homo sapiens; identical to SEQ ID NO: 129913

SEQ ID NO: 139750 - DNA, 843 bp, Homo sapiens
atgctggtggataaaaaatacgttcctgagctttgtgatgatatcgcccctgaccttaacgaagtcggggtaatgttgcctgcgaacccgctccagcatttgctgttacaggaactgcaatgcccgctggtgatgacctccggcaacctgagcggtaaaccaccagctatcagcaacgaacaggcgctggcggatttgcagggcattgccgacggattcttgatacataaccgcgacatcgtgcagcggatggatgattcggtggtgcgcgaaagcggcgaaatgctgcgccgttcgcgggggtatgtgccggatgcgctggctttgcctccgggctttaaaaatgttccgcctgtgctgtgtctcggcgcggatctgaaaaataccttctgcctgcggcgtgtctggcaacatcagtggccgctggatggcggtgatgtcattgctttgacgctcgacggtatcggtatgggggagaacggcgctttgtggggcggcgagtgcctgcgggtgaactatcgcgaatgtgagcacctgggcggcttgcctgcagtggcgcttccggcaagtgtgcaacagcaaaactggagcgtgctggcgcgggccattgagcgtggaattaacgcgccgctggcgtcatcgtgtgggcgttttttcgatgcagtggcggcggcactgggctgtgcgccagccacgttaagttatgaaggtgaagcggcttgtgctctggaggcgctcgcagcctcatgccacggaagtgaacgccatcccgggttgaaccaattggccccgccgggcggttgggacaaatccaactgtatcaatcagctcggtaccgggtga

SEQ ID NO: 139751 - DNA, 1368 bp, Homo sapiens
atgccccaaaacagaggggggtttttggacaagaaaaacccaggtgcccccctggaaggcgcggtatatgtcaattgctttacacgcttcccgggtatcggttatgagggaagaaccgccgtcttttgtggggccgccaaggtccctccggggttaaactatcggggaattggggctttcccgggtggcaattttgcaagcaaaagaagccggggccgaaaccttgctggcgcaaggtgcctgcgcttttgtccgaaagtggcaaaaattactctgaaacagcaagtgtgcaacagcaaaactgaagcgtgctggcccgggccattgagcgtggaattaacgcgccgctggcggtcatcgtgtgggcgttttttcgatgcagtgccggcggcactgggctgtgcgccagccacgttaagttataaaggtgaagcggcttgtgctctggaggcgctcgcagcctcatgccacggagtgacgcatccggtgacaatgccgcgggtggacaatcaactggatctcgccactttctggcagcagtggctgaactggcaggcaccggttaatcaacgcgcgtgggcgtttcatgatgcgctggcgcagggttttgccgcgttgatgcgtgagcaggccacgatgcgtggtatcactacgctgcacccagaaggcctggagagaatgtctgccggccatgagtcatggttagaacgacgtaacggggagttaggggaaggaaaggggagcaaagcctacccaactggagaccacaagggtgcagacctttacgatgattctaactttctgatacagaacatttttgttgaggacacacgtggtttattaaggcaaggtcgtgaggatttgattgagcgttataaagacccgctgaatgagaacccgaaacgctgcgtcgagcagctggcgaactggcataaagagctggaggagtataaaaaagcctcccggattgatattaaaccgtcacgggaatatgccagcacaatcatgaacgctatctggactggcgagccgagtgtgatttacggcaacgtccgtaacgatggtttgattgataacctgccacaaggatgttgcgtggaagtagcctgtctggttgatgctaatggcattcagccgaccaaagtcggtacgctaccttcgcatctggccgccatgatgcaaaccaacatcaacgtacagacgctgctgaccgaagctattcttacggaaaatcgcgaccgtgtttaccacgccgcgatgatggacccgcatactgccgccgtgctgggcattgacgaaatatatgctcttgttgacgacctgattgccgcccacggcgactggctgccaggctggttgcaccgttaa

SEQ ID NO: 139752 - DNA, 1566 bp, Homo sapiens
atgcctgatgaagaaaaccgatttaatgccctgaaagcggtttttagccagttaatgacagatgcgacgctgacgccgctgttcaactatcactatcgcattagtgcccctcccggcgtgaacggattatctatgaaacgtgctgtcgttgtgttcagtggaggtcaggattccaccacctgtctggtgcaggcattacaacaatatgatgaagtccattgcgtgacgttcgattacggtcagcggcatcgcgcagaaatcgacgtggcacgcgaactggcgctgaaactgggggcacgcgcgcataaggtgctggatgtcaccctgctcaacgagctggcggtcagtagcctgacgcgtgacagcattccggtgcctgattatgaacctgaagccgatggtatcccgaatacgtttgtcccagggcgtaatattttgttcctgacgctggcggcaatatatgcgtatcaggtaaaagcagaagccgtaattactggcgtctgcgaaacggatttctccggctacccggattgccgcgatgagtttgtgaaagcactaaaccatgcccataaagaaaagctggacgaagactgcaaacgccgcatgtacactaacccgctgcgcgtgctggattcaaaaaatccggaagtgcaggcgcttctcaacgacgctccggcattaggtgactatctggacgaggaatctcgtgagcattttgccggtctgtgcaaactgctggagagcgcggggatcgcttacaccgtaaaccagcgtctggccgttaatccggaatttaaagccgatcctgttgtcgatatatacctggtggcttcaggtgctgatacacaatctgcggctatggcattagctgagcgtctgcgtgatgaattaccgggcgtgaaattgatgaccaaccacggcggcggcaactttaagaaacagtttgcccgtgctgataaatggggtgcccgcgttgctgtggtgctgggtgagtctgaagtggctaacggcacagcagtagtgaaggatttgcgctctggtgagcaaacggcagttgcgcaggatagcgtagccgcgcatttgcgcacgaaggagaaggacagcgtggaaatttacgagaacgaaaacgaccaggtagaagcggttaaacgcttttttgctgaaaatggcaaagcactggctgttggggtgattttgggcgttggcgcactgattggctggcgctactggaacagccatcaggttgattctgcacgctccgcttctcttgcctatcaaaatgcggttaccgcagtgagcgaaggcaaaccggatagcatcccggcggcggaaaaatttgctgctgaaaataaaaatacttatggtgcgctggcttctttggaacttgcgcagcaatttgttgacaaaaatgaactagagaaagctgccgcccagttacaacaggggctggcagacacgagcgatgaaaatctcaaagccgtgataaatctgcgtcttgctcgcgttcaggtacagctcaagcaggctgatgccgcgctgaaaacccttgataccatcaaacggtga

SEQ ID NO: 139753 - DNA, 3906 bp, Homo sapiens
atgaaaatttcccgcctcggagaagcgcctgattaccgcttctcgctggctaatgagcgtacttttctggcgtggatccgtactgcactaggatttctggcggcgggggttgggcttgatcaacttgcgccagatttcgccacgcccgtcattcgcgaactgctggcgttgttgttgtgtctgttttccggcgggttagcgatgtatggctacttgcgctggttacgcaatgaaaaagcgatgcgtctgaaagaggacctgccctacaccaacagcttattaatcattagcttaatattgatggtcgtggcggtgatcgttatgggactgcgggccatgctgatggcgatggagccgatatgggagagtgattttcatacgctctcatatggcttccggcctgagcgcagtgtccaccacgcgatccgcacggtgaaattacagctcacagactgtggtgaaacccggggacgctgggtgattgaaggcgacctgtccagttacttcgacaccgtacatcatcgactgctgatgaaggctgtacgccgcaggatcagtgacgcacgtttcatgactctgctgtggaaaaccatcaaggcgggacatatcgatgtcgaagataaacgggcggccagtgaaggtgtgccacagaacaaaattatatcgccgctattatcgaacatcatgctgaatgagttcgatcaatacctgcatgagcgatacctgagcgggaaagccagaaaagatcggtggtactggaataacagtatccaacgggccgaagtacggcggtcagagaatactggcagtggaaacccgcggtggcgtactgccgctatgccgatcaccgcccgtcgcccgacgctgcttcgtccgctgtggtgcgaaaatcgatggacgggaatggtcgagctggatcgctatctgaatgaacatggcgtacagggatcggcgctgggacgtccgtggctacctccaacggagtctggtgcgcttctcaatgttgtggcgctggccctcgtcgttcttgccattgtggtacaaatggcggtaaccatggtgctgcatggtcaggtcgaaagcattgatgttattcgttctatcttctttggtttgctgattacgccgtgggcggtctactttctatcggtggtcgtcgagcaactggaggagtcacgacaacgtctgtcacggctggtgcaaaaactggaggagatgcgcgagcgcgatttgagcctcaacgttcagttaaaagataatattgcccagctaaatcaggaaattgccgttcgtgaaaaagcggaagcagaactgcaggaaaccttcggccaactgaaaattgaaatcaaagagcgcgaagagacacaaattcataacccccatactagcctggcggatacttatccattacctccagagggtagccgtttagtggggcagtcgtttactgtaactgttcctgatcacaatacccagccgctggagacttttgccgcacaatacgggcaagggttaagtaacatgctggaagcgaacccgggcgctgatgtttttttgccgaagtctggctcgcaactcaccattccgcagcaactgattttgcccgacactgttcgtaaagggattgttgttaacgtcgctgagatgcgtctttattactacccaccagacagtaatactgtggaagtctttcctattggtatcggccaggctgggcgagaaaccccgcgtaactgggtgactaccgttgaacgtaaacaagaagctccaacctggacgccaacgccgaacactcggcgcgtatatgcgatacgaggggagagtttgcctgcatttgttcctgcgggccccgataatcccatggggctgtacgcgatttatattggcaggttgtatgccatccatggtaccaatgccaattttggtattgggctccggggcatcaccatttctcctgatgaaattgtcattactgccggggcgttagaggcattaaacctcagtttgcaagcggtaactgaaccgggcgattgggtgatagtagagaatccttgtttctacggtgcgttgcaggcgctggagcggctacggctgaaggcgttatcggtggcgacggatgttaaagaagggatagatcttcaggcgctggaactggcgttgcaggagtatccgattattcctgcgcagtcatttatcgccagtgatgcccggccttcgcaagctatccgcgccagtcgtgggagttcaatgcgcgtggccctggagctggtgaaagaagctcgagcgcaagcctgtgtcagtgccggtaataccggggcgctgatggggctggcaaaattattactcaagcccctggaggggattgagcgtccggcgctggtgacggtattaccacatcagccaaagggcaaaacgatggtccttgacttaggggccaacgtcgattgtgacagcacaatgctggtgcaatttgccattatgggctcagttctggctgaagagaaaataacaggagtgatgactatgagtcgtttagtcgtagtatctaaccggattgcaccaccagacgagcacgccgccagtgccggtggccttgccgttggcatactgggggcactgaaagccgcagacggactgtggtttggctggagtggtgaaacagggaatgaggatcagccgctaaaaaaggtgaaaaaaggtaacattacgtgggcctcttttaacctcagcgaacaggaccttgacgaatactacaaccaattctccaatgccgttctctggcccgcttttcattatcggctcgatctggtgcaatttcagcgtcctgcctgggacggctatctacgcgtaaatgcgttgctggcagataaattactgccgctgttgcaagacgatgacattatctggatccacgattatcacctgttgccatttgcgcatgaattacgcaaacggggagtgaataatcgcattggtttctttctgcatattcctttcccgacaccggaaatcttcaacgcgctgccgacatatgacaccttgcttgaacagctttgtgattatgatttgctgggtttccagacaagaaaacgatcgtctggcgttcctggatggacccggcggacccgagagatattgtgggctatgtgccgtgaagccacgccgcgtgaagtagaacaggcgctggaaagtgcggttaataacgcgccaatctggtttgccacgcctccggctgaacgcgcagcgattttgcaccgcgctgccgtgctgatggaaagccagatgcagcaactgattggtattctggtgcgtgaggccggaaaaaccttcagtaacgccattgccgaagtgcgcgaagcggtcgattttctccactactacgccggacaggtgcgggatgatttcgctaacgaaacccaccgtccattagggcctgtggtgtgtatcagtccgtggaacttcccgctggctattttcaccgggcagatcgccgccgcactggcggcaggtaacagcgtgctggcaaaaccggcagaacaaacgccgctgattgccgcgcaagggatcgccattttgctggaagcgggtgtaccgccaggcgtggtgcaattgctgccaggtcggggtgaaaccgtgggcgcgcaactgacgggtgatgatcgcgtgcgcggggtgatgtttaccggttcaaccgaagtcgctacgttactgcagcgcaatatcgccagccgcctggacgctcagggtcgccctattccgctcatcgctgaaaccggcggcatgaacgcgatgattgtcgattcttcagcactgaccgaacaggtcgtcgtggatgtactggcctcggcgttcgacagtgcgggtcagcgttgttcggcgcctgcgcgtgctgtgcctgcaagatga

SEQ ID NO: 139754 - DNA, 2297 bp, Homo sapiens
  misc_feature (1)...(2297): n = a,t,c or g
ttatctgttgattgtcggtgaacgctctcctgagtaggacaaatccgccgggagcggatttgaatcacggcaggtttcgacgtcatgataccccgcgaggataaatgcttgtcgcaccgcttcgccatgctgccagccatgttccagaagcagaaagccgccggataccagcgcgttacgcgactgttcgatgatatgcacgatgtctgccattccactgtctgccgcaaccagcgcagtgagcggctcaaagcggacatcgccttgttgaagatgagggtcctgctcgtcaatatacggcggattgctgacaatcatcgcaaactgctgcccggctagcgcgctaaaccagtcgctttgcagaatgtggatatttttgatcgccagatgctgggcattacgttgtgccagggagacagcatcaggcatacgatctacagcgataatttcgcagtccgggcgctcgctagccagcgcaagcgcaatcgccccggtacccgtcccgagatcgagaatacggcaaggttgttcaggcaaccgcgccagtgcctgctccaccagacactccgtatccgggcgcggaattaaggtcgctggcgaaacaaataacggcaacgaccagaattctcgcaccccggttaaatgagcaatgggttcaccatcgcgacgacgtgtcagtagcgcatcaagttgctgaaacacgtgggagagagaggggacggaggaggagggatagcggaggtacggaaagtggggatgcggttgtggcaaagagaggggggagtgggagcgaaggtagacaggtggcgtaaccaagtgagggtgatgtgaagtgtctgtgaccgacggttgggcgggggtgaggaccgggcgacgagtgggtggcataaatcgtcgtgttgtactgatcgtggctgcgtactgtcgccatgaccagcttactgttaaacgctgaagagggatcttctaacagccctttgctggtaatgaaattagccttacctgacggcgtcatccagcgcctttcagcagctgcatttatcaggtgaaaaccaccgggatgacggatgcgctggttatagtcggcgaactctggcagcacagcttcaatgtcattgcgaatgcgatcataatcttccaccagatactcccaggctaccacgctctggggtagtgctgcctgcgcgattcccgcgaccactgcacactctgatttcagcattacaccggcgggttttaacacgccacgcgaggcatgaatcatcgacattgaatcctcaacggttaccgcctgcgcaccgtttttttgcatgtcaatctcgctacgtcccaggaccggcagaatatagctatgccgtgcggtcaacagatgagagcggttaagcttagtggctacgtgtaccgccaaatctaattgcgttaacggtacagcgctcgcttcccgatctggcattgccagcgcaaaattgccccccatgcagatcaatgctcgagcctgccccgtacatattgcttggcatgctggcaacttggncagcatgtccaggtgcatgaggtggggtgaagccatagcgctcacccagacgagccagaaactctgcagacggtttctcggtgataccgacggttcggtcgccctgtacattagagtgtccacgtagtgggcagatacccgcaccaggcttgccaatgttacctttcatcaacagcagaataaccagttgctgtacgttctgggtaccatgttcgtgcagagtgatccccattccgtaacagataatggtgcgttcggcagcggcatatgcgtcagcaatgtggacccgacggggggcgaaagggaagaccgcttcacgcaggtctgccctaaggccttttatcagctcgatatcgcgttcttcgcactcagctaaaagtcggaatatttcccactgaatgtcccattcttgctctacagctgggttttctttaagctcttcatcgctcatttcgcgaccagcctgagtcatttccagcatcgcaacggtcgtgatggaggtcttactcacttccaccgcgtgttcgagcgtttcaccactcaaacgcgaatggaccagttcacttaacgccacgcaggcatcgattgccggataaacgccgtacagatcgaaatcgtcggctgaaggaatcgcttcttcaaatttctccagttggctgtcgaaatttacttttgcgtctttaacggtcagcgtttcccagatgagatcgagaatgcgacggtaaatttgcccatcaccaaaaccggtttgctggcagaacat

SEQ ID NO: 139755 - DNA, 769 bp, Homo sapiens
atggaggaaggtaaaggggaagagagacaccttcacaaggtggcaagaaggagaaatgcaagcaggggaaatgccagacacttacaaaagcatcggatctcctccatcatctgcaatatggaaataacaataatcacacccatggactgttgtgagtttcccagaaagtggttagatcaatgtaaatgcgcattacaaaggccgtatgcatttcagtgcattgttcctgatggtgagctgccagcagtatcaggagtgacttatctgtggagctgccctcctggaatgctgatgtcatggccacgaagcgatgatccccatcgtcaggccagcaacagcagctgccccgccggcaatagccccagccgtttcccagttatcctgagtcgtgcctttcatacaggtattggtgtgaaccagacgaccctgatcgtcataaaccggaacgcagggcgaatccgtcaccctccagagatcagcctgaatttacagccggtacaccaggtgacgctgccaggatacaccttccgtgtgggtgggggcgatctacaacccaaaggcaattacaccagcgaaaaagcgatagtggcactgtttgaccatcagcaacgcattggtgaactgacgccggagcggcgtttttatgaagcacgccgtcaacaaatgatggaaccgtcaattcgctggaacggcatccatgactgttatccggtcatgggggagaaaactggcccggatcgttacgcttttcgtttgtatgtacaaaccg

SEQ ID NO: 139756 - DNA, 3709 bp, Homo sapiens
atggtgcgttcggcagtggtcgcgggaatcgcgcaggcagcactaccccagagcgtggtagcctgggagtatctggtggaagattatgatcgcattcgcaatgacattgaagctgtgctgccagagttcgccgactataaccagcgcatccgtcatcccggtggttttcacctgataaatgcagctgctgaaaggcgctggatgacgccgtcaggtaaggctaatttcattaccagcaaagggctgttagaagatccctcttcagcgtttaacagtaagctggtcatggcgacagtacgcagccacgatcagtacaacacgacgatttatggtatggatgatcgctatcgaggggtattcggtcaacgagatgggtaccgagataactgcgaagagattgcccaactggctgaagactgtggcaatctcttcgcagttacggtgttccggtgcccagccggtgcgaatcttcagggtaacaggaacgtccactgcattgacgacctcggtaaggatcgatttaacgacatccggaacgttcaggcggctgaactgctggcggagatggcgatttccagcgcccagcgccgtatgcgtgcggccaaaaaagtggtgcgtaaaaagctgaccagcggcccggcgttgcctggcaaactggctgattgtaccgcgcaggaccttaaccgtaccgagctgttcttgtggaagggggaacagaatgcgctgcttcgaggctttcccgccgttcgacttcacagcctgctgatagttttccattactgcaaccagcgtacgaccaacagccagaccagaaccgttcaggcggcttccagctatgcggcgctaccggagacggtacgtatcggaaccgatacgacctacgcaccgggtaccgaaactacttttgcttataagaggatggccacagacaggtattggtgtgaaccagacgaccctgatcgtcataaaccggaacgcagggcgaatcgtgagcacagcccgccagcaatgcgagcgcgcgagcaccgtcatgagtttatgaccgtcgagcacttgttactggcgctgctcagtaacccatctgcccgggaggttgtcgatattctgcaacaatttggtctgggcattgtaataggtcttggcggcggttatttactactgcaaatgatcaaccgcatcgccctgcccgccggattatatccattgctggcattaagtggcgaccgaaaacttcgcagcccaactgatggaactgacgataacgccctttctgcggacgctcgtgacggaacatcggcccgctggtggcgcgcgctgggtatttccgagcacgtaactcttgagctgaactctatcggttcgctggaagcacgcgccaattaccgcgatgcgctggtggcattccttgagcagcataaagaaaagctggacgaagactgcaaacgccgcatgtacactaacccgctgcgcgtgctggattcaaaaaatccggaagtgcaggcgcttctcaacgacgctccggcattaggtgactatctggacgaggaatctcgtgagcattttgccggtctgtgcaaactgctggagagcgcggggatcgcttacaccgtaaaccagcgtctgcggatggatgattcggtggtgcgcgaaagcggcgaaatgctgcgccgttcgcgggggtatgtgccggatgcgctggctttgcctccgggctttaaaaatgttccgcctgtgctgtgtctcggcgcggatctgaaaaataccttctgcctggtgcgcggtgaacaagcggtgttgagtcagcatctgggcgatttaagtgacgatggcatccagatgcagtggcgcgaagcgttacgcctgatgcaaaacatctacgattttaccccgcaatacgttgtgcatgacgcgcatccgggctatgtctccagccagtgggcgcgtgaaatgaatctgccgacgcaaacggtactgcatcatcatgcccatgcagcggcgtgtctggcagagcatcagtggccgctggatggcggtgatgtcattgctttgacgctcgacggtatcggtatgggggagaacggcgctttgtggggcggcgagtgcctgcgggtgaactatcgcgaatgtgagcacctgggcggcttgcctgcagtggcgcttccgggtggcgatttggcagcgaagcagccgtggcgaaacctgctggcgcagtgcctgcgctttgtgccggagtggcagaattactctgaaacagcaagtgtgcaacagcaaaactggagcgtgctggcgcgggccattgagcgtggaattaacgcgccgctggcgtcatcgtgtgggcgttttttcgatgcagtggcggcggcactgggctgtgcgccagccacgttaagttatgaaggtgaagcggcttgtgctctggaggcgctcgcagcctcatgccacggagtgacgcatccggtgacaatgccgcgggtggacaatcaactggatctcgccactttctggcagcagtggctgaactggcaggcaccggttaatcaacgcgcgtgggcgtttcatgatgcgctggcgcagggttttgccgcgttgatggcgtgagcaggccacgatgcgtggtatcactacgctggtatttagcggcggggttattcataaccgtttgctgcgtgcacgtctggcgcattatctcgctgatttcacattgctctttccacagagtttaccggcgggtgatggcggtttgtctctggggcagggggttattgctgcggcgcgttggttagcgggtgaagtccagaaccggaataaaaccgtgttgcatttggaatttgtgtcacataagcggcctgacatcgttaggaatgagaggtctgtccccgtgtctatgtacgtgggtctatgcgtgaccgtcatggcgtcactacgtgtagtgggtgtgtcagacgctagaggtgccaaccaactgattttgcccgacactgttcgtaaagggattgttgttaacgtcgctgagatgcgtctttattactacccaccagacagtaatactgtggaagtctttcctattggtatcggccaggctgggcgagaaaccccgcgtaactgggtgactaccgttgaacgtaaacaagaagctccaacctggacgccaacgccgaacactcggcgcgaatatgcgaaacgaggggagagtttgcccgcatttgttcctgcgggccccgataatcccatggggctgtacgcgatttatattggcaggttgtatgccatccatggtaccaatgccaattttggtattgggctccgggtaagtcagggctgtattcgtctgcgcaatgacgatatcaaatatctgtttgataatgttcctgttgggacgcgtgtgcaaattatcgaccagccagtaaaatacaccactgaaccagatggctcgaactggctggaagttcatgagccattgtcgcgcaatcgtgcagaatatgagtctgaccgaaaagtgccattgccggtaaccccatctttgcgggcgtttatcaacgggcaagaagttgatgtaaatcgcgcaaatgctgcgttgcaacgtcgatcgggaatgcctgtgcaaattagttctggttcaagacagatgttttatcttgtggaaagccttgctttgaatgtccctgggcctatgaccccctttattcaaacgcaaggaaataactgctga

SEQ ID NO: 139757 - DNA, 369 bp, Homo sapiens; identical to SEQ ID NO: 125605

SEQ ID NO: 139758 - DNA, 447 bp, Homo sapiens; identical to SEQ ID NO: 114113

SEQ ID NO: 139759 - DNA, 2130 bp, Homo sapiens
atggtgttggaagttctggccagggcaattaggcaggagaaggaaataaaaggtattcaattaggaaaagaggaagtcaaattgtccctgtttgcagatgacatgattgtatatctagaaaaccccatcgtttcagcccaaaatctccttacactgataagcaacttcagcaaagtctcaggatacaaaatcagtgtacaaaaatcacaagcattcttatacaccaacaacagacaaacagagagccaagtcatgagtgaactcccattcacaattgcttcaaagggaataaaatacctaggaatccaacttacaagggatgtgaaggacctcttcaaggagaactacaaaccactgctcaaggaaataaaagaggatacaaacaaatggaagaacattccatgctcatgggtaggaagaatcaatatcgtgaaaatggccatactgcctaaggtaatttacagattcaatgccatccccatcaagctaccaatgactttcttcacagaattggaaaaaactactttaaagttcatatggaaccaaaaaagagcccgcatcgccaagtcaatcttaagccaaaagaacaaagctggaggcatcacactacctgacttcaaactatactacaaggctacagtaaccaaaacagcatggtactggtaccaaaacagagatatagatcaatggaacagaacagagccctcagaaataacgcagcatatgtacaactatctgatctttgacaaacctgagaaaaacaagcaatggggaaaggattccctatttaataaatggtgctgggaaaactggctagccatatgtagaaagctgaaactggatcccttccttacaccttatacaaaaatcaattcaagatggactaaagacttaaacgttagacctaaaaccataaaaaccctagaagaaaacctaggcattgccattcaggacataggcatgggcaaggacttcatgtctaaaacaccaaaagcaatggcaacaaaagacaaaattgacaaatgggatctaattaaactaaagagcttctgcacagcaaaagagcttctgcacagcaaaagaaactaccatcagagtgaacaggcaacttacaaaatgggagaaatattaaaccttcttaatttatctggcaattcagagatttctttttcaactgcaaccattgctgaggatctgggatttttgccctggtgtaccagaagaatcggatcacacctgggcttggagaatgagtgccaggttttactgagtggaagtagctctcagcagatgaaggagccagaagggagatggagtgggaaggtttcccctggagtcgggcctctcagcagctggactcttctccaactgccctggccaaactccgcattgttctgccggtggatggcctgcctgagtgctgggtcttcgggtttttatacgcacaggatcggggtatggtgggccaggggtgtcttggaaaatgcaacgtttgggcacaaaggcaagagtgcctgtcctcacctaagtccgtgggcctatgcccgagggacacaatatccttttttcaagcctgttctttggaagacgagttctcattatagttgcatggtaacaccaatccctggtaacaccagagtaaatggtcagtgccataaggctatgtctgggcagtttaactgcagtctcatgctgtaccaaacatcacgcactttgaccatcaatcaggtcctgcaactgattacctcaggcaatgaggggcttagtacacgggccagcggctgcggagggtgtactgggtcccccagcagtgccagcccacctgcgctgcgctggatttctcaccaagccttagctgccttcccgcggggcagggctcaggacctacagccagccatgcctgagcctcccacccactccatgggctcctgtgcagcccgagcctccccaatgagcgcctccccctgctccacggcgcccagtcccatcgaccacccaagggctgaggagtgcaggcgcatggtgcgggactggcaggcagctccacctgcagcccctgtgcgggatccactgggtgaagccagctgggctcctgagtctggtggggacgtggagaacctttatgtctaa

SEQ ID NO: 139760 - DNA, 2234 bp, Homo sapiens; identical to SEQ ID NO: 128149

SEQ ID NO: 139761 - DNA, 537 bp, Homo sapiens; identical to SEQ ID NO: 117272

SEQ ID NO: 139762 - DNA, 455 bp, Homo sapiens
cattgtgggtccgtaattggtgggttcttggtctcactaactttaagaaccaagctgcgaaccctcgcggtgagtgttacagctcttacagtggtgtgtctggagtttattccttctgatgttcggatgcgttcagtttcttccttctggtgggttcgtagtctcgctggctcaagagtgaagctgcagaccttcgcagtgactgttacagctcttaaggcggcgagtctggagttgttcgttcctcccggtggtctcgtggtctcgctggcttcaggcgtgaagctgcagacggcggctgcaggtaaagctgcctgccagtcctgcgccatgcgcccgcactcctcagcccttgggtggtcgatgggactgggcaccgtggagcagggggcggcgctcatcggggaggctcgggacgcccaggagcccatggagggggtgggaggctcaggcat

SEQ ID NO: 139763 - DNA, 564 bp, Homo sapiens
tcagcttgcagggaggtgtggagggagaggcatgagcgggaaccggggctgcgtggggcgcttgcgggccagctggagttccgggtgggtgtgggcttggtgcgccctgcactcggaggagccggccagcccggcgctgcgctcgatttctcgccgggccttagctgccttcccgcggggcagggctcgggacctgcagcccgccatgcctgagcctcccaccccctccatgggctcctgtgcagcccgagcctccccgacgagcgccgcctcctgtccacggcgcccagtcccatcgaccacccaagggctgaggaatgcgtcgcacggcgcgggactggcaggcatgatgaactgatagttgcattgccattcatgatgatcccctggcattcgtccattcagccattcaccattcacccattcaactggaattttggttgaatgccggaattgtgtccacaaattgtggatggatagttggttggctggctggatggctggctggatggctggctggatggatggtgaatggctggcggcggttcggttgctttgaagcat

SEQ ID NO: 139764 - DNA, 522 bp, Homo sapiens
atgcctttctgtagtactttccacaggcactgccgctgtaagcaggaggattcccaggtcaccatcatcttggctgctaaagatgggccccgcactcggagcagccggccagccctgctggccccgggcaatgagggacttagcacccgggccagcggctgcggagggtgtactgggtcccccagcagtgccagcccatcggcgctgagctcgatttctcaccgagccttagctgccttcccgcggggcagggctcgggacctgcagcccgccatgcctgagtctcccaccccctccatgggctcctgtgcagcccgagcctccccaacgagcaccaccccctgctccatggtgctcagtcccatcgatcacccaagggctgaggaatgcgagtgcacggcacaggactggcaggcagctctacctgcagccccagtgtgggatccactagaaatgtcaggtctttttgatagagctgaaaaacgctacatccgctcctttgctagaaaagattcaatgtaa

SEQ ID NO: 139765 - DNA, 861 bp, Homo sapiens; identical to SEQ ID NO: 126008

SEQ ID NO: 139766 - DNA, 1349 bp, Homo sapiens
ctagatatctccacctagtccaaaactctttatgcggctgttggaaggtttcaatcccatactgttgttggtctgaggttgctttctctcatcatttgattgtctccatagcagctggcttcccctagaatgagtgcggcctgagaataattctccatagccctcagcttcaccatctgggctctgggtttgttgttctttttctttaagaatgaagccgcggaccatcgcagtgagtgttacagttcttaaaggccgcgtgtgcggagtttgctccttctgatgttcggatgtgttcgttgtttcttccttctggtgggttcgtggtcttgctggctcaggagtgaagctgcagacatcctgctgattggtccattttacagagagccgagtggtctgttttgacagggtgctgattggtgcgtttacaatccctgagctagacacaaaggttctccaagtccccaccagattagctagatagagtgtggacacaaaggttctccacgtccccaccagagtagctagatacagagtgtcgattggtgcattcgcaaactctgagctagacacggtgctgattggtgtgtttacaaaccttgagctagatacagagtgccgattggtgtatttacaatccctgagcagagtagctagatacagagtgtcgattggtgcattcacaaaccttgagaaaccttgagctaaacacagggtgctgattggtatatttacaatccctgagctagacgtaaagattgtccacgtccccaccagactcaggagcacaactggcttcacccagtggatcccgcaccagggatgcaggtggagctgcctgccagtcccggtgccctgcgcctgcactcctcagcccttgggttgtttgttccttcccggtcgatgggactgggcgccgtggagcagggggtggcgctcgttcggggaggctcgggctgcacagaagcccatggagggggtgggaggctcaggcatggcgggctgcaggtcccggagccctgtcctgcgggaaggcagctaaggcccggcgagaaatcgagctcagcgccggagggctggcactgctgggggacccattacaccctccgcagccgctggcccaggtgctaagcccctcattgcccggcgccggcagggctggccggctgctccgagtgcagggccggccaagcccacgcccacccgtatctccagctggcccgcaagcgcagcccgcagccgcggttcccgctcgcgcctctccctccacaactctcttcaagctgagggagtgggctccggccttggccagcccagaaaggggctcccacagtgcaacggtgggctga

SEQ ID NO: 139767 - DNA, 394 bp, Homo sapiens
gcgcagtgcctgcccctgtaaaatacgcggcgatggacggagatgacgtttgatcaagtagtccgcatctttagcatcggcaacctgcaaacggttttgcaaaatcgccagcccggcggcgctatcgcccggtgtaccggtcacatagatccagtcacccggtttcgccccagagcgcgttaaggctcgtcccatcggaacaaagccgtggatacccaacgtcattgataatggcccacgcgtggtattaccgccaatgagtcgcatatcgtaataattgagaagatcaaacaaactgtcgctgaaggactcaagccacgcttcgtctacgtccggtaagggtaatgccaacgtcagccaagcccggatcggcccccatcgctggcagaatcgt

SEQ ID NO: 139768 - DNA, 1107 bp, Homo sapiens
ctaccagatcctgagcgcaaacgaggtcaccagcatggtggtggcattactgctctgtaccagtgcgtaacgccgatccccgcgcaaaaggcgagcggctttttttcgacgctccgggcgggcataatcttcaacctgatcgcgctgaatttgtgctacaggtagtacttgctgtccgggtggctgaagtacaaccccggaaccggatgcccgggcccacatggcgaaagattctgtgagtttcatgccagtgtgttttccacttccagcagctcccagatggtggctttttccgtatgttccgggcagccggatagcccggtgccggacggatgcccacttcatcttccagaatgcgcggatacttccggccagcgaccaggtcataaagaacggtgtccagtcgatgtaattacgagcgtttcgatgctggcttcgacttccgccccgctcgatcccggccttcttcgtccaggtgatggtctggttcccgggaggcgcctcatcgtgggcgctgcttcttcgtacgagggctctgacttggccgcccggagaaagtggtgctggtgtttctgcagcacaggctcggcatcttcggctcctgaggtggcggggccggtaccctttgggaccgcagcttccatcttcgggtatagatgctgccaggagagtctccatctgctcccaaggccacgtttcccaactccctgcagctaggtcgccttccctcctagcattgtggatgggcctaccagggccaggactgggctcgctcctcatcaaactccagacacccataccatccagtctttggagatcaatccagcctttccagataacacgactccattcagaatcatgggagccttcaaatatacccaggcgggaggtggtagcatctctgattcctttccagggctccgggggttctggagggcaaacctgaggatacctagaggaggtctggagaaggggactcctaaaagacttggatgggtgtcttccccacatgcatctgttttccttgcagggttcatatttggtgaccacttgaggcctcttggtgtgcaaggcacctggatttgccctgaatccgggtccactcat

SEQ ID NO: 139769 - DNA, 465 bp, Homo sapiens
atgctcattttggctgacaaaccagctcgtatctcctcgcgctcagacagtgtcaggagacgtgacgcaccagcagacaatcgccatcacacgaatacaggaaccacatccgggccaggtggacacccatttcgcatcatcaagcgacagttcggcttcgtgaaagccagatacaaggggttgctgaaaaacgataaccaactggcgatgttattcacgctggccaacctgtttcgggcggaccaaatgatacgtattaaagatcggggactaattgagcagattgacgagaagatcaacttcaacggtggcgcgatcgcgctgggtcatccgctgggttgttccggtgcgcgtatcagcaccacgctgctgaatctgatggaacgcaaagacgttcagtttggtctggcgacgatgtgtatcggtctgggtcagggtattgcgacggtgtttgagcgggtttaa

SEQ ID NO: 139770 - DNA, 2580 bp, Homo sapiens
atgttcgccattatcagctactccagccttgctgctgtactgctgaccgcgactctgaccgccgcaggcattatctccttccccgtggcgctctgtctggtgattggtgctaacctcggttccggtctgctggcaatgctcaacaacagtgccgccaatgccgcagcccgccgtgtcgcgctgggtagtctgctgtttaagctggtgggtagcctgattatcctgccgtttgtccatttgctggcagagacaatggggaagttgtcattgccaaaagcggaactggtgatctatttccacgtcttctacaaccttgtacgttgcctggtcatgctgccatttgttgacccgatggcacggttttgcaaaacgattattcgcgatgaaccggaactggatacccagctacggcctaaacatctggatgtcagcgcgctggatacgcccacgcttgctctggcgaacgccgcgcgcgaaacctgcgcattggcgacgccatggacagatgatggaagaaaatatgcttattcagcagcttctggtgggcgacgaagtgctacgaaagtaatggtagttgtaactgacggtgaatcacatgatggttcaatgttgaaagctgtgattgatcaatgcaaccatgacaatatactgaggtttggcatagcagttcttgggtacttaaacagaaacgcccttgatactaaaaatttaataaaagaaataaaagcaatcgctagtattccaacagaaagatactttttcaatgtgtctgatgaagcagctctactagaaaaggctgggacattaggagaacaaattttcagcattgaagatatggacctcggcgatgaggtctacaccgtcgggcgtccacatccgatgatcgacccaaccttacgcaaccagttaattgccgatctcggcgctaaaccgcaagtgcgcgtgttgctgcttgatgtcgtgattggcttcggtgcgaccgccgatcctgccgcctcgctggtgagcgcctggcaaaaagcctgtgccgcgcgtttagataatcaaccactgtatgccattgccacggtgacaggcactgaacgtgacccgcaatgccgctcgcagcaaatcgccacgctggaagatgcggggattgcggtcgtgagttcgctaccggaagccaccttgctggcggcagcgttaattcatccgctctcgcctgccgcacagcaacacacaccgtcattactggaaaacgtcgccgtgattaacatcggattacgcagctttgcgctggagctacaaagcgccagcaaaccggttgtgcattaccaatggtcgccagtcgccgggcagggaaaatggctggcgaatcctgagctgctggaagccgatgcagatgcggaatacgcggcagtgatcgacatcgatctggcggatattaaagagccaatcctgtgtgctccgaacgacccggatgacgcgcgtccgctgtctgcggtacagggtgagaagatcgacgaagtgtttatcggttcctgcatgaccaacatcggtcacttccgtgctgcgggtaaactgctggatgcgcataaaggtcagttgccgacccgcctgtgggtggcaccgccaacccgtatggacgccgcacagttgaccgaagaaggctactacagcgtcttcggtaagagtggtgcgcgcgtatcgagtatcccctgtgctgttccctgtgtatgggcgcgtgtggcggacggtgcaacggtggtttccacctctacccgtaacttcccgaaccgtctgggtactggcgcgaatgtcttcctggcttctgcggaactggcggctgttgcggcgctgattggcaaactgccgacgccggaagagtaccagacctacgtggcgcaggtagataaaacagccgttgatacttaccgttatctgaacttcaaccagctttctcagtacaccgagaaagccgatgggcttttgaagccccgtttccgcccgtggcagcggaaaattctcgacacattagcgacttatcatgagcaacatcgcgatgaacctggccctgggcgcgaacgtctgcgacgtatggcgttgccaatggaagatgaagcgctggtactgttgctgattgaaaagatgcgcgaaagcggcgacatccacagccatcacggctggctgcatctgccagatcacaaagcgggcttcagcgaagagcagcaggccatctggcaaaaagcagagccactgtttggtgacgaaccgtggtgggtgcgtgacctggcaaaagagacgggaaccgacgagcaggcaatgcgcctgactctacgccaggcggcgcagcaaggaataattaccgcgatcgttaaagatcgttattaccgtaacgatcggattgtcgagtttgccaatatgatccgcgatctcgatcaggagtgtggttcaacctgcgcggcggatttccgcgatcgcttaggcgtaggccgaaagctggcaattcagattctggaatattttgaccgcattggctttacgcgtcgtcgtggaaatgatcatttattgcgcgacgcattattatttccggaaaaataa

SEQ ID NO: 139771 - DNA, 1227 bp, Homo sapiens
atgggcgtacttaataactggttgagcgaagaagaaagtctatggatccagtcgcgcattcatctacgggctctacgttattatagtaactggcggcaatactttgccggttatacctttggtcggcaatattggcagtctcccgaagatgatcatctgcctttattacgcgaattcttagcgcgatatgagcgacctatgaaaaattgctggaagatcctcgatatagaggaaacgactgacgtcgatattatccgccgcgcttatctggcgctgttaccgtcctttcatccagaaaccgatccgcaggattttaaacaacttcgtcaggcgtatgaggaggcgctacggattgcgcagtcgcctgctaaatctgtttggcaaccagaagaatatgaggtagcagaacatgaaattctgctcgcctttcgtgcgttacttgcctctgatagtgaacgttttctgccctccgcctggcagcgattcattcagcaattaaattattgctcgatggaggagattgatgaattacgctggtcgctgtgcacaatcgccatgaacactgcccatttatccttcgagtgcgtggtgttattagcagaaagattgcggtggttacaggaggaaaataccggggaaatagacgaagaagaactgggatcctttttatatgccattgcgaaggggaatgtttttaacttccagaccattctgcatctgcccgttgcccgccgtcccgacatctgcacccagcacaatgaccagagccggtgcgagggctaccagatcctgagcgacaaacgaggtcaccagcatggtggtggcattactgctctgtaccagtgcggtaacgccgatccccgcgcaaaaggcgagcggctttttttcgacgctccggctaaggacagtacgcaaacgcgcgccgaagacgcgcattacgccggttcgaacaatatgagtcccccagaccagcagggcgacggcagaaagcagatttgggaatcagtccgcgtccataccccagttcggtgccagcagcggtcacttccggtaacgtcataccttaacggcggggaaatcttcaacctgatcgggctgatttgtcgaacacggagaattgcggcccggtgggtgaagtcccaccggaaccgtgcccggagtttcgaatgcctcaagcgccatcgcttcgtggttgcctttaaccgacgtaaaccagggttggtttag

SEQ ID NO: 139772 - DNA, 2058 bp, Homo sapiens
ctataccacgacctcaaaggccgacagcaggctcagaagacgctccagtgtggccagagtgcgttcaccgaagacgtgcgccacaaccgtcctccgtatcctgtcatacgcgtaaaacagccagcgctgacgtgatttagcaccgacgtagccccattgttgcagcgactcttcgccggtgacatacagcgtattcatctgctgggccagtttgcacagcgtttgcagtagcagcgtggatttccccgcaccagggttaccgccaatcagaatggcacttcctggcaccacgccgccgcctagtacgcggtcgaactctttaaatccggtggaaaaacgcggcagctcttcaaggctgatatcggagagtttctggacttttgccaccccggcgctaccggcatagccgctgagacgctcgttacgcgccaccattggcgacgcagcaagacgcacctcggtgatggtgttccaggcatgacaggcactgcactgcccccccatcaggtcagcgtgacggatggtgacttccgccttttcattcacttttggcttggcatggtaggcaatccccagccctgccgctttgatcatcggcaggtcattggctccatcgccaatcgccacggtctgcgccagcgggatttcatactcctgcgcgaggcgagtcagagttttcgctttgtactgcgcgtctacgatgtcgccgatcacattgccggtaaatttaccgtccatgatctccagttcattggctaccacggcggtcaggcgcagcttgtcgcgcataaaccgtgcaccagcggggggatccccagggtggacaaacctttttgcctgtttccggaaatgttgaaccatcgctaagccgttgtcgcattctggcagtgtcgactggtaggtccctggtatctggacctgaaagagcgcatcgaacagggcgtctatctggtgggtgataaactgcctgcagaacgctttattgccgatgaaaagaacgtcagccgtacggtagttcgtgaagccatcatcatgcagccgcgccatcagcaggcggctgacaataatatggaattcgccaattacggtccgtttgagttgcttcaggctcgccagctcatcgaaagtaatattgccgaattcgcggcaactcaggtaacgaaacaggacatcatgaaactgatggccattcaggaacaggcgcgcggcgaacaatgcttccgtgattccgagtgggatttgcagttccacattcaggtcgctctggcgacgcagaactccgccctggcggctatcgtggaaaaaatgtggacccagcgtagtcataacccgtactggaaaaaactgcacgaacacattgattcccgtaccgtcgataactggtgtgatgaccacgatcaaatcctcaaggcgctgattcgcaaagatcctcatgctgctaagctggcaatgtggcagcatcataccgtttactggatcaaacgccggacgcagcgtggcgagggcttccacggtggtttccgggcgaatcacttcgtcgtaattaaactgcttcaggacgccgtcggcatcgtgaccaccggtcgggatgatttcatttttaaatgcggccgactgcgtggcggcccaggcgcgggcgtgtgaccgcgcggcaaaggcatcctgcatttcacggctgataccgtgcatacgcgccagcatttctgccgttaagcccatcatgcccgccgctttggcgacattgcggctcaggccggggtgaaaatcgacgccgtgactcatcggcacatggcccatatgctccacgccgccaaccagacatgcctgcgcatcgccagtcatgatcattcgtgctgcgtcatgcagtgcctgcatggatgaaccacacaagcgattaacggtaaccgccgggacagagtgtggtacttctgccagcagcgccgcgttacgggcgatattaaaaccctgctccagcgtctgctcctccttcttcctcctccttcttcttcctcctcctcctccttcttcttcctcctcctccttcttcttcctgttcat

SEQ ID NO: 139773 - DNA, 3552 bp, Homo sapiens
atggcagacgtagacagagccaacgcactcgcgggcgtaatattcacagagacagttacaacagcagtacaacacacacatgaggcgacggaggctcacactcccacgcggggcgcaatcacaaccgccacagcaacacgcaaccacatctcaacgagcgcagcgccacataacaccaccgcccgcagacgagacccaggcaagacacgacagagtaggacagacgagcagcagcagagggcacacagaacgcaacaaccagtgggaccacacgtggacacacgaccgaggaccgcacacgcagaggccgccgaacatagatcccgggatagatacacccgacgctcacacggacggctccagggcgcacgcacaccgatagacacgacagacggctatccacgcgaagctcgcatccggaaaagtgcgaccacaagagcaccccaacaccgagatgtagacaccacacaaaccaccgaccagacggagaaccgtacagaagacacggcaatcccacgacagcgcacagaaaagcaccacaggggagcatacgacaacccgcatcgcacgacaagaagaccacgtgagttcgagaaacaagcagacaagcccaccagcgaggaaaacagaaagcgcggcaacagagaacccacaactggcagacaccgacatggacgcagcgacagcaaggagaaaacgaacacgacagaacaccacaccacaaggaacatacacagacaacaagaacaaacaacagaggctagacttaaggaccgccgaattaatggcgtgtcgatgcctaacttctggtggcgtaaatcctccgaagaggagcttacaacggtgtatacgccaaaatggttcggtataccaacaaccaccatacgacatgcgatgatggcatatacacttttagacttaccaatcagatttgtcacacccatatacttaacggataagatcctagcaaaaccccgcattcctttcgttcaccctctcccccacatggatacccgggcgaatgccgcccgtacgggctcggagccccatgtggcttggaccccaatttacagaataccaaacatagtccagcaaacagggctatccaagatagaatccggacagacttctacagttgaacttgatactggaaaccagcaaataacaacaaatgggagatacaagaaagaagcggtctaccttacagttgcacctataatttctccccttaaacgctacgagcaacatactgaattaagccgacacataaacgtagtgaatctgggggaccgtaaccgtagacagcaactgattctcgaccaaggcaaatcgtcccagaggaatatatacctgtcccacgttgcgcaaaaaataccgggtcgggctacatacgcgttaagccattccgttgacatgattacaattcagctcggtacccttttgcggtgcgctcctccccaccgcagaagatatgccggacgcttcttttgccggtcagcaggaaacttcctcaacgttcagggttttgacgccgttctcgtggcagtgaaacatgatttgcttctctgtttaacgatcgcgccatctcttatcgtgtgcaccaggttacgatcaccgtggtgtggcgctctccgccggtgttcaacggatggtcgctctgacctcgcatcatctggcgtgatgttctccattgataccgaatcggctttgaccaggtggtgtttatcacttccgcatggggccttgggtaagattatcgccgaaggcctgctatcggtcatcgcatcgaaagcatctgccatcgtcacaaccgtggcggtcgtacctgtcacgcggcgatcatcgctcgtgaactggcattccggcggtagtgggctgtggagatgcaacagaacggatgaaagagaccaacaagcatcacaaggtaccaccaggatgggccgaacacaacggaactacagccccaccagacaagccatacacaagaccggatcccccaccatggcaacaactagcaacacagaacagccaccccacgaaaaacccaacacactaacacaacacccgagaaacccagaccggaccatacacccaaaagcgacacacaatgaactaacacaagacacaccacaacgagacgcaaaacaaaacggcgaaaagacacaacggaaaaaaaattgccttagcgaattaaacgacgcagaagatcaggctgaacgtttccaggacaggttaatgctaaagctgcaggtgacgacgaagccatgttctatgacgagattacgtgactgcgctggaatatggtctgccgccaaccgctggtctggtattggtatcgaccgaatgattatgctgtttactaacagccatactatcgcgacgttattctcttcccggcgatgcgcccacagaaataaatttcacttaatgaacgaagcagtcaggcgactgcttcgttcatcgttccgcaaatcagttttgaggagagacgcttcgtttcacgataaccagcgggtccactcactacagctcctaaaagagagaaaaaaatctttaatacatggcaggatctgcgcggcaaaggcttcgttatttcaaacacgccgatatcgctggcagaaagccccgcttttttcagcgcagtttcgaggccggaaccgggccgtaacccataatcgatgggtcacaacaacgaccgccatcgaacgcacacgagcgcgcggcttaagacctaattctgggcgcggctttcactcatcaccagcatggcagctgcgccatcggaaatgcagaagatgtgcccgccgttaccataccgtttactggatcaaacgccgacgcagcgtggcgagggcttccacggtggtttccgggcgaatcacttctcgccggggtgaaaatcgacgccgtgactcatcggccattgcccatatgctccacgccgccaaacagacatgcctgcgcatcgccgtcatgatcattcgtgctgcgtcatgcagtgcctgcatggatgaaccaccaagcgatttaacggtaaccgccgggacagacgccgggttagcgccagcaggctacgcattaaatgagcggagagatcttctgcacgcacttacgaaaagcaccgcccttcgaacggcccatcggggtcccaaccggacgggctggctcaaccggaggatagtacggttcgttatgaccgctttattccgcagaccttccggcacttcatacagcgggccgaggtgcgatattgctgtgcctatccagaccttcgagctctgtacccatgtcaataataatgcatacacctgctatatggcccgctacaacgttcaacaggcgctgaatattgcccgccattcggctgtagcgacgatgcgtttatccatcgcgccgaaatgttcctcaagagctatggatgccagaaattcagcccgacggcgttttgccgcaggatattcgtttatggctaagccggcgattaatctggcgaaatacaaagcggcgcggggaagcaaaccatactgctggattattcacgcgcagaagtga

SEQ ID NO: 139774 - DNA, 1587 bp, Homo sapiens
atgcctaaggcgcgccctgcctggcagcatcgagtctgcgccgacggcgcccccgccgcctccgagtggcgaaggcagccaggcatacatctcccgccttcctgcaaccctgattgtgcttatcctagaaaggagacagctgttgggggtgtggaggcgagctcggtgctgctcccttatcaacctcgcgcaccggaggcattgtgggatgcctacccgggaatccccgtgcgccatcctcgcgcggcgatacgaaggccgacgatcgccttccacagttgcgcagcccccccccccacccccccccatcgagctcgccccctcaacgtcggaaaccccgatacaggccacacgcggtgcacaccctgcgcagccgtcctcaggccacccgcgcggcacggcccccggaacgcccaccggtccccgaacagggcccaagcggtacacacccagacccgacgccacgggcccgacaaacgcgccacaacgcccctcggcaccactcgaacacgactaactgacccactaggcatatgcaccaattgccggatgcggcgtaaacgccttatccggcctacggttcggactatttgtaggcacgataagacgcgacagcgtcgcatcaggcatcatgcaccaattgccggatgcggcgtaaacgccttatccggcctacgccaaaatcgagcgggcataagagaacccggtgccgtccgcaatcaaaatcatcggacgctcttcatcatcgggcaggcaagcttctccgggggaatggcgacccgcattggaggtcttggagaatgggcccgaatggttccggaaagagaccacgtagagcagcagaaagaatttcgtgctgcagaaatgctcagggtaggactcacagtcaaaaggcgtatattcaacagcagccacaatgttgtgtcaatgttcacttgcaaccaccagatcaacacctgcacaacatcacaaacactgtcaccaccagattcacagcaccgccactaccagcatatccatccaccaacatccaacagcaccaccacccacatcatccccaatgtcgtcagcattgtgaagccccacccccaacactgtggagcaagacctggtcaaggcaaggaacgggacgaaacggaacggaaggacgcgaaggaacggaaccgaaggaccgccacaccgacgacacgtcatacggaccggctgccacgcacggcacacggaccgccgccgccccgccccccccccccccccccccccccccccccccccccccccccgcgacagcccacgccgaccacgacggagagagaagcccgaacagcagaaggagggagggcagacagggaggacacagcgcaaggagacggcgaggcgaggggaagagagggaaacaggaaggaagaagacgcgaggggcccccccaccgaggcccgccgcagcgagaaggccacacgagacggcggagacgaaaaggcggccgccagcgcgacagcaccggccgccgcgccgccgcccgagcgacggaacagagagaacaagacaccaactgggatttataatgctggggttattgagttggaatga

SEQ ID NO: 139775 - DNA, 1623 bp, Homo sapiens
  misc_feature (1)...(1623): n = a,t,c or g
ggaatccgttaaattcaccggacaatttaaggaagggacagtggaggtccacaatgtgtgtttgtgtcaatctcaagtagacatcgtgagttcggtgctcatgagagtttcggtgactgttctgatgcattcctgtactctccttcaagcactgcatgacgcagcacgaatgatcatgactggcgatgcgcaggcatgtctggttggcggcgtggagcatatgggccatgtgccgatgagtcacggcgtcgattttcaccccggcctgagccgcaatgtcgccaaagcggcgggcatgatgggcttaacggcagaaatgctggcgcgtatgcacggtatcagccgtgaaatgcaggatgcctttgccgcgcggtcacacgcccgcgcctgggccgccacgcagtcggccgcatttaaaaatgaaatcatcccgaccggtggtcacgatgccgacggcgtcctgaagcagtttaattacgacgaagtgattcgcccggaaaccaccgtggaagccctcgccacgctgcgtccggcgtttgatccagtaaacggtatggtaacggcgggcacatcttctgcactttccgatggcgcagctgccatgctggtgatgagtgaaagccgcgcccatgaattaggtcttaagccgcgcgctcgtgtgcgttcgatggcggtcgttggttgtgacccatcgattatgggttacggcccggttccggcctcgaaactggcgctgaaaaaagcggggctttctgccagcgaantcggcgtgtttgaaatgaacgaagcctttgccgcgcagatcctgccatgtattaaagatctgggactaattgagcagattgacgagaagatcaacctcaacggtggcgcgatcgcgctgggtcatccgctgggttgttccggtgcgcgtatcagcaccacgctgctgaatctgatggaacgcaaagacgttcagtttggtctggcgacgatgtgtatcggtctgggtcagggtattgcgacggtgtttgagcgggtttaaccacttgccggatgcggcgtgaacgccttatccggtctaccgatccggcaccaatgtaggcgtgggcgtacacacagagggttccagacccggatgtttctgtggggataaagcctttttgaaagcccctgattcgagccatatttctcaacccaggttcaatcactggttctttcccgaaagcctgtaagaaataacttcgttgttgaaagagatctataactggagacaaatacagcttgcgcccattgactgcaaattcagtaacatcggtaacccacttctcgtttggccgcgtagccttgaaatctctttggagaacattaggggcggtttgccctacctctcctctgtaagagcggtatcgcttgaccttaatcgctgctttaagtgagagggttcccatcaggcgctgaacagctttatggttaatctgtttcccttctcgatgaagagacagcgttaccctacggtatccgtatcggcctctattctcgtgataaatctcactaatacgctttttaacgtccgcatacttgtcaggcttgctgagagcctttagatgataataaaacgtactgcgcggtatctccgcagcc

SEQ ID NO: 139776 - DNA, 873 bp, Homo sapiens
gcggcgtctgggtcatagggccggatgcgactcttgacccgtctgatcgggactaccggattggcaatattaatactcgtcccgtccttcatcttcatccggctgttccagcacactgtaagccaccgaacaaaacagcgagttcaggcgctgcatatctcccagtaagcctaaatgtagcgaactggtttcaatgctctgcacgttttgctgatgcaggcgatcgacgtgggcgtgggaatagcggcgattaagaatgcgaaaacgatgtttgctgcgccgcaaacgacgagcgctggtgacatcgccagagaaaaaccccgacattgccagctttaaattactgagcaattgctcatagagcgcatccagttccttcaacccatcaagcgaaaatgcccgccgtgctgccagtgatttgtcagcaatttcgctgcccatgcgctcgacgatatcggaggcctgttcaaggttgagcgacatttcgatgatctctgcccagcggcgcgactcttcctccgccagctcttcttttggcatccgcgccagatacagcttaatggcggtgtagagaacgttgatatcatctgccagcttacgcagctctttctcctgccgtggctcaccgtgcatcactttattcaacccttccatcatctgttccatggcgtcgccaatgcgcagggtttcgcgcgcggcgttcgccagagcaagcgtgggcgtatccagcgcgctgacatccagatgtttaggccgtagctgggtatccagttccggttcatcgcgaataatcgttttgcaaaaccgtgccatcgggtcaacaaatggcagcatgaccaggcaacgtacaaggttgtagaagacgtggaaata

SEQ ID NO: 139777 - DNA, 4187 bp, Homo sapiens
gggaaccccagggtttttccagtcaaggcgttgtaaacggccggccagtccaaacttgcatgcctccaggtcgcctaaaaagattcggttgtctgaataatcaactgggtaacagcaaattacagccatcgggtggaagcggggccaacgctcgttggcgcattgctgcaggcgggtttagtcgatgagctgattggctatatcgcacctaaactattaggcagcgacgcccgcggattatgcacgctgccagggcttgagaaattagccgacgccccccaatttaaattcaaagagatacgtcatgtaggcccggatgtttgcctgcatttagtgggtgcatgatctcccggctcgaaagggaagcagcgcacgaaatattatgctaaaatccgcccccctgcggggccatactcgaacccgaaggaagaaaatgaacattattgaagctaacgttgctaccccggacgctcgcgtcgccatcaccatcgcgcgtttcaacaactttatcaatgacagcctgctggaaggtgcaattgacgcactgaaacgtatcggtcaggtaaaagatgaaaacattaccgttgtttgggtgcctggtgcctatgagctgccgctggcggcgggtgcactggctaaaaccggtaaatacgacgcggggattgcgctgggtacgggtattcggggtggcactgcccactttgaatatgtcgctggtggggcaagcaacgggctggcgcatgttggccaggacagcgaaaattccggttgcttttggggttctgaccactgaaagcattgacaagcgatcgaacgtgctggcaccaaagttggcaacaaaggtgcagaagctgcactgaccgcgcttgaaatgattaatgtattgaaagccatcaaggcctgaaattagtaaggggaaatccgggaaacctgctgctcgtcgccgcgctcgtgagtgtgccgtccaggcgctctactcctggcagttgtcccagagcgacatcgctgatgttgaataccagtgcctggctgaacaggatgtaaaagacgttgacgtcctgtacttccgtgagctgctggccggggtggcgactaataccgcatgacctcgacggactgatgaagccatacctgtcccgcctgctggaagaactgggacaggtagaaaaagcagtactgcgcattgcgctgtacgaactgtctaaacgtagcgatgtgccatacaaagtggccattaacgaagcgatcgaactggcgaaatcgttcggcgcagaagacagccataagttcgtcagcggcgtactcgataaagcagcacctgtgattcgccctaacaaaaagtgatatccaggccggtagattcacggaagaccgttccatgatcgccggccttttcttttttcctgctgaggcataacgtatggcatgtggcgagttctccctgattgcccgttattttgaccgtgtaagaagttctcgtcttgatgtcgaactgggcatcggcgacgattgcgcacttctcaatatccccgagaaacagaccctggcgatcagcactgatacgctggtggcgggtaaccatttcctccctgatatcgatcctgctgatctggcttataaagcactggcggtgaacctaagcgatctggcagcgatgggggccgatccggcctggctgacgctggcattaaccttaccggacgtagacgaagcgtggcttgagtccttcagcgacagtttgtttgatcttctcaattattacgatatgcaactcattggcggcgataccacgcgtgggccattatcaatcccgctgggtatccacgggcgctctggggcgaaaccgggtgactggatctatgtgaccggtacacgggcgatagcgccgccgggctggcgattttgcaaaaccgtttgcaggttccgatgctaaagatgcggactacttgatcaaacgtcatctccgtccatcccgcgtattttacaggggcaggcactgcgcgatctggcaaattcagccacgatctctctgacggtttgatttccgatctcgggcatatcgtgaaagcccgcgactgcggcgcacgtattgacctggcattgctgccgttttctgtcttatgtggagtcatggtactttgacagaacgctttgttgattgggggaaagcctagctgaagtgatggtgcgtgggaaaatagggggaacacccggggggatgtgagtggtgcctgggccaacgtgcgtcctctcgtgaagggccagattgcccggcgaattgttgccacggggcgctcccagccgcggtggtccgacaccggtaaagcgcgaccccggccacacgcgagaaatgtggtcacagggtaagtatggcccacctggaggtagggaaacatgctgagactgtagagaagcctcagctgggaagggctggggggcagggagcctgctggccttctctccacgcccacgccctgcagcagatataggtccccacggctggttcccaatccttctgccagcctcctcccggaggaactgggaggcacatcatttctagtgggctcaggcctctgtggggcctgggaatctggggccctgcggggacctgcagcctccgtagatgcactgggggcagctgctgtgctgagttgttggtccagctgctctgtcttgaggatcaagggcctcctggagataccaggcagaggtcttgggttgggagggcggtgctcagaacttccttgcgcactggtacagagcagtaatgccaccaccatgctggtgacctctttgtcgctcaggatctggtagccctcgcaccggctcgcgactctgaccgccgcaggcatttctccttccccgtggcgctctgtctggtgattggtgctaacctcggttcggtctgctggcatgctcaacaacagtgccgccaatgccgcagcccgccggtcgcgctgggtagtctgctgtttaagctggtgggtagcctgattatccgccgtttgtccatttgcttgaacaggcctccgatatcgtcgagcgctgggcagcgaaattgctgacaaatcactggcagcacggcgggcattttccttgatgggttgaaggaactggatgcgctctatgagcaattgctcagtatttaaagctggcaatgtcggtgttcttctcagcgctgtcgtttgcgtcgcagcaaacatcgttttcgcattcttaatcgccgctatcccacgcccaggggatcctctagatcgacctacagcagcaagctgcggccgtgcaagggcaaccagccacttatgaacaatcacaacgagtagatgagtgaaaattacttccatttgctgaaagtcagtccaccgcatgtctgcctctgtactgccgtcgattattgtcagaccagacgcccgaaccagcccgaacaacagcccggatgtacgccgccccatggacggtggcttgtgtctggctcgcggttcatccgtctttacaggacccaggctgatcgatcgttcttccggaagactttgacgaatgattcgcccggaaaccaccgtggaagccctcgccacgctgcgtccggctttgatccagtaaacggtatggtaacggcgggcacatcttctgcactttcgatggcgcagctgccatgctggtgatgagtgaaagccgcgcccatgaataggtcttaagccgcgcgctcgtgtgcgttcgatggcggtcgttggttggacccatcgattatgggttacggcccggttccggcctcgaaactggcgcgaaaaaagcggggctttcacgctgctgaattgatggaacgcaaagacgttcagtttggtctggcgacgatgtgtatcggctgggtcagggtattgcgacggtgtttgagcgggtttaaccacttgccgatgcggcgtgaacgccttatccggtctaccgatccggcaccaatgtaggctgataagacgcgccagcgtcgcatcaggcatcatgcaccaattgccggatgcggcgtaaacgccttatccggcctacggttcggactatttgtaggcacgataagacgcgacagcgtcgcatcaggcatcatgcaccaattgccggatgcggcgtaaacgccttatccggcctacggttcggactatttgtaggcacgtaagacgcgacagcgtcgcatcgggcat

SEQ ID NO: 139778 - DNA, 4548 bp, Homo sapiens; identical to SEQ ID NO: 124731

SEQ ID NO: 139779 - DNA, 738 bp, Homo sapiens
gtggaagcggcggtgggctggaagctggcggttgagcgccacaacggaccgacggcactgatcctctcaaggcagaatctggcccaggtggaacgtacgccggatcaggttaaagagattgctcgtggcggttatgtgctgaaagacagcggcggtaagccagatattattctgattgccaccggttcagagatggaaattaccctgcaagcggcagagaaattagcaggagaaggtcgcaatgtacgcgtagtttccctgccctcgaccgatattttcgacgcccaggatgaggaatatcgggagtcggtgttgccttctaacgttgcggctcgcgtggcggtggaagcaggtattgccgattactggtacaagtatgttggtctgaaaggggcaattgtcgggatgacgggttacggggaatctgctccggcggataagctgttcccgttctttggctttaccgccgagaatattgtggcaaaagcgcataaggtgctgggagtgaaagcgtcttatccggcctacatgtcccgccattttgttaaacgggtgatccacaacgtgggcccagcgtctggcccatgccagttatcgcaggggggtccgaggcgtaagcaccagggaaaagctgaacgtcaaaggccaggcgctggatgcacaacggtaatcgcgccttcggtaggacagtcccgcactccccagtgcgctcatccagactcgaccgacaagttatga

SEQ ID NO: 139780 - DNA, 627 bp, Homo sapiens
ctccacatcaaacagcgtcgagccatagccaggccactccttgatcaaggccatgtacttggccatggcctgttcctggttcattccctgaaatttcctccacttgtcaatgatactggctcgagcagaggagacttcttccttaatccacatgtccagcatctgctcctcctcgaccttctgccggaccacggatcctgtccggaagctccgcctcagggtcccctctaggaagctcgtccgcctcttctccagccgttcacaaggggtgaaggttttggttgactggctgatgcgggccttgagtctctgcagggaataaacctcttcgagaggtgggatggcagcgtgcagagtataatccccctgcagatactggagtcgcagggcagcaagaacctggaggttttcttccggggctggatggtggccatggataaccgcttcgtgggcctgaaaggagacagtcaacagctttccggtcaacgcattttcaaacttggctaagacatcagctacgacggttcgactttcaatggctttgtcgacgtggccgttgtattcaaacaaagcaaacatgttcctgctgtcctccatggccaggcctcggatcagcttctccaccac

SEQ ID NO: 139781 - DNA, 642 bp, Homo sapiens
atggcgcgcgtgcgcgagttgatgtactggaatctcgataataccgcgcgtagcgagtgggccaatctggtgaagagcaagtcaaaaacagagcaggctcaactggcgcggtatgctttcaacaaccaatggtgggatcttagcgttcaggcaacgatcgccgggaagctgtgggatcatctggaagagcgattcccgctggcttacaacgatcttttcaaacgctacacccagcgggggccggagatggcgcgcgtgcgcgagttgatgtactggaatctcgataataccgcgcgtagcgagtgggccaatctggtgaagagcaagtcaaaaacagagcaggctcaactggcgcggtatgctttcaacaaccaatggtgggatcttagcgttcaggcaacgatcgccgggaagctgtgggatcatctggaagagcgattcccgctggcttacaacgatcttttcaaacgctacaccagcgggacaaaaacagcatatccactcagttccacatttccatataaaggccaaggcatttattctcaggataattgtttcagcatcgcaaccgcatcagactccggcatcgcaaactgcacccggtgccgggcagccacatccagcgcaaaaaccttcgtgtag

SEQ ID NO: 139782 - DNA, 1247 bp, Homo sapiens
atgccgagtttgcctctgcgcgagtcggggttggcggcgcctgaacgagcacacctgaacgagggaggagaaggggttcttacccctgacgcaggtgcgcctgattcgcgaacgcgcgattactactggaactggtcagaagatgaaggctggcagtcacagtttgatcaaaaagatctgatcgaaaatgaacaaactctggatctgaaagcggacgaaaccggcaaggtcagttttccggtagagtggggcgcttatcgtctggaagtcaaagcgccgaatgaagcggtcagtagtgttcgtttctgggctggctatagctggcaggacaacagcgacggtagcggcgcagtgcgacccgaccgtgtcacgctgaaactggataaagccagttatcgccctggcgacaccattaagttgcatatcgccgcgccaacggcggctaaaggttatgcgatggtcgagtccagtgaagggccgctgtggtggcaagagattgatgttcgggctcaagggctggatctgacgattccggtcgataaaacctggaatcgtcatgatctgtatttaagtacgctggtggtacgtcctggcgataaaatctcgctccgcgacgccaaaacgcgcgcgggtaacacaggcctggtaacagtgctggcagcgcagatgcctgccgattaccagactatcgcctcggcaatcatttcactggcgaacaaccctaatacggtactgaccttcgcgcgtacaactggcgcgaccgattttacccgtcaaatggcggcggtggcgtttgccagtgtggcgcggcaggatgctgagaatgcacggctgatgatcccatcgcttgcccaggcgcagcagcttaatgaagatcagattcaggacgtgcgcgatatcgtcgcctggcgtttgatgggcaacgatgtcaccgacgagcaggcgaaatggcgcgatgacgccattatgcgctcgcaatctacttcgcttattgaacgccgtgtacgaatggcgcttggcaccggcgatcgtcgcggcctgaatacctggctggcgcgtctgcctatggaagcgaaagagaaagatgaatggcgttactggcaggcggatttattgctggaacgcggacgtgaagctgaagcaaaagagattttgcatcaactcatgcaacagcgtgggttctacccgatggttgcagcacaacgcatcggcgaagagtatgagctgaagattgataaagcgccgct

SEQ ID NO: 139783 - DNA, 2379 bp, Homo sapiens
  misc_feature (1)...(2379): n = a,t,c or g
atggcagaggtagaggagaagaagcagcggatcttccgcaagttcacctaccgcggtgtggacctgggccagctgctggacatgtcctttgagcagctgaggcagctgtacggcgcgcgccagctgcggcggctgaaccacggcctgtggcggaatgctgaggctcaagccgcattcgctgctgaggcgcctatgctaggccaagaaggaggcgccgaccatagagaagcaggaagtggtgaagacgcacctgcgggatatgatcatccctcccaagatggtgggcagcagggtgggcgtctacaacggcaagaccttcaaccaggtggagatcaagctggagatgatcggccacgacctgggcgagttctccatcacctacaagcccagcgaggcaaaaaaccaatgaatcaaccgttactttcggtcaataacctgacccacctttacgcgccgggcaaaggctttagcgatgtctcttttgatttatggccgggggaagtgctgggcattgtcggggaatccggctccgggaagaccacgctgctgaagtcgatctccgcgcgcctgacgccgcagcagggggaaattcactacgagaaccgttcgctgtatgcaatgagcgaggccgaccgccgtcgcctgctgcgtaccgaatggggcgtggtgcatcagcatccactcgacggcctgcgccgccaggtgtcggcaggcggcaatatcggcgagcggctgatggcgaccggggcacgtcattacggcgatattcgtgccaccgcgcagaagtggctggaagaggtggagattcccgccaaccggatcgacgacctgccgaccacctttttncgcgcgacccatacggtgaagatgttctctattcccggttatagcagtcctgggcaattgctggatccggaaacgaatatcaacattggcaccagttacctgcaatatgtttatcagcagtttggcaataatcgtattttctcctcagcagcttataacgccggaccagggcgggtcgctaccgctatcgtcctgacgctctacatcatttatatggtcggttttttcgctaccagtggcgagctgacatatgaagtctggatcggtttcttcgcctctgcgttcaccaaagtgttcaccctgctggcgctgttttctatcttgatccatgcctggatcggcatgtggcaggtgttgaccgactacgttaaaccgctggctttgcgcctgatgctgcaactggtgattgtcgttgcactggtggtttacgtgatttatggattcgttgtggtgtggggtatgcgcgcggcgctgcaaatttcccagagcggccagacctgtgcgctgctctctaaagtcttcccgacccgttcccataccgtttctgcgcaaggcggcattaccgttgcgctgggtaatacccatgaagataactgggaatggcatatgtacgacaccgtgaaagggtcggactatatcgatgctggccggaagcgccaggaggaaggtgactggaacagcggagtcggggatccgtccgacgcaggcgatcgcaagcaccagcttaaagcggctcaattgcggccagaagccataaaacagcgacgcatagccaatcgcctgaaacggcgcactcagttcccgcggcatttgaaggggtttgtgaacaccctaaagcccattcatgggggctgctcagttgggaccaaatgccctcaaatggcctccctcccagagggcctgcatcacccagtaaaacttgtgttcctggggaaaccagggtgcctcctcacagacaggcccctgaagggtcccaacacagccaagcctgtggcggtggatcttaatgccagcgccacagcgataaccagctacagcctctatggcggcagtatgatcctgctgttcctcgcttcgacgctctatcacgccattcctcatcaacgggcaaaaatgtggctgaagaaatttgaccattgcgctatttacctgttgattgccggaacctacacgccgtttttgctggtggggctggattctccgttagcgcgcgggttgatgattgttatctggagcctggcattgctgggtattctgtttaaactgaccatcgcgcaccgattcaaaattttatctctggtgacctatctggcgatgggctggctgtcgctggtggtaatttatgaaatggcagttaagctcgcggcgggcagcgttaccttactggcggtaggcggcgtggtttattcgctcggggtgattttctacgtctgcaaacgcattccatacaaccatgccatctggcacacagttaccgccgagcacgaagattatcgaaatgctattttttatctatttgatttttatgattaa

SEQ ID NO: 139784 - DNA, 1260 bp, Homo sapiens
atgactcaaggcaccttggtcgatgccaccatcattgaggcacccagctctaccaagaacaaagagcagcaacgcgatccggagatgcatcagaccaagaaaggcaatcagtggcactttggcatgaaggcccacattggtgtcgatgccaagagtggcctgacccacagcctggtcaccaccgcggccaacgagcatgacctcaatcagctgggtaatctgcttcatggagagaagcaatttgtctcagccgatgccggctaccaaggagcgccacagcgcgaggagctggccgaggtggatgtggactggctgatcgccgagcgtcccggcaaggtaaaaaccttgaagcagaatccgcgcaagaacaaaacggccatcaacatcgaatacatgaaagccagcatccgtgccagggtggagcacccgtttcgcatcatcaagcggcagttcggcttcgtgaaagccagatacaaggggctgctgaaaaacgataaccaactggcgatgttattcaccctggccaacctgtttcgggtggaccaaatgatacccgtctataccgacctgcttgttaactacacgtaccgcatcgcttttgaagccgccgggggtcaggacttcggtctgctggcagcaattgccacgctgatcttcctgctggtggcgattatgttcccgctgctgatggtcgtcgctatctcgctgcgtcagggaaactttgcgaccggcagcctgatcccggagcaaatctcctgggatcactggacactggcgttaggttttagcgttgaacaggctgatggtcgcattacgccaccgccattcccggtactgctgtggctgtggaactcggtaaaggtcgccgggatttccgcgattggcattgtggcgctctccaccacctgcgcctacgctgtcgcccgtatgcgcttcccaggcaaagcgacgctgctgaaaggaatgctgatttcccagatgtccccggcagcactctcactggtcgcgtcgtatgcgttgtttgatcgtctggcgcgcgtggtgtccatgccgtctaccgacgcatttgacaagcaggatgctgcttaccgtgaatccgtactgccgaaagcggttactgcacgcgttgctgtagaagcgggtattgctgactactggtacaagtatgttggcctgaacggtgctatcgtcgagctgctgtttgaagagttcggcttcactgttgataacgttgttgcgaaagcaaaagaactgctgtaa

SEQ ID NO: 139785 - DNA, 3067 bp, Homo sapiens
cactgcaaccagcatcattaacagacgcgaacgttcgacgctgacgcccagcgcacacgcggtatcatcgcccatttccagcaagcgcatccggcgtaccagtaaggcggcggcaatgagcatcaatataatgatgggtgcggaaggcgaggtttttgcccacgtcaggccgttgagcgatccggcattccacaaacctgctgttagcgccgtttctaaagacgctttcagcaacagccaggtattaaaggccaccagcatggcgcgaacgccgataccgataataatcaaccgaaaggtgtcgatgccgttgcgccaggcgagcagccagaccagcagcgaagtgacaatgccgcccaccattgctgacagcgcgatagccgtcaggtcctgaccaaacagcaccatcgccaccagcacgccgctccacgccccggtgttaaagcccattacgtcagggctgccgagcgggttacgcatcagcgactgaaaaatagcgccactgacgcccagtcgtgcgccaatcaacagcgccatcagcacgcgtggtaaacgccattcggtgaccaccatcgtcatactgcgcggcgcatcgcccatcagcgcggcgaatacctgcgaggtttccagcgtgacggcaccgctgcgtaatccccagataccagcagcaaacaggtgatgagtaatcggcgagagacgtaaatcatgcaccacctcgcgttttacgtcgcaagccgcaacgttagaaggcaacaccgactcccgatattcctcatcctgggcgtcgaaaatatcgctcgaggccaggggaaactacgcgtacattgcgaccttctcctgctaatttctctgccgcttgcagggtaatttccatctctgaaccggtggcaatcagaataatatctggcttaccgccgctgtctttcagcacataaccgccacgagcaatctctttaacctgatccggcgtacgttccacctgggccagattctgccttgagaggatcagtgccgtcggtccgttgtggcgctcaaccgccagcttccagcccaccgccgcttccacctgatcgcacggtcgccaggtgctgaaatttggcgttaagcgcaggctggccagttgctcaacagcctggtgcgtcggaccatcttcgcccaggccaattgagtcgtgggtataaaccataatctgccgcgctttcatcagtgccgccatccgcgcggcgttacgggcgtattcaacaaacatcaggaacgtcgcggtatacggcacaaagccgccgtggtgcgcgatgccgttggcgatacgggtcatgccaaattcacgcaccccgtagtgaatgtagttgcccgctggatcttccttcagcgaaacagaacctttccagatggtcaggttgctgggagctgctttattcggcgaaccaaagccaatcaccgtacggcagataatcagcgacggcttatctttcacgctttgcgcttcaaggatcgcttccttcaccgcctgcggatcgtgaccgtcgatttcatggatcacatgccagtgataggcttcaaaacgttttgccgtatcgtcggtaaaccagccttctgtttcaccgtcgatggaaataccgttgtgatcgtaaaaaccaatcagcttgcccagtcccagcgtgcctgccagcgaacagacttcgtgggaaataccttccatcaggcagccgtcgcccataaacacataggtgaagtgatcgacgatctcatggtctggctggttaaactgcgccgccagtgtacgctctgctatcgccagcccgacggcgttcgccaaaccttgtccaagcgggccggtggtggtttcaacgcctggcgtatagccaatctccgggtggcctggggttttcgaatgcaactgacggaagttcttcagttcttccagcggcaggtcgtaaccggtcagatgtagcaaactgtagagcagcatcgacgcgtgaccgttggaaagaataaagcggtcgcgatcataccaggttgggtcggtagggttatgtttaagaaaatcgttccacagcacttcggcaatatcagccatgcccatcggcgcgccgggatgaccagagttggctttttgtaccgcatccatactgagtgcgcgaatcgcattggcaaggtcttttcgggacatataacactccgtggctggtttatagtttggcggcaagaagatcttccagtttgcgttgatcaacggcgaacagacgaatgccactggcgaaactttttcctgcagctccttcagtaaattcggtgcgatagtcagtcgatcgcagccggttaaagcgaggatttgttcggtgcgacggaagctcgcgcccatcacaaatggttcatagtggtgttgcgatttacgcccgatttcgccggaagaccaagggttcctgtccaacgttaatcggggcagggtgagtcgaccccttgaaataccaccctttaatgtttgatgttctaacgttgacccgtaatccgggttgcggacagtgtctggtgggtagtttgactggggcggtctcctcctaaagagtaacggaggagcacgaaggttggctaatccgcccaagagttcatatcgacggcggtgtttggcacctcgatgtcggctcatcacatcctggggctgaagtaggtcccaagggtatggctgttcgccatttaaagtggtacgcgagctgggtttagaacgtcgtgagacagttcggtccctatctgccgtgggcgctggagaactgaggggggctgctcctgaccccatgccgaactcagaagtgaaacgccgtagcgccgatggtagtgtggggtctccccatgcgagagtagggaactgcgataaaaatgccctcgtacgctctgatttaggatgcgcaaaaaattcatcaggtgcagcttgctccactatttccccacgatccataaaaattacccggtcagcgacggttcgtgcaaaccccatctcatgtgttacacacaacattgtcatacccgactgcgccagcccaatcatcgtatccagcacctctttcaccat

SEQ ID NO: 139786 - DNA, 4275 bp, Homo sapiens
atggtggcgatcttactcgccgggattatcggttatcgcgccctgcccgtttcggcgctgccggaagtggactatccgaccattcaggtggtcacgctctacccaggtgccagcccggatgtcatgacctctgccgttaccgcgccgctagaacgccagttcgggcagatgtctggcctgaaacagatgtcgtcgcaaagttccggcggtgcgtcagttatcactttgcagttccagctaacattaccgctcgatgtcgccgagcaggaagtgcaggccgcgattaacgctgcgaccaacttgttgccgagcgatctgcctaacccgccggtttacagcaaagtgaacccggcagatccgccgatcatgacgctcgccgtcacctcaaccgccatgccgatgacgcaagtggaagatatggtggaaacccgcgtcgcgcagaaaatctcgcagatttccggcgtcggcctggtgacgctttccggcggtcagcgtccggctgttcgcgtcaaacttaacgctcaggcgattgccgccctcggcctgaccagcgaaaccgtgcgcaccgccattaccggcgctaacgttaactcggcaaaaggtagcctcgacggcccttcccgtgcggtcacgctttccgcgaacgaccagatgccgctcggtaccaacgtgtactgctggcgtcgactgacgcccaccaacgcgaatatcctgtaccgccatcaggaacagattcgcccccggttctttcgccagttttacgcgcagacggtcgataatttgctgcgccgtttcgctgcgttcgtcgcgtggcttgagggtgataaacatcatcccgctgttcactcgcgaaccgcctgtaaagccggtgacattatccactgccggatcgtcacggataattttcatgaaatcctgcaacttaccgcgcatcgcctgaaacgaaatactctgatccgcctgaatcccgcccatcaacacgccagtgtcctgctccgggaagaaggttttcgggatcgagatatacagccagatattcagcgcaatggtgccaagcagcaccacgcccaccagacggcatccagccacacatcattggcgttaatgtcagagaaaccagcaacgatataccaatggcgacagaaagcgtcacggcaaattcgcgtaacagtcggcccggcaatccgcccatcaacagcagcggcaggaacaccgccaccaagcttggtagcagaggctgcaaaacgattgcaacctacacaagagaggcacattcattacaaccaaatggactgtgggggctccaatgagaagcctgtgccacaagttttatttctggcaggagaggctccagagcaccttatgcgcttttgccacaatattctcggcggtaaagccaaagaacgggaacagcttatccgccggagcagattccccgtaacccgtcatcccgacaattgcccctttcagaccaacatacttgtaccagtaatcggcaatacctgcttccaccgccacgcgagccgcaacgttagaaggcaacaccgactcccgatattcctcatcctgggcgtcgaaaatatcggtcgagggcagggaaactacgcgtacattgcgaccttctcctgctaatttctctgccgcttgcagggtaatttccatctctgaaccggtggcaatcagaataatatctggcttaccgccgctgtctttcagcacataaccgccacgagcaatctctttaacctgatccggcgtacgttccacctgggccagattctgccttgagaggatcagtgccgtcggtccgttgtggcgctcaaccgccagcttccagcccaccgccgcttccacctgatcgcacggtcgccaggtgctgaaatttggcgttaagcgcaggctggccagttgctcaacagcctggtgcgtcggaccatcttcgcccaggccaattgagtcgtgggtataaaccataatctgccgcgctttcatcagtgccgccatccgcgcggcgttacgggcgtattcaacaaacatcaggaacgtcgcggtatacggcacaaagccgccgtggtgcgcgatgccgttggcgatagcggtcatgccagattcacgcaccccgtagtgaatgtagtttgccgctggattatcgaccaggccgcgcacgaaggcacgctgcatcactaaaacaatcaccaccggagggataagcgttaacaacatcgccaccatcactgagttccattccgtggtgccttcgcctgtagcgatcatccctttgatccctgccacggtggtgccgagatccacatcggtaataatcaacaacggccacaaatactgattccagccgtagataaaggtgatcacaaacagcgccgccagattagttttggagagcggaaaaacgatgtcgcaaaagaagcgcattggcgatgcgccgtcgatccgcgcggcttccaccagctcatccggcagcgtcataaagaactggcggaacaggaaagtagcggtcgccgaggccatcagcggcagcgttaaaccggcgtagctgtcgagcatctgcaggttggcgatgacttccaccgtcgggaagatacgtacttcaaccggcagcatcagggtgataaaaatcatccagaagaagaggttacgtagcggaaaacgaaaccagacaatggcaaatgccgagagcatcgagacggtaattttgccgagcgtaatgctgaacgccatcacaaagctgttaagcaacatccgccagaacggcgcgctatacgtgcctaccccgttcaccccagatgttgtggatgtttccagcagatgtgtgcggggataagcgcatcggggcggatagacgccactggcaagccttttttgtaccaggcgttttcttcccatcgccaccccaatatgattcatcgcggcaataacagctaaatcagaacgatcaaagccaattccagaagatgtcggcaaattaaccgcataatgttgcgcccaactatgccattcatccgtaccggagtcgttgctccatgcctgtctgtcatggagcaacgtacagtgacacaggttaattaccgtgtcggttaaagcatgtctttgagcgtattccgggctacatactggcaggatttcttcatccatcagaaagtgatgagtgagttgcgctgacggcgcatcatcaaagtagatcgccaaatcgattccggcacgtagcagattgacgttgtcattaccagtgagcacggtgagcgaaatagaccggataccggcgtgtaccgtcacctggtggcgacactggcaaaattgttgccgctgggtctgtttgttgtgctggcgatgatgatgttcaaactggataccttcaagctcgacttcaccggacttgcacttggcgtacccgtttgggaacaggtgaaaaacaccatgctgatcaccctgtgggttttcattggtgtggaaggtgccgtggttgtttctgcgcgtgcgcgtaataaacgtgatgttggcaaagcgacactgctggcggttctctccgctctgggcgtttacttgctggtaacgctgctttcgggatcgatcaacgctgctacatccttgaatgattggtccatactgatggggtttggtaatgaacggacggtagcgaaggaggcggatggatgatgactgctgttcatgacttaggtcctcgtagacctggccatcgagcagttgtttacctgaagacgtttgtacataaggcaataatggcaggctcatttccccatccctcgttaccgcaagaatggtttcatcgttatcctgcaagctatattcttcagcccactgcaggaccttgcgagccttgaaccttttttcacactcggcgctttcaaatttatccatgccattgccgacccattctggctcatccatttccgcatcatcgtaaatgctatccagccattgccggtaagcatcagggaaaaataaggatgctccattaagctcctcaatatgttgctgcgtccgccacatgactctaacgttgctataaatatgctcatgtcgtccgtaaccctcgccatcaggcagcaaaatggtggcaacaggaatctcaaaaccagcgggacgatatttgcgatgatggcgatgtaaacggcccaatcgttggaaaagcaaatctgcaggacaatgctgagtaattaaccaatcaaaatcaacgtcgagtgattgttccacgaactgggttgcgacaagtatccgtccaacatttcgcttccccat

SEQ ID NO: 139787 - DNA, 8714 bp, Homo sapiens
atgcctgagcctcccacccactccatgggctcctgtgcggccggagcctccctgacgagcaccgccccctgctccacggcgcccagtcccatcgaccacctaagggctaaggaatgcgagcgcacggcgcaggactggcaggcagctccacctgcagccctggtgcgggatccactagctgctctggtgaggacgtggagaacctttatgtctagctcaaggattgtaaatacaccaatcggcaccctgtgtttagctcaaggtttccagtggttcagcgtgctgagtcaggtccacgcgtccacggaccaggagatccaggagatgcatgatgagcaggcaaacccacagaatgctgtgggcaccttggatgtggggctgattgattctgtgtgtgcctctgacagccctgatagacccaactcgtttgtgatcatcacggccaaccgggtgctgcactgcaacgccgacacgccggaggagatgcaccactggataaccctgctgcagaggtccaaaggggacaccagagtggagggccaggaattcatcgtgagaggatggttgcacaaagaggtgaagaacagtccaaagatgtcttcactgaaactgaagaaacggtggtttgtactcacccacattcctggattactacaagagttcagagaagacgcgctcaactggggacctgatgagaagatattcaaagagacagaactggtgaatgatatggacaagattaatggaaggatagagagggcagaagcatcaacttgcgagttaggacttcttagaattatccaggttgtcagcccctttcactcctctgtgcatttgtttacaaatgtgggtcctcaggtccggaaccgcattgctgcttgcgagagggctggaatgatggaatacagaagtgcttccctctctctgctgaatgcctcggtggctgaaggatatgtacgggaagaaaaggaaattgcagccgaaaagaaaaccaccaatggaaatccagatctaccccctcgtgattgtgatcgcaggatgccagaccagtttgaccaggcggttgtgctgaaccagctgcggtactcagggatgctggagactgtgagaatccgcaaagctgggtataaagtgctgatgaggaatctggctctgcctgaggacgtccgagggaagtgcacgagcctgctgcagctctatgatgcctccaacagcgagtggcagctggggaagaccaaggtctttcttcgagaatccttggaacagaaactggagaagcggagggaagaggaagtgagccacgcggccatggtgattcgggcccatgtcttgggcttcttagcacgaaaacaatacagaaaggtcctttattgtgtggtgataatacagaagaattacagagcattccttctgaggaggagatttttgcacctgaaaaaggcagccatagttttccagaagcaactcagaggtcagattgctcggagagtttacagacaattgctggcagagaaaagggagcaagaagaaaagaagaaacaggaagaggaagaaaagaagaaacgggaggaagaagaaagagaaagagagagagagcgaagagaagccgagctccgcgcccagcaggaagaagaaacgaggaagcagcaagaactcgaagccttgcagaagagccagaaggaagctgaactgacccgtgaactggagaaacagaaggaaaataagcaggtggaagagatcctccgtctggagaaagaaatcgaggacctgcagcgcatgaaggagcagcaggagctgtcgctgaccgaggcttccctgcagaagctgcaggagcggcgggaccaggagctccgcaggctggaggaggaagcgtgcagggcggcccaggagttcctcgagtccctcaatttcgacgagatcgacgagtgtgtccggaatatcgagcggtccctgtcggtgggaagcgaattttccagcgagctggctgagagcgcatgcgaggagaagcccaacttcacactttccaagcccagaccccctaaccgcaagaggcaggaggtcgatgagggcttcgaagccgacgacgacgccttcaaggactcccccaaccccagcgagcacggccactcagaccagcgaacaagtggcatccggaccagcgatgactcttcagaggaggacccatacatgaacgacacggtggtgcccaccagccccagtgcggacagcacggtgctgctcgccccatcagtgcaggactccgggagcctacacaactcctccagcggcgagtccacctactgcatgccccagaacgctggggacttgccctccccagacggcgactacgactacgaccaggatgactatgaggacggtgccatcacttccggcagcagcgtgaccttctccaactcctacggcagccagtggtcccccgactaccgctgctctgtggggacctacaacagctcgggtgcctaccggttcagctctgagggggcgcagtcctcgtttgaagatagtgaagaggactttgattccaggtttgatacagatgatgagctttcataccggcgtgactctgtgtacagctgtgtcactctgccgtatttccacagctttctgtacatgaaaggtggcctgatgaactcttggaaacgccgctggtgcgtcctcaaggatgaaaccttcttgtggttccgctccaagcaggaggccctcaagcaaggctggctccacaaaaaaggggggggctcctccacgctgtccaggagaaattggaagaagcgctggtttgtcctccgccagtccaagctgatgtactttgaaaacgacagcgaggagaagctcaagggcaccgtagaagtgcgaacggcaaaagagatcatagataacaccaccaaggagaatgggatcgacatcattatggccgataggactttccacctgattgcagagtccccagaagatgccagccagtggttcagcgtgctgagtcaggtccacgcgtccacggaccaggagatccaggagatgcatgatgagcaggcaaacccacagaatgctgtgggcaccttggatgtggggctgattgattctgtgtgtgcctctgacagccctgatagacccaactcgtttgtgatcatcacggccaaccgggtgctgcactgcaacgccgacacgccggaggagatgcaccactggataaccctgctgcagaggtccaaaggggacaccagagtggagggccaggaattcatcgtgagaggatggttgcacaaagaggtgaagaacagtccaaagatgtcttcacttgaaactgaagaaacggtggtttgtactcacccacaattccctggattactacaagagttcagagaagaaccgccgctcaaactgggggaccctggtcctccaacagcctctgctctggtcgtccccccagatgagaagatattcaaagagacaggctactggaacgtcaccgtgtacgggcgcaagcactgttaccggctctacaccaagctgctcaacgaggccacccggtggtccagtgccattcaaaacgtgactgacaccaaggccccgatcgacacccccacccagcagctgattcaagatatcaaggagaactgcctgaactcggatgtggtggaacagatttacaagcggaacccgatccttcgatacacccatcaccccttgcactccccgctcctgccccttccgtatggggacataaatctcaacttgctcaaagacaaaggctataccacccttcaggatgaggccatcaagatattcaattccctgcagcaactggagtccatgtctgacccaattccaataatccaggtcatcctacagacagggcatgacctgcgacctctgcgggacgagctgtactgccagcttatcaaacagaccaacaaagtgccccaccccggcagtgtgggcaacctgtacagctggcagatcctgacatgcctgagctgcaccttcctgccgagtcgagggattctcaagtatctcaagttccatctgaaaaggatacgggaacagtttccaggaaccgagatggaaaaatacgctctcttcacttacgaatctcttaagaaaaccaaatgccgagagtttgtgccttcccgagatgaaatagaagctctgatccacaggcaggaaatgacatccacggtctattgccatggcggcggctcctgcaagatcaccatcaactcccacaccacctgctggggaggtggtggagaagctgatccgaggcctgcccatggaggacagcaggaacatgtttgctttgtttgaatacaacggccacgtcgacaaagccattgaaagtcgaaccgtcgtagcgtgatgtcttagccaagtttgaaaagctggctgccacatccgaggttggggacctgccatggaaattctacttcaaactttactgcttcctggacacagacaacgtgccaaaagacagtgtggagtttgcatttatgtttgaacaggcccacgaagcggttatccatggccaccatccagccccggaagaaaacctccaggttcttgctgccctgcgactccagtatctgcagggggattatactctgcacgctgccatcccacctctcgaagaggtttattccctgcagagactcaaggcccgcatcagccagtcaaccaaaaccttcaccccttgtgaacggctggagaagaggcggacgagcttcctagaggggaccctgaggcggagcttccggacaggatccgtggtccggcagaaggtcgaggaggagcagatgctggacatgtggattaaggaagaagtctcctctgctcgagccagtatcattgacaagtggaggaaatttcagggaatgaaccaggaacaggccatggccaagtacatggccttgatcaaggagtggcctggctatggctcgacgctgtttgatgtggaggtgagaactggctgccatgtgttggggtgggctgggtgctggcatctgagaacatggatcacggccaagttcatgtggagagaagacaagatggagcattttgctctctcaacctctttttttcgagcccccaaaattgtaccattaacgcctcccttctcctcacagtttctcttctcctgtgtagtaaatgcatctgtaatattaggaatgaatgcaaaattaagatgtcatctattcttctacccttccttagggaagctatagatctaattttttaaacactgataaaaatctacatttaaaaaaatgttatagctgtatatacaaattagaaactttggatatacttgcattttactttgttttttctttacagccatctgtttgaaaggaagaatgtctatctcgtaatggaatttagccattggcatcaacccagtactgatttttgttttgttttaagtagaccgcttattgaaaagaaatcttactaattgtctagatgagagtttggcaaactggtctgtgggtcagatcttgcctgcctcctttttttctaaacaaagttttattggaacacagccaagctcattcctttagatatattccctggctgtttttgtacagagttgagtagttgtgacagagaccatgtgatccacaaagtctaaaaatctttactatgcagcccttaacagataagtgtgccagctcatcgtctagattagcttccattttttatgatcacagtaattcagcgtatatctgatgactttatattgaggctgtataaaattctaaatattataaattctagaatccgtgggtggcttttcattaggtgatgtttttgattggtttggttggttcaattatgcctgtttttaagtataaaaaaatcaggtgctttgtacaaagccataattccatttctccctgacaaggaatagataatagcagttaaactcttggcttcctgcaaaacgtgagctgtgaattagcatagaaagctactggcttggccgggcgcggtggctcatgcctgtaatcccagcgctttgggaggccaaggcgggcggatcatgaggtcaggagatcgagaccatcctggctaacacggtgaaaccccatctctgcaaaaaattagctgggcgtggtggcatgcacctgtaatcccagctactcgagaggctgagacaggagaatcgcttgaactcaggaggtggaggttgcagtgagccaggatcacgccactgcactccagcctgggcgacagagtgagactccgtcaaaaaaaaaaagaaaaaaagaaagctactggcttttgcatggaggatgcagagaatgtctggttattagggatataaactagagactcttttcagcgtctccaatttatagccctcctgcttgtccaggtttggatcagccctgtgttgttagccccttcatatggggtcttattttcttccaccaatctgtacaggaaagtctacagttaaactggtaaagtccctgttcccactctgcatatggaaggccattgctgctccttgtgaagaggagccagaactgctcagcatgcgtgatttggagaattttcctctgtgatcctagattttgtatttgaagactaaccatccgcaaagaggattggaggcagaactggagatattaatacaagagtagacttggcttgggttgcagggaagctttcttaagtcccccggccaagcatgtacgtttccaggccacttccacgtagctaatccaaacagctagtagaataatgctgagaagtggagagtcaaagcaagatgttagactctgccagttagtgaggttttcccaaaagcgtgagattaactagttagaaatcaagatagccagagaggtgccatttttcatatttcaggcccctccatgcatgcatgcacatcgaatatatttaatcttctgcacagaggacttcactcaaagcctgtcttatggtttagatgctttctgttgccaaccacttcatgacttaactcttctgttgactcttgcccaccagtgcaaggaaggtggcttccctcaggaactctggttgggtgtcagcgcggacgccgtctccgtctacaagcgtggagagggaagaccactggaagtcttccagtatgaacacatcctctcttttggggcacccctggcgaatacgtataagatcgtggtcgatgagagggagctgctctttgaaaccagtgaggtggtggatgtggccaagctcatgaaagcctacatcagcatgatcgtgaagaagcgctacagcacgacacgctccgccagcagccagggcagctccaggtgaaggcgggacagagcccacctgtctttgctacctgaacgcaccaccctctggcctaggctggctccagtgtgccatgcccagccaaaacaaacacagagctgcccaggctttctggaagcttctggtctgagggaggtgtctccgaggatccttttgcctgccgccttcattgatcctgtattaagctgtcaactttaacagtctgcacagtttccaaagctttactactcttagaggacacatgccttaaaaaaggaggggaggaaccacgctgccaccaaagcagccggaagtgccttaacttgtggaaccaacactaatcgaccgtaactgtgctactgaagggaactgcctttcccccttctgggggagacttaacagagcgtggaaggggggcattctctgtcaatgatgcactaacctcccaacctgatttccccgaatctgagggaaggtgagggagtgggaagggggatggagagctcgaggggacagtgtgtttgagctggagtgctgcgggcagcctttctcatggaatgacatgaatcaacttttttctttgtttcatcttttaagtgtacgtgcttgcctgttcgtgcatgtgttcataaactcaacaccttaatcatggtttcatgagcattaaaaagcaaagggaaaaaggatgtgtaatggtgtacacagtctgtatattttaataatgcagagctatagtctcaattgttactttataaggtggttttattaacaaacccaaatcctggattttcctgtctttgctgtattttgaaaaacacgtgttgactccattgttttacatgtagcaaagtctgccatctgtgtctgctgtattataaacagataagcagcctacaagataactgtatttataaaccactcttcaacagctggctccagtgctggttttagaacaagaatgaagtcattttggagtctttcatgtctaaaagatttaagttaaaaacaaagtgttacttggaaggttagcttctatcattctggatagattacagatataataaccatgttgactatgggggagagacgctgcattccagaaacgtcttaacacttgagtgaatcttcaaaggaccctgacattaaatgctgaggctttaatacacacatattttatcccaagtttataatggtggtctgaacaaggcacctgtaaataaatcagcatttatgaccagaagaaaaataatctggtcttggactttttatttttatatggaaaagttttaaggacttgggccaactaagtctacccacacgaaaaaagaaatttgccttgtccctttgtgtacaaccatgcaaaactgtttgttggctcacagaagttctgacaataaaagatactagct

SEQ ID NO: 139788 - DNA, 3061 bp, Homo sapiens
atggcaggacttgggatgggagaggaagggattcctggtggagagcgctgggagcacaagcgcagggcacacatcgtgagcaatcacagaattacgcgtacgggcacacacccatacacgcacagtccatacccgcacaaagacaacgttcacacagcccgcagggagcacaagacacaggatttaggcacaatacgttccgtgggacacagttcagaacacacccagcatacaaccccagacaccgttccgccgctggtggttatagtatgccgcgtttgttaccgccccccgcacggggagacccgcgccgagtacacccggcaccgcgggcagaacaggaggaccaaattctgggtcggcatcaaggaggaaaagaacctggcgcagcaggaacgaactgaagagcaactggcaaacatcgcgcgcggtggttatgtgctgaaagactgcgccggtcagccggaactgattttcatcgctaccggttcagaagttgaactggctgttgctgcctacgaaaaactgactgccgaaggcgtgaaagcgcgcgtggtgtccatgccgtctaccgacgcatttgcgcaagaagtatgttgctttacagggaatccgtacggccgaaagcggttactgcacgcgttgctgtagaagcgggtattgctgactactggtacaagtatgttggcctgaacggtgctatcgtcggtatgaccaccttcggtgaatctgctccggcagagctgctgtttgaagagttcggcttcactgttgataacccactagcttcgcgcgcggttcggttgcgtttgccgttcaacaacgatcaggtggaagcggcggtgggctggaagctggcggttgagcgccacaacggaccgacggcactgatcctctcaaggcagaatctggcccaggtggaacgtacgccggatcaggttaaagagattgctcgtggcggttatgtgctgaaagacagcggcggtaagccagatattattctgattgccaccggttcagagatggaaattaccctgcaagcggcagagaaattagcaggagaaggtcgcaatgtacgcgtagtttccctgccctcgaccgatattttcgacgcccaggatgaggaatatcgggagtcggtgttgccttctaacgttgcggctcgcgtggcggtggaagcaggtattgccgattactggtacaagtatgttggtctgaaaggggcaattgtcgggatgacgggttacggggaatctgctccggcggataagctgttcccgttctttggctttaccgccgagaatattgtggcaaaagcgcataaggtgctgggagtgaaagccgggtcacatattcctcggaagaagtatgatgtgcccggcaagaagagcttttctcccgtgaaatatagcacaattgggagccccagtccagagagaccagtgagtataaccaccatacccaactcgtttgtgatcatcacggccaaccgggtgctgcactgcaacgccgacacgccggaggagatgcaccactggataaccctgctgcagaggtccaaaggggacaccagagtggagggccaggaattcatcgtggtggagaagctgatccgaggcctggccatggaggacagcaggaacatgtttgctttgtttgaatacaacggccacgtcgacaaagccattgaaagtcgaaccgtcgtagctgatgtcttagccaagtttgaaaaagagccagttggtaagcatttaccaacatatgatggccagatcgccatgggcttagaaagtacagcttctgtcaccaggaaacattcatcaccttcgtcattgcagaatgctctaagttgtgagactgctacttcgcttattgaacgccgtgtacgaatggcgcttggcaccggcgatcgtcgcggcctgaatacctggctggcgcgtctgcctatggaagcgaaagagaaagatgaatggcgttactggcaggcggatttattgctggaacgcggacgtgaagctgaagcaaaagagattttgcatcaactcatgcaacagcgtggtttctacccgatggttgcagcacaacgcatcggcgaagagtatgagctgaagattgataaagcgccgcagaatgttgacagcgccctgactcaggggccggagatggcgcgcgtgcgcgagttgatgtactggaatctcgataataccgcgcgtagcgagtgggccaattctgttgaagaacaaatcaaaaccagaccgggctcacctgccggggtatgcttccaccacccaatggtggattttgagcgttcaggcaacgattcgccggaaaccttggggatcatctgaaagagcgattcccgttggctaacaacgatctttcaaaacgctacacaagcggtaagaagatcccgcaaagctatgcgatggcgattgctcgtcagaagagcgcttggaatccgaaagtgaaatcaccggtaggggccagcggcttgatgcagattatgcctggtacagcgacccatacggtgaagatgttctctattcccggttatagcagtcctgggcaattgctggatccggaaacgaatatcaacattggcagccagctacctgcattatgtttatcagcagtttggcaataatcgtattttctcctcagcagcttataacgccggaccagggcgggtgcgaacctggcttggcaacagcgccgggcgtatcgacgcagtggcatttgtcgagagtattccattctccgagacgcgcggttatgtgaagaacgtgctggcttatgacgcttactaccgctatttcatgggggataaaccgacgttgatgagcgccacggaatggggacgtccttactgatccgcacgcttatgatatgctttggtactctttaacgagcacacccgggggaagggttttgcttcccccgctaacaatggcgacatattatggcccaacaatcaccctattcagcagcgatggcagaacagcgtcaccagcagtggttacaatttgtgtaccggcatagtaatgccagccaaaacgatcta

SEQ ID NO: 139789 - DNA, 1195 bp, Homo sapiens; identical to SEQ ID NO: 125178

SEQ ID NO: 139790 - DNA, 2679 bp, Homo sapiens
atggatttaatccgaggcgtcttgctccggctcctgctcctggcttccagcctcggacccggcgcggtgtcgctccgagcggccatccgaaaaccagcatctccttcccactattattctggggacttcttatatccctctcctggattggatcttctgtttcctgcagctttggtcctgcgtcatggttctgtccaagttttcgtgacagtcatcctccaacaccttcctgagaaaagatgtaaaggagaagattcaggctttagcgatgactggagggtcattcgctggaaagaatttcatcagttggaactaaatcatgccttgcttctctatattcatttattcttatcagcatataaacatgccagctctcctggttctgtgacatcaacgatgtctttcttggcctcctttgctggtgttggagttcagagcactcaaccccaaaatgtggcaccttggaaattgagaaaacagcataagcagaaagacctacacaatgctcacgccgctgctagacattcgattgtgatcagctgcactgtcagatccaaatcaaatgctagaggcgacgttgagacatgtgtgagtgctgggatgactcctatgcactatattgcaaggctggatcatcgaatcgcgtcgaatgccgtaccacggtggcgtccaggttgttctattccaaatacagcttgtgaagtatttagctcaatagtctatgcttacaagttattgaatagatgcacgccagagtacgcgcgtcttaccactgcccgcgcccgccagcaccagaaggttgctgcgtggcgcggccaccgcttcgcgctgtttgtcattaaggctgtcgagcaggtaagaaacgtccattggcaccgccgcgtaaaaataggttgggcggagaagcgcaacgccctccgccaaaaagctgggtatatatacagatttgctgattatatcagcgaggtcagagatgccaaccgggaaatttccagatgcggcagtaaacggctgtcccaggtttgcatcagatcgccattttccggtctgatccaacaagcctgcattccgctgcgaattgccccacccacgtcagtgggactagccggacctccgcggtttgcccggcgcgatgtcatttctcgcacggatgttacgtaccgcaacgatcgcctgtttcagccattcggtgtcggccagtgcggcttcatcaacctgagatgcatcgtactgcgggaacggctgcagcatgatggtgtcggcagtgataccgcaaagtactttcacacgctgccagatggtttcggtgatgaacggaatgatcggatgcgcgaggcgcagcagaccttccagtacagtcaccagcgtatggcgagtaccgcgcagttctgcttcggtgccaccgttcattaccggcttggtcagctcgagataccagtcacagaactggttccaggtgaactcatacagaatgcctgcggcgatatcgaagcggaagctgtccagcgcttcgcggtacgctttgatgatcgaaaatcccgtaccagaatggccgccgacttccagcggaccaaagatgaggaactactgacaaaagcgggcgcggatgaagaggcgttaagctggttaaccgaacaaagtcagaaagatacccgctccggtactgacaccaacgttcgtcagatggccgatcccacttcggcggctaaacatcaatatggggacactcggttgcggactcacgcgacaatcattcatggtgaaaaaatcgcctttaaaatcgcttttccccgtgccccacaggtcgcgcagcacctgcttcgacaccctggtgagagcagagcccgtgcttgtgtaagatcaaaggttgtaattgcactcacagtggcagcaggctctgaggtgcgttgcctaacatcacgtgcactagttctgcgggaacacacatcagacctacttgggttgggtggggggtgttgcaaactcagaagcctgaggagaaaaatggggtaccccggacctcgtgggcccgaacgaacggagaccattcagcgccttttgggtgtgtgccccgaacaaggggaaggaaaaatttatattgatggcaaacaggtagatattcgtaactgtcagcaagccatcgcccaggggattgcgatggtccccgaagacagaaagcgcgacggcatcgttccggtaatggcggttggtaaaaatattaccctcgccgcactcaataaatttaccggtggcattagccagcttgatgacgcggcagagcaaaaatgtattctggaatcaatccagcaactcaaagttaaaacgtcgtcccccgaccttgctattggacgtttgagcggcggcaatcagcaaaaagcgatcctcgctcgctgtctgttacttaacccgcgcattctcattcttgatgaacccaccaggggtatcgatattggcgcgaaatacgagatctacaaattaattaaccaactcgtccagcagggtattgccgttattgtcatctcttccgaattacctgaagtgctcggccttagcgatcgtgtactggtgatgcatgaagggaaactaaaagccaacctgataaatcataacctgactcaggagcaggtgatggaagccgcattgaggagcgaacatcatgtcgaaaagcaatccgtctga

SEQ ID NO: 139791 - DNA, 2583 bp, Homo sapiens
atgactgagagtttacctgaccaccctctcttccaacctactataagccctagtctggtaccacctcctttccgtctgggcttcttgcattctgggacagccaagtctgtgacttgcacgtactcccctgccctcaacaagatgttttgccaactggccaagacctgccctgtgcagctgtgggttgattccacacccccgcccggcacccgcgtccgcgccatggccatctacaagcagtcacagcacatgacggaggttgtgaggcgctgcccccaccatgagcgctgctcagatagcgatggtctggcccctcctcagcatcttatccgagtggaaggaaatttgcgtgtggagtatttggatgacagaaacacttttcgacatagtgtggtggtgccctatgagccgcctgaggttggctctgactgtaccaccatccactacaactacatgtgtaacagttcctgcatgggcggcatgaaccggaggcccatcctcaccatcatcacactggaagactccagtggtaatctactgggacggaacagctttgagccaaagaagaaaccactggatggagaatatttcacccttcagatccgtgggcgtgagcgcttcgagatgttccgagagctgaatgaggccttggaactcaaggatgcccaggctgggaaggagccaggggggagcagggctcactccagccacctgaagtccaaaaagggtcaggctagtgcaagggctatcagcgtttctattagtagacgtggagaaaatctccggcgagacgcgctccatgccacgagcaaacgcaaaattttctgccccttcgccaatcatcatcacatgcgggctttgctccatcaccagccgggcggcaagaaccggattacgcagatgactaacgcccgccaccgcaccggctttcagggtgttaccatccatcacacaggcgtccagttcatgggtttcatcacgcgtaaagacagcgccaattccggcgttaaacagtggacactcttccagcagacgcaccgcttccgtcaccacatccagcgcactttcgcccgcttccagcattttctgcccggtttcaacaatggcagacaacgcctcgatgtagcgagtgttttcatggaatttaccaccggattgatgtcgctcgacaccgcgcttaatgagatgctttctcgcgtcaccccactgaccgcccaggaaacgctgccactggtacagtgttttggtcgtattctggcgagcgatgtcgtttcgccgcttgatgttccggggtttgataactccgcaatggacggctacgcggtgcgtttagccgatattgcctccgggcaaccgctgcccgttgccggtaaatcctttgccggtcagccataccatggtgaatgggctgcgggtacctgcattcgtattatgaccggtgcgccggtgccggaaggctgcgaagcggtggtgatgcaggagcagactgaacaaatggacaatggcgtgcgttttactgctgaatgcgtagcgggcgaaatattcgccgtcgcggggaagatatctctgggggggcgggggtttccccgcgggaatcgcctgagtaacgcgaggtgccggaaatgggtcccgggggggccgcaaaccggggtaccaaaagggtttaaagcattgggtattgccggcccagatgcacggagcaaccttgctggatgctcagcaacgggtgttacgccctgccatttgtggaacgacgggcgctgtgcgcaagagtgcactttgctggaagcgcgagagcataaccattatgcgtacatctacaacgaactggtgtggaacgtgctcaaggacaccgttggtgaggaagaagctgtcttgtttgcccgctcggcctccgtcggtgcgcagaaattcccggtacactggggtggcgattgttacgctaactacgaatcaatggcggaaagcctgcgcggtggtttgtctattggcctttcaggttttggcttctggagccacgatatcggcggctttgaaaataccgctccggcgcacgtttacaaacgctggtgcgcgtttggtttgctctccagccatagccgtttacacggtagcaaatcttatcgtgtgccgtgggcctacgatgatgagtcctgtgatgtggtgcgcttcttcacgcaactgaaatgccgcatgatgccgtatctgtatcgtgaagctgcgcgtgcgaacgcgcggggtacgccgatgatgcgggccatgatgatggagttcccggacgatccggcttgtgattaccttgaccgtcaatacatgttaggcgacaacgtgatggttgcgccggtgttcactgaagcgggcgatgtgcagttctacctgccggaaggtcgctggacacacctgtggcacaacgatgaactcgacggtagtcgctggcataaacagcagcacggcttcctgagtctgcccgtttatgtgcgtgataacactctactgggcgctgggcaacaacgatcaacgtcccgattacgtgtggcacgaaggcacggcattccacctcttcaatctgcaagacgggcatga

SEQ ID NO: 139792 - DNA, 996 bp, Homo sapiens
atgttctgggtggtctaccagtgctatggtcccctctcccgcaccacccacaccactggcaatggcagcaaggaatctggggtgatggtgatggtgaaggatgctgctgatgaatttcaggcccagaatacagggccaaatattatatatgccccagctgcaattgaatatgcaggagctgaatgtgcagcactgcggatgaatgaaaatcgtaggaccgctaaatgggataacagcaaggtgatggaagagatcctcgcgctgcgtcacgaactggcgcaactgctgggctttgaaaactacgcctttaaatcccttgccactaaaatggcagaaaacccgcagcagtgcttggtcttcggagtaatgcaggttatgcgacaaataactcggcatataggtcagcaacatgtagtaagtcacgttggtggcaattaccagaccaatacatgtcaacaggctgcgccagtatttagtggcaatctctttaaacgagactttcgggccatcctgcaaaccttcacggtcgccctgttccagtttatcgacatgctgctggaacgccggagtcatgcacaagaaatgagtacagggaggaagattatgcagttacagaaattagtcaatatgtttggtggtgatctcacccgtcgttatgggcaaaaggtgcataagctgacgctgcacggcggttttagctgccctaaccgtgacggtaccatcgggcgtggtggctgcacattctgtaatgttgcctcgtttgccgatgaagcgcagcagcatcgttccattgccgagcaactggcgcaccagtcgaatttagttaaccgcgctaaacgctatctggcctactttcaggcgtataccagcacctttgcggaagttcagtgctgcgattctatgttcttgcccgtagtccagtaccctttcgtaaaagacgtccgtgtacatggaagattccagcgatacagccagaacaataaatctaggatgtaa

SEQ ID NO: 139793 - DNA, 968 bp, Homo sapiens
tcacagcacagcacgtgggatgccgcctagaacagaggcagaaccctgtacccaggggcagtcactgttgctgatttgagttacgagctgggggttcaggcggcagtggccgtgtttcatctggggagcgctgggtacacaaaccacgcgacgctggcaggtcactctttccatcatgaaatagccaccggcattgcgcttggcctgttcggttctgtcgacgccaaccgtggcgatgcgcaactgggctgggacaccgaccagttcccgaacagtgtggaagagaatgcgctggtgatgtatgaaattctcaaagcaggcggtttcaccaccggtggtctgaacttcgatgccaaagtacgtcgtcaaagtactgataaatatgatctgttttacggtcatatcggcgcgatggatacgatggcactggcgctgaaaattgcagcgcgcatgattgaagatggcgagctggataaacgcatcgcgcagcgttattccggctggaatagcgaattgggccagcaaatccttgttggcaaaacagttttcaatctcaagcttgtcagtgtctgcaacaatttctccattaggtaaaacagtgtaaacaagcagatgagcactaggagcagagtctgattccactcgaaaggagaaggacaacacccctttcagtacctcaactagtaaggccttgactacagtgtccttctgcgcaagtggcgggacgtcagtcaactcattgtcacacacttcctgagaatgcatggcttctgcagtggctgtgaaattcacctttccgaacttggccgtgaacttctgcacagcagcaatggcggggccaaaggtagctttgacctccacactggctcggatccaggccggcagcttggccaggacagggggccgggcgtatcgctggtccaggagcactatgctggcaaaatccttctggtgcctgatggccctgc

SEQ ID NO: 139794 - DNA, 1008 bp, Homo sapiens
atgatggagcaagtgctcgatatcccttcccaggaagttatctcgaaagataacgccaacgttaccatcgacgccgtgtgctttattcaggtgattgacgcgccgcgcgcggcttatgaagtcagcaatctggagctggcgatcatcaacctgaccatgactaacatccgtaccgtgctgggttcaatggaacttgacgaaatgctctctcagcgcgacagcatcaactcacgcctgctgcgtattgtcgatgaagccaccaaccctctggcgctgaaaattgcagcgcgcatgattgaagatggcgagctggataaacgcatcgcgcagcgttattccggctggaatagcgaattgggccagcaaatcctgaaaggccaaatgtcactggcagatttagccaaatatgctcaggaacatcatttgtctccggtgcatcatcaggttgccgagtggatgcgggcgcgaaacggtcagcttttccgtttgcgcagcaaccacctcaccctgctcgttgagcaaaataacttttacgcccgaggtgccaagatctatcccgatatacatatcgatcgttccttaaaaaaatgcccgtcggatttatttgctgcaaatgcaagatgtggcatttgtcagcagtcggatgagcgctgtctacgttaccagccacgaagggaaagagggctttaccgaattgacattacgtaccctggaaagtcgtacaccactactgcgctgccatcgagattcgtctggtttgtaacaggcaaggcccagagcacccaggcgagcgccctatcctatattgattcgctcctctatcatcaccttgatctatatgggcaaagactaggccatcttgatgatggcactgattcttggaatcatgtgcctactctcaacggacaatgtactttggtcttgatacatgagtatgtggatactagaggtccggagatcaagaccatcctggtgatctcctggtggaacatcctggtgtttcactaa

SEQ ID NO: 139795 - DNA, 1179 bp, Homo sapiens
tcaggctgaaaatcttctctcaatccgtctatcggtacctatcgtaatgctcgacgatatttccttcgcttcctgtattatcttgacgcccgccggtgtcgcacctttcaacggacgatttgccgtctctttcatggttacgccggtgattaaaccaaccaccgccactaccatcaggtaataggcaggcatcatcagattctgcgagctttcgaccagccaggccgccagcgttggcgtcagaccggcaaccagcaccgaaatattaaatgccgccgccagcgcgctgtaacggatatgcgtcgggaacatcgctggcaaggtagaagccataacgcccgtaaagcagttaaggatcaccgccagcatcagtaacccggcaaaaatcaggccgatgacgttactgttaatcagaataaacgccgggatcgccaacacaaacagggcaacactaccaagtagcacaaacggacgacggccaaaacggtcactcagcaagcccatcaccggctggacaaacagcataccgatcataatggcgataataatcagcaccccgtggtcttcggagtaatgcaggttatgcgacaaataactcggcatataggtcagcaacatgtagtaagtcacgttggtggcaattaccagaccaatacaaacgtattgctgttgaattgctgccaatgcgtcagtgctggcggtggcaaaaaccagtggagcaagtacactttcctggcccagaacccactctgccagttcgtgtgcataagcggccagagtttcaattgagaggcagcgtgccacatcaacttcacgggctggtgcaatttgacggtaatgtgctacctggcggttggtcatttgagagcatgaaccggagagcactacgccgcgcccagcgagcggacgccctgctttgcgagcctggttaccgttttcttgcgcccactgccgggccaggccaatcgccagaccagaaccgcccgttaccagtggggcatcgcgcaaggcttctccctgaatttccagatggtgttcggtcagcgcatcaagcaccgcgtagcggtagccctcttgctgtaagcgagccagctcttgacgaacggcatccacaccttgttcgaaaacatgtgccgaaacgacgccgcagcgccctgtggattgcgatgttttcctcat

SEQ ID NO: 139796 - DNA, 2312 bp, Homo sapiens
tacaacagcacggtatcgcctgtatttatatttcgcacaaactcaacgaagtcaaagcgatttccgatacgatttgcgttattcgcgacggacagcacattggtacgcgtgatgctgccggaatgagtgaagacgatattatcaccatgatggtcgggcgagagttaaccgcgctttaccctaatgaaccacataccaccggagatgaaatattacgtattgaacatctgacggcatggcatccggttaatcgtcatattaaacgagttaatgatgtctcgttttccctgaaacgtggcgaaatattgggtattgccggactcgttggtgccggacgtaccgagaccattcagtgcctgtttggtgtgtggcccggacaatgggaaggaaaaatttatattgatggcaaacaggtagatattcgtaactgtcagcaagccatcgcccaggggattgcgatggtccccgaagacagaaagcgcgacggcatcgttccggtaatggcggttggtaaaaatattaccctcgccgcactcaataaatttaccggtggcattagccagcttgatgacgcggcagagcaaaaatgtattttccagccaccacttctccagctccgcggcaaaggcctggcggtcacgttgtgaaaggctatctggtccgccggtctggatcccactggcacgtaaggtatccataaaatcgcgcatcgtcaggcgctcacgaatggtcgctggcgtgtaacgttcgccgcgcggattaagcgccgcagcgcctttctcgatggcttcagcagccaaaggtatatctgcggtgatcaccaaatcgcccgcttcacactgccggacaatttcgttatcggcaacgtcgaaacctgccgcgacgcgcagcgtacgaataaatcgcgatggcggcacgcgtaaactctggtttgctaccagtaccagcggcatctgcatacgttccgccgcgcgatacaaaatctctttaattacattgggacacgcgtcggcatccacccaaattgtcataaagtcatcctttgttgggtaatcctctattgtgtcgcgcttttgccttccggcatagttctgtttatgcttctttccctcagacaccgggcgatggtgtgttgcattaagttctgtgcctaccacacactgtccgtcgcgggtcatcataaatccggccatcgatcccagcgtttccgccagcgccgccgacgcgccgccatgtagtaaaccgaacggctgatgagtacgggtatcaaccggcatttcggcttccagcacatcatcgcccagacgggtatacacaattcccagatgcgccaccattgtgttatcgctggtggcgttcagttcgtcgagcgttaaatggcgtttccagatcatgcttatgcccccagcgttgagccgccatcgaccacaaatatcctgcttgaatgtcagcaagatggttcgcaagtgctgctgcgtgatgtcgctcgcgtcgaacttggggcggaagattattccaccgtggcacgctataacggcaaacctgctgccgggatcgccatcaaactggctgccggagcaaacgccctggataccggtggttattctcgggacgtttgcgatcttgtcggcggtcggtttcaccatcaacacgttgactatgttcgggatggtgctggcgatagggttactggtggatgacgccatcgtggtggtggagaacgtcgagcgtgtcattgcggaagataagcgccgaaggaagcgacgcataaatcgatggggcagatccaacgtgcgctggtcggtattgccgttgttctttccgcagtgtttatgccgatggccattgatagcgccttctgcgatatcacctaattgtgagcgggaaagctgggaagccacaccgctggtagctgaaatggcatcgcgtgcggcaacgatcgcataagaagctttcatttcagccagcgagtgacccaacgcgacgtggcccagttcatggcccagaacgccttcaatttcgttgtcattcatcatgtccatcaggccactgtagacacgaacacagccgttcgccatcgcccatgcgttgacgtcgctggtcatataaaccttatagttgaccggcgtgccattaatattgttacccaatgctttggcgatttttgccagacgtttaccgtacttgctggatttacttgcgacttgattgccgctgtccatttcggcacagccctgattggcaatcgcttttgcatcggcatcgcttaatgttgctgctttataggcatttaaaccggagctgatagccat

SEQ ID NO: 139797 - DNA, 6396 bp, Homo sapiens
atgaccatgttacagatagtcggcgcgctgatcctgctgatcgcaggatttgccattcttcgccttttgttcagagcattaatcagcacggcttctgcgctggcagggctcatattgctgtgtctgttcggcccggccttactggctggctatatcaccgaacgcataacccggttgttccatattcgctggctggcaggcgtatttctgacgattgccggaatgatcatcagcttcatgtggggacttgatggtaaacatatcgcgctggaggctcacacctttgactctgtgaaatttattctgaccaccgctctcgccggtggtctgctggctgttcccctgcagatcaaaaacattcagcagaacgggatcacaccagaagatatcagcaaggaaattaacgggtattactgctgtttttatactgcctttttccttatggcgtgttctgatcagaggcggctgagaggagcaatggataagagatacaaattcattcttgttggttttggggaagtctttgtattcaacctggaatccctggactctggaaagaaaatccacttgctcagaagatctcatgaagaggtcatggggtctgtgatgcgtacaggaaccattgataagggtatcctgccgtttattcaccatacccgcgggaatgaaattctctttattcctgcgctgtttattctgttttcacttggcggcgcggtatttggtatgggagaagaggccgtcgcctttgccattatcatcgcaccgctaatggtccggctgggctatgacagtattaccaccgtcctggtgacctatattgccacgcaaatcggttttgccagttcgtggatgaacccgttttgtgtggtcgttgctcaggggattgccggcgttccggtgctttctggctccgggttgcgcatcgtggtgtgggttatcgccactctgattggcctgatctttaccatggtgtacgcctcacgagtgaaaaagaatcctcttctgtcacgcgtgcatgagtccgaccgcttctttcgtgaaaagcaggctgatgttgaacaacgtccgtttacctttggtgactggctgaaattgcagccagttcttcacatgggtctggtgattggcatcatcggcgttggtttccgccttaacggcaatacgacagggtctgttccggatctgtgcatcggtgaaaccgaagctgaaaatgaagcgggcaaaactgaagaagtttgcgcacgtcagatcgacgcggtactgaaaactcagggtgctgcggcattcgaaggtgcggttatcgcttacgaacctgtatgggcaatcggtactggcaaatctgcaactccggctcaggcacaggctgttcacaaattcatccgtgaccacatcgctaaagttgacgctaacatcgctgaacaagtgatcattcagtacggcggctctgtaaacgcgtctaacgctgcagaactgtttgctcagccggatatcgacggcgcgctggttggtggtgcttctctgaaagctgacgccttcgcacatgatgccgatacgtggtttgggaatttcgtaaccgatcatctcctcgacttcacgtccggcacgttcaatcaggcggcgtgcttcatcaacttcatcgaggcttgtgaccatcggcaacagaatattcaggttgccccggcagttagcacgcagcatcgcccgcacctggatcaagaagatctccggctgatcgagcgtaatgcgaatcccacgccaacccaggcatggattctcttcgctgatcggcatgtaaggcagctgcttatctgctccgacatccagcgtacgaagacgcggatattcttgcagcagtaccgggttcgattggtcaagaattaccgcggtacgatccacgataagcggcctcgatgcagcccggagcttgaatatcgggccatcacgggcttccgcatagcgacaatcaggaatcgaaaaatgactaagcccatcgtttttagtggcgcacagccctcaggtgaattgaccattggtaactacatgggtgcgctgcgtcagtgggtaaacatgcaggatgactaccattgcatttactgtatcgttgaccaacacgcgatcaccgtgcgccaggatgcacagaagctgcgtaaagcgacgctggatacgctggccttgtatctggcttgtggtatcgatcctgagaaaagcaccatttttgttcagtcccacgtgccggaacatgcacagttaggctgggcactgaactgctatacctacttcggcgaactgagtcgcatgacgcagtttaaagataaatctgcgcgttatgccgagaacatcaacgctgttgtcggcgcctatgccggctaccaaggggcgccacagcgcgaggagctggccgaggtggatgtggactggctgatcgccgagcgccccggcaaggtaagaaccttgaaacagcatccacgcaagaacaaaacggccatcaacatcgaatacatgaaagccagcatccgggccagggtggagcacccatttcgcatcatcaagcgacagttcggcttcgtgaaagccagatacaaggggttgctgaaaaacgataaccaactggcgatgttattcacgctggccaacctgtttcgggcggaccaaatgatacaatcaccagaatgtaaagattacccgagcgtcattagcggttatttaggtaaaaactggggcatcctgttaggtgcgctctatttcgtaatgctggtgatttggatgttcgtctattccaccgccatcaccaacgatagtgcttcctacctgcataccttcggcgtgacggaagggttgctgtcagacagtcccttttatggtctggtactgatttgcattctggtggcgatctcctcacgcggcgagaaattgttattcaaaatttcgaccggcatggtgctgaccaagctgctggtggtcgcggcgctgggcgtgtcgatggtgggaatgtggcatctgtataacgtcggttcgctaccgccgctggggctgctggtgaaaaacgccattattacgctgccgtttaccctgacgtcgattctgtttatccagacgtcaaactcactttcagagcgcatccgctccagtgcgccagaaatattggcttcggaatcaatcaggaacaggccgctggaaaccaccttttcaccttccgccagaccagagcgtaatgcggtgacccttcgatgcctggaaaacagcaacggtgttcggtacacggatactgcctattttttagctcctcgtgcaagaaccctacaggcttgtctcgacgaggcgggcgataatctggctgcgcttcgtcatgcagttgagcagcaacagctgccgcaagtggcctggctggcggaacatctggcggcacaactggaagccatcgcgcgtgaagcctccgcctggtcattgcgcgagtgggacagtgcaccaccgaaaattgcccgctggcagcgtaaacgtattcagcatcaggattttgagcggcggctacgtgagatggttgccgaacgcagagcccgtctggcgcgggtgaccgatctcgtggaacagcaaacgctgcatcgtgaagtggaagcctatgaagcgcgcctggcacgctgccgccatgcgctggaaaaaatcgaaaacagcaatggagagaatatgtcactggaaaatgcccctgacgatgtcaaactggctgtcgatttgattgtgctgctggaggaaaatcagatccctgccagtaccgtgctgcgcgcgctggatattgtaaagcgtgattatgaaaagaaattaacgcgcgatgatgaggcggaaaacgtccagacgctctttttgcacgcgtgtcatgtacaggctctctacttccgcgatcacttatatcatgccggctcgtcccaggttgtaaagcgcaatggtggcaagggtctgctctttatcccacgggcagccgttttccggatcgcgcaggcgctgcataatagtgagcaaacggactcaggacaacagctggacgatgtccagcttgctcgctaccttttgtcgggtcaaaatcaacccaaatcagatcgcccatatcgggtacgtatcggcttaccattaccagacttccttatctttcggctctccccagtcgatattctcgtggaggttttcggcgggatgtctttgaccattcaacaagcagcccttcagatacaggcgatcaacaccggcattctgattgccaacggcgcagatatgaaacgctggctggcgaagctgaccaacaataatgctcagggcgaatactacatcaccgacattattgcgctggcgtatcaggaagggcgtgaaatcgtcgccgttcatccgcaacgtttaagcgaagtagaaggcgtgaataaccgcctgcaactctcccgtctggagcgtgtttatcagtccgaacaggctgaaaaactgctgttagcaggcgttatgctgcgcgatccagcgcgttttgatctgcgtggtacgctaactcacgggcgcgatgttgaaattgatactaacgttatcatcgagggcaacgtgactctcggtcatcgcgtgaaaattggcaccggttgcgtgattaaaaacagcgtgattggcgatgattgcgaaatcagtccgtataccgttgtggaagatgcgaatctggcagcggcctgtaccattggcccgtttgcccgtttgcgtcctggtgctgagttgctggaaggtaagtttattcacgttcatggaaccgtaatcgcgtgtttcatggtttgtcggcgtcatcgtcgcctttgcggcctacgccttattaaagaaacgtacaacagcagaaaaaacaggagagcaaaaaaccataggttaattagaacctttccacaacgttgcatcgccttcgacgcagaacaaaatggcggcactctgctggctaatggtggtttctttatcactaaggtcatgcagcgagaaggcaaaatcatccactggaatcgggaagtccagttctgcaccttgtttcaccggctgggtcaacaactggttagccggtttggcttcgaatttcacattggcaaccagttccggaatatcaatgtatttaggcgtcaagaccgcacgcagcacgttatcggagtttggcatcacttccagcgccacgcccttgaagtaaaacgtgcggtggtttcaacgaaacaagaacatcgcttccgcagggcgtacagagaccgcagacgtctgacgtccgacaagactgagtggtcgaagagtgctgatgccagaactcgcatatacgtaccgaggcgcaaggaacctagcgccttcgttacgtgtcgcgagaacacacgtcgcactaaacgcgacgtcctagacgacgtgagtgcgcgtcgtggggcggctacaactctacgggccgcaagaaccaagggtagacgcatggcaaggcacggtaactacgggctggcgcgtcattacgatccgtttatcgtcaacaccgtggtcggctttattgggccggagtatctctacaacgaccgccagattatccgtgctggcttagaagatcactttatgggcaagctgagcggcatctctatgggctgtgactgctgttataccaaccacgctgacgctgaccagaacctcaacgaaaacctgatgatcctgctcgccaccgcaggctgcaactacatcatggggatgccgctgggtgatgacatcatgctcaactaccagaccaccgcattccacgataccgccactgtgcgtcagttactcaacctgcgcccgtcaccggagtttgaacgctggctggaaagcatgggcattatggcaaacgaggcgcatgcacaaacaccagatacggcaacgaccgcgccttatctgctggctggagcccctactttcgatctctccatcagccagtttcgagaagactttaacagccagaatcccagcctgccactgaacgaatttcgtgccatcgacagcagtcccgacaaagccaatctcactcgtgctgcaagtaaaattaatgagaacttgtatgcttctacagcgctggagcgcggtaccttaaaaatcaaaagcattcaaatgacctggctacccatccaggggccagagcaaaaagccgcgaaagcgaaagctcaggaatacatggcagcggtgatccgcacactcaccccattaatgaccaaaacacaaagccagaaaaaactgcagtcgctactaacggcggggaaaaacaaacgttattacaccgagacagaaggtgcactgcgttatgttgtcgcggacaacggcgaaaaggggctgaccttcgctgttgaaccgattaagctggcgctatctgaatcgcttgaaggtttgaataaatga

SEQ ID NO: 139798 - DNA, 3496 bp, Homo sapiens
cacgattaccaatttgagacctgcggccccggggatctgtgagatggcgcaaggtttatcggccggcggtgaatataccggcgcgtcgatatttgttgcggaatactcccctgaccgtagacgtggctttatgggcagctggctggacttgaggtctattgccgagattgagctgggtgcgggcggggtggggttaatttcgaccattgtcggcgaagcgaacttcctcgattggggctggcgtattccgttctttatcgctctgccgttagggattatcgggctttacctgcgccatgcgctggaagatactccggcgttccagcagcatgtcgataaactggaacagggcgaccgtgaaggtttgcaggatggcccgaaagtctcgcttaaagagattgccactaaatactggcgcagcctgttgacatgtattggtctggtaattgccaccaacgtgacttactacatgttgctgacctatatgccgagttatttgtcgcataacctgcattactccgaagaccacggggcgctgattattatcgccattatgatcggtatgctgtttgtccagccggtgatgggcttgctgagtgaccgttttggccgtcgtccgtttgtgctacttggtagtgttgccctgtttgtgttggcgatcccggcgtttattctgattaacagtaacgtgatcggcctgaatttgttgccggcgatgttcccgacgcatatccgttacagcgcgctgctacttgaaatgaagaacattaccaaaaccttcggcagtgtgaaggcgattgataacgtctgcttgcggttgaatgctggcgaaatcgtctcactttgtggggaaaatgggtctggtaaatcaacgctgatgaaagtgctgtgtggtatttatccccatggctcctacgaaggcgaaattatttttgcgggagaagagattcaggcgagtcacatccgcgataccgaacgcaaaggtatcgccatcattcatcaggaattggccctggtgaaagaattgaccgtgctggaaaatatcttcctgggtaacgaaataacccacaatggcattatggattatgacctgatgacgctacgctgtcagaagctgctcgcacaggtcagtttatccatttcacctgatacccgcgttggcgatttagggcttgggcaacaacaactggttgaaattgccaaggcacttaataaacaggtgcgcttgttaattctcgatgaaccgacagcctcattaactgagcaggaaacgtcgattttactggatattattcgcgatctacaacagcacggtatcgcctgtatttatatttcgcacaaactcaacgaagtcaaagcgatttccgatacgatttgcgttattcgcgacggacagcacattggtactcctgatgctgcccgaatgagtgaagacgatattatcaccatgatggtcgggcgagagttaaccgcgctttaccctaatgaaccacataccaccggagatgaaatattacgtattgaacatctgacggcatggcatccggttaatcgtcatattaaacgagttaatgatgtctcgttttccctgaaacgtggcgaaatatggggtattgccggactcgttggtgcccggacgtaccgagaccattcaatgcctgacagaaagcgcgacggcatcgttccggtaatggcggttggtaaaaatattaccctcgccgcactcaataaatttaccggtggcattagccagcttgatgacgcggcagagcaaaaatgtattctggaatcaatccagcaactcaaagttaaaacgtcgtcccccgaccttgctattggacgtttgagcggcggcaatcagcaaaaagcgatcctcgctcgctgtctgttacttaacccgcgcattctcattcttgatgaacccaccaggggtatcgatattggcgcgaaatacgagatctacaaattaattaaccaactcgtccagcagggtattgccgttattgtcatctcttccgaattacctgaagtgctcggccttagcgatcgtgtactggtgatgcatgaagggaaactaaaagccaacctgataaatcataacctgactcaggagcaggtcttcgtgatgattgcagctatcatcgcaatcatgatggcaaacgtgagcaaaataagcaaaatcgcccgcggtcttatcgtgaaaaccgccctgctgctggaaaaactggaaggacagctcgctacgctgcgtcagcgttgtgccccggtgtcacagttcgccacgctaagtgctcgtttcgacaggcatctttttcagactcgtgcgacaacactacaggcttgtctcgacgaggcgggcgataatctggctgcgcttcgtcatgcagttgagcagcaacagctgccgcaagtggcctggctggcggaacatctggcggcacaactggaagccatcgcgcgtgaagcctccgcctggtcattgcgcgagtgggacagtgcaccaccgaaaattgcccgctggcagcgtaaacgtattcagcatcaggattttgagcggcggctacgtgagatggttgccgaacgcagagcccgtctggcgcgggtgaccgatctcgtggaacagcaaacgctgcatcgtgaagtggaagcctatgaagcgcgcctggcacgctgccgccatgcgctggaaaaaatcgaaaacagcaatggagagaatatgtcactggaaaatgcccctgacgatgtcaaactggctgtcgatttgattgtgctgctggaggaaaatcagatccctgccagtaccgtgctgcgcgcgctggatattgtaaagcgtgattatgacaagaaattaacgcgcgatgatgaggcggaaaaccttatcggcgcgatggatacgatggcactggcgctgaaaattgcagcgcgcatgattgaagatggcgagctggataaacgcatcgcgcagcgttattccggctggaatagcgaattgggccagcaaatcctgaaaggccaaatgtcactggcagatttagccaaatatgctcaggaacatcatttgtctccggtgcatcagagtggtcgccaggaacaactggaaaatctggacgttaaagcattgggtattgccggccaaatgcacggagcaaccttgctggatgctcaccaacgggtgttacgcccttataacgaacggaaatggaacccgagacgagaacgagacaggtcaaacgaacgggaacgacatggcaaacggtacggcgaccgcaaaggacaaggaaacgcgcgcatgattgaagatggcgagctggataaacgcatcgagcagccagaggggcggagggatagcgaagaggggcagcaaagccagaaaggccaaaagacaaaggcagaaatagccaaaaatgcgcaggaacaagataggactccggtgcatcagaaaggacggcaggaacagccggagaatccggaaaaccaagatcggggggacaaataa

SEQ ID NO: 139799 - DNA, 295 bp, Homo sapiens; identical to SEQ ID NO: 139253

SEQ ID NO: 139800 - DNA, 1080 bp, Homo sapiens; identical to SEQ ID NO: 139254

SEQ ID NO: 139801 - DNA, 1267 bp, Homo sapiens; identical to SEQ ID NO: 139255

SEQ ID NO: 139802 - DNA, 939 bp, Homo sapiens; identical to SEQ ID NO: 139256

SEQ ID NO: 139803 - DNA, 1764 bp, Homo sapiens; identical to SEQ ID NO: 139257

SEQ ID NO: 139804 - DNA, 1401 bp, Homo sapiens; identical to SEQ ID NO: 139258

SEQ ID NO: 139805 - DNA, 1215 bp, Homo sapiens; identical to SEQ ID NO: 118998

SEQ ID NO: 139806 - DNA, 4752 bp, Homo sapiens; identical to SEQ ID NO: 123337

SEQ ID NO: 139807 - DNA, 4653 bp, Homo sapiens; identical to SEQ ID NO: 139261

SEQ ID NO: 139808 - DNA, 720 bp, Homo sapiens; identical to SEQ ID NO: 123401

SEQ ID NO: 139809 - DNA, 912 bp, Homo sapiens; identical to SEQ ID NO: 139263

SEQ ID NO: 139810 - DNA, 1860 bp, Homo sapiens; identical to SEQ ID NO: 118995

SEQ ID NO: 139811 - DNA, 1180 bp, Homo sapiens; identical to SEQ ID NO: 139265

SEQ ID NO: 139812 - DNA, 591 bp, Homo sapiens; identical to SEQ ID NO: 139266

SEQ ID NO: 139813 - DNA, 3390 bp, Homo sapiens; identical to SEQ ID NO: 118996

SEQ ID NO: 139814 - DNA, 4247 bp, Homo sapiens; identical to SEQ ID NO: 139268

SEQ ID NO: 139815 - DNA, 4942 bp, Homo sapiens
atggtcatcttttttggccgggaaaatctgcctgctttaaaccagaacgatgtgctggtgtacgggcatacccattgccagggccgaaaaggggggggattttcacttaccccgctcgggggtattccaaggggggatccccttaagcaagactactcgcgtatgcttatcgatcacgtcgaaaaaggcgcacgttgcaccgttgcttgtatgccagtaccgattgaagaagcctccgcatttggcgttatggcggttgatgagaacgataaaattatcgaattcgttgaaaaacctgctaacccgccgtcaatgccgaacgatccgagcaaatctctggcgagtatgggtatctacgtctttgacgccgactatctgtatgaactgctggaagaagacgatcgcgatgagaactccagccacgactttggcaaagatttgattcccaagatcaccgaagccggtctggcctatgcgcacccgttcccgctctcttgcgtacaatccgacccggatgccgagccgtactggcgcgatgtgggtacgctggaagcttactggaaagcgaacctcgatctggcctctgtggtgccggaactggatatgtacgatcgcaattggccaattcgcacctacaatgaatcattaccgccagcgaaattcgtgcaggatcgctccggtagccacgggatgacccttaactcactggtttccgggcgtgggccgacgcttgagtgtgacatcgaccgcgtgcgcgccatccgtaaaagtcggctggtggaagtggcagaagggcagcctgcgcagggcgatttcccagcctgcctggtcgccaatgaaaattatcaccatttccgcgtggtgctggtgcgtaccgatccggcaaccgagcgtttgattttaaccgccgcacaactggatgccctcaaatgccacgccggggatcgcgttcgtctggtgcgcctatggtgcgattcgccaggtgatgcgccagtgccagttgttgatgattatcgcaaagtggtgcgtaaagacaccaaagggttgatcgctcgttggaagtatttctggatgtcggtcattgcgctgggtgtcgccttcgccctgtaccttgccggcaaagacacgcccgcaacgcagctggtggtcccattctttaaagatgtgatgccgcagctggggctgttctacattctgctggcttacttcgtcattgtgggtactggcaacgcggtaaacctgaccgatggtctcgacggcctggcaattatgccgaccgtatttgtcgccggtggttttgcgctggtggcgtgggcgaccggcaatatgaactttgccagctacttgcatataccgtatctgcgacacgccggggaactggttattgtctgtaccgcgatagtcggggcaggactgggcttcctgtggtttaacacctatccggcgcaggtctttatgggcgatgtaggttcgctggcgttaggtggtgcgttaggcattatcgccgtactgctacgtcaggaattcctgctggtgattatggggggcgtgttcgtggtagaaacgctttctgtcatcctgcaggtcggctcctttaaactgcgcggacaacgtattttccgcatggcaccgattcatcaccactatgaactgaaaggctggccggaaccgcgcgtcattgtgcgtgtctggattatttcgctgatgctggttctgattggtctggcaacgctgaagggtaaaaatgtcgtcattatcggcctgggcctcaccgggctttcctgcgtggactttttcctcgctcgcggtgtgacgccgcgcgttatggatacgcgtatgacaccgcctggcctggataaattacccgaagccgtagaacgccacacgggcagtctgaatgatgaatggctgatggcggcagatctgattgtcgccagtcccggtattgcactggcgcatccatccttaagcgctgccgctgatgccggaatcgaaatcgttggcgatatcgagctgttctgtcgcgaagcacaagcaccgattgtggcgattaccggttctaagggcaaaagcacggtcaccacgctagtgggtgaaatggcgaaagcgccgggggttaacgttggtgtgggtggcaatattggcctgcctgcgttgatgctactggatgatgagtgtgaactgtacgtgctggaactgtcgagcttccagctggaaaccacctccagcttacaggcggtagcagcgaccattctgaacgtgactgaagatcatatggatcgctatccgtttggtttacaacagtatcgtgcagcaaaactgcgcatttacgaaaacgcgaaagttacgtgtaagcgcctgcaatacacgggcggttgtacttttccccaccgcgacactgccagcaatactgataatgtaaggaatgcgttgcccgttggtaccaagaaactgttccagaactgcctgacggcgcagattcgagcttatatagaagttcagcaaacaccaaagccggaagataaagtcaaagcggtgaccgagctgaatcaacatgcgccgctggcgatggtcggtgacggtattaacgacgcgccagcgatgaaagctgccgccatcgggattgcaatgggtagcggcacagacgtggcgctggaaaccgccgacgcagcattaacccataaccacctgcgcggcctggtgcaaatgattgaactggcacgcgccactcacgccaatatccgccagaacatcactattgcgctggggctgaaagggatcttcctcgtcaccacgctgttagggatgaccgggttgtggctggcagtgctggcagatacgggggcgacggtgctgggaccgaagcacgtaccctgtcccaatcgtcgtgatgaagagaacatgccgggttcccgccgcgaagtgaaaaacgcgcgggaagaaggcgtagagttcaaattcaacgtccagccgctgggtattgaagtgaacggtaacggcaaagtcagcggcgtaaaaatggtgcgtaccgaaatgggcgaaccggacgccaaaggccgtcgccgcgcggagatcgttgcaggttccgaacatatcgttccggcagatgcggtgatcatggcgtttggtttccgtccacacaacatggaatggctggcaaaacacagcgtcgagctggattcacaaggccgcatcatcgccccggaaggcagcgacaacgccttccagaccagcaacccgaaaatctttgctggcggcgatatcgtccgtggttccgatctggtggtgaccgctattgccgaaggtcagctggagcaacaaggttttaccggcgatacggcgacaagttatgccgatcgtctgacaatgtcgaccgacaacagtatttaccaacttctccccgatgcggtggtatttccgcgttcaaccgcagatgtggcgctgatcgcccgtcttgccgcgcaggaacgctattcatcgctgatctttaccccccgcggcggcggcaccggcactaacggtcaggcgctcaaccaggggattattgttgatatgtcccgccatatgaaccgcatcatcgaaattaaccctgaagagggctgcatgacagctgcctgcgtgaagccatcagtttctcagtcaatggcccctcgccaagggctcttcgaggatctcccgtcatcacagtgccgtttattggcgcttaaacacgttctcctgaacctactaagggaccgttacgatgaccgccagtcagcattattcaccacgacaaatcccgcgctggccgcagatagacgaatctcgctggaaggagaaactcgcgaaatcacaagttacttcccgatgcagtttgttcgctacagcctgctgatccacgcggctgcgggtatctcgctgatccacgccatcctgatccataggtatatggcattttgggtgaaaggatcgattaaagggatgatcgaagggaagacacccacgccgttatccagtttcaggtcgttgccaaccatcgaaatctgctgcatggtttcgataccggaaccaatcaacgttgcgcctttcaccggcttcgttactttaccgttttcaatcagatatgcttctgaagtggagaaaacgaatttgccggagaacctgctgtacgatgtgtcacaggtggcgatcccgtttgataacgtcgacgacgagcaaattcaaaagccgcagcgttggaatccggcggatctggggcgctttatgatcttcttcggaccgatcagctcgatcttcgatattttgacgttttgcctgatgtggtgggtattccatgccaacacgccggaaacgcaaacgctgttccagtcgggatggtttgtggtgggcttactgtcgcaaacgctgattgtgcatatgatccgcacccgccgtgtgccgtttattcagagctgtgcatcgtggccgttaatgatcatgaccgtgatcgtgatgattgtcgggatcgcattgccgttttcaccgctggccagttatctgcaattacaggcgctgccgttaagctatttcccgtggctggttgcgattctggcaggcgttttcgtggtggccaccgatcatgcagcagaagccattaccggattcttcactaaatatggtgacgtcggtacggacattaatccgctgtatcgtctcaacaaacgtcagggtaaacagttactggcggcattagcttgcccggaacacctttataagaaagcgccaacggccgatctgcgcagatgatcgcccttctctgccagatgaagtggcactcggcgtgacctatgacaatatcgacgactatctggaagggaaaaacgtacctcaacaggtcgccagaacaatagagaactggtatctgaaaaccgaacataaacgccgtccgcccattaccgttttcgatgatttctggaaaaagtaa

SEQ ID NO: 139816 - DNA, 1450 bp, Homo sapiens
atgtgccatgtgcttttggcgggacgtcaacgccgcacagctggtccagagcacgcgctgactcctcctgagtgtgggagcgctgctatagggcctgcagtgtacaagtgggcgcacgctacaggtgtgatgatccccgataggcctcgcagtccgcatgccggcgctgaggaacgccattggcatcacccgcagccagagttgatcagtcagcgtttaggatctttctcatcaggccctactaaatatatacatgaattccaatatctaactctgtcctacaatttaacctggagtgacttaaatgtcatcctaacttttatcctcccactagatgaatgggaaagagttttttctctggcccaatctcacactgacaactgtcggctccacaagccagacctccaggaaggcattagagaagttccccaagaggatccccaatggaactatcaggaaaattccccaggtatagctaggcgagattacatgatttcctgcctagttgaagggcttaaaaaggcagcttacaaagctattaattatgacaagcttaaagaaactacccaaggtacagacaaaaacccagcccagtccatggcttgtttggcagcaaccatgagacactttgcagccctagaccctgaagcgctggcgcctcatcgtgatgtgaatcacggcatcaagctcacctgcaagaccatacgatcatcaatagacatatcacgtgagatacgtgcaccacgggagtgccgatcgactgagatggcttcttggcatcctcctgctgatctgactgagtgccctgtagaatctgggtattcggttctgtctgggcgcacagattgccagtattcgcacacagttcggcgagcgtgcctgacgaccattgactctcggcccgctgtgcgacagctgctaaaaataagagaggtccagctacttagtctgttgcgtggatgcgtgcgctctcgaagaagtggaagcattaatgcgcaatattgccgatgcctggaaagagtcgttactctccccttctttgattcaggacccagtctgatgaaccatgcaccgcatttatatttcgcctggcaacaactcgtcgaaaaaagccagctcatgttacgcctggcaacggaagaacaatgggacgaactcatcgccagcgaaatggcgtatgtgaatgcggtgcaggagattgcacatttgactgaagaggttgacccgtccaccacgatgcaggagcagctccgcccgatgctgcgcctgattctcgacaacgaaagcaaggtaaagcaggtattacaaattcggcagggatggactggcgaaactggtcgagcaacttcgtcatttgtccaagaagcatcatctcgatactgactccaccagctcctcactcccgggagtgaggacgccgtactccccaataagaggcggtgaagaatag

SEQ ID NO: 139817 - DNA, 1668 bp, Homo sapiens; identical to SEQ ID NO: 139717

SEQ ID NO: 139818 - DNA, 1764 bp, Homo sapiens
cagccccgatccctaaccgcgcgatcgcgtgtctacctcgagcgaaccgatccatgtgattccgaccgggcccgatcgatccggtggagccgatcaccacccgtccctgccgtaccgttcgcaatcggtgcacatttgatacgatcgcatcggccgcaagcgggcgactacaatcgcgacatccccagtgatcctaccaaccaggcggtcggtaaaacgcaggcccagtttcaacgctggtatcgccgccagattgtttctagagtatcaaagcggctcgcgccattttttcacgagcggggggggcgctgtcaggcttccgtttcagctttatcgcgtaaagcgccttcttccaaaggtgagggcgctcttcgctgagactgaaagcttcatttttcgtccatgatggcgttgtaaatctggaactgacttatttccttgtctaaggattaagataatctaagaaatacctgacaatataaaaagaattttcagcctggtaatttaccgcttcaggtctatatttgtgttgaatatattttgcgcggaagtattcatctaacggggctctctattttttagaatagagtgcatattttcaattaagacattcttagaggataaaaaggaatttactactatcagtgtcttaaataaagtaatcggttatatacggatgtggagtcgataaatgagattgaaggaatatatatgaaattaagatttatttcgtctgcgctggctgccgcactattcgccgctacgggtagttatgctgccgttgtagatggcggtacaattcactttgaaggcgaactggtgaatgctgcctgttcagtgaatactgactcggcagaccaggttgtcacactcggtcaatatcgtaccgatattttcaatgctgttggtaatacctctgcattaattccattcaccattcagttgaacgactgcgatcctgttgttgccgctaatgctgccgttgcattttctggtcaggctgatgcaatcaatgataatttattggccattgcatccagtaccaatacaacaacagcaacgggtgtcggtattgaaatacttgataatacatccgcaattctcaaacctgatgggaatagcttctcaaccaaccgagaacttgatccccgggacctaacgttcttcatggattggccttccgagcccggtgtgtatctacggcgaatctccgcgttccgcgaccgatctgctttgacccggggagttcatatcaggcaaacactattgggtctggaagatgcgctgactgccagcctgatgcttaatgcgttgttaattgtgggcgcgctgctgggattagttctgacgcacctgctggcacatcgcaaatttttgctgggaagttttttgctgctggcggcaacgctggtagtcatggcctgtttgccttccggcagttcattaacgctgctgctttttgttctcttcagcaccaccatttcggcagtcagtaatctggtgggcattttgcctgcggaaagttttcctactgacattcgctcgctgggcgtcggttttgccactgccatgagtcgacttggcgcggcgcgtttaaagccgaaccggatgccggaatgctggcggaaaaagagtggcaggcggcggctcagggtaaaagcggaccggatatttcgctactgcgaagtttactcggtgctgatgaacaggccgctgccgcgctgctgttggcgcagagaaaaaacggtacgccgatgtctttaa

SEQ ID NO: 139819 - DNA, 507 bp, Homo sapiens
atgtacgcctcctgcagagcatatatttcccgcaccacagttcgctatcggaatcaggatgaccatgagctacaaattacacacgggaacaagattctatgtggaattgtgtgctgtcatagattaaagcagagtgctggcctggagtctcccctcgcactgctgaacctccctggacgaagtgcagacggggaagccttcgctcatctgggtcatctctcaggctttgtgagtgatgctgccagcaaatatctgccccgccctcctctccccaactctgcaaccggggttgctggtcctataggcctggtgctgtactacaggcttaacagcatggacacacgctcggggaacaagatgaagatctgccttcaatatcaccgttatgattacaaggctggactggccgtcagagaagcacaacaggaccagaacatccctcaggtccactatattgatgacgccatgtcaatcagacctggtgagcaggaagtggaagatatctga

SEQ ID NO: 139820 - DNA, 1764 bp, Homo sapiens
atgctggcaggagttttcctgtcagagacccgaaatgacgccaactccgcgagggcgccacgctcgggcctatcccgacacttccaggaaattgcccgagggactgtcggtacaagtcgtcttacctttagcgacgaaaagatctgcgtaggtaccgagctgattgtaccgggttggggatctgaggtcgaagacatacagtctctctccatgtcaagttggaaacaggcccacagctctcagaggcacctgagtttaggccacaggaaatatgatcaactctgtactctggcagtttcacctgatattgagaatgggacccaaggttgtgatactgagggttcctgggcccaaggcgactctctggcacccaagaaggaatctgaaaagtggacgcggcttgcctatgcgcacccagttcgctatcggaatcaggatgacatgagctacaaattacacacgggaacaagattctatgtggaattgtgttgggtcttggggaccttcgaaatcgccgccgctctcacaatgcttgggtccagactgcgccacagcctctcgggagacgtgggccctcggacctttttagtgccggactccgggccgcaggcagtcccgcggcagcaggtcacagaacaaggctgctacgtggccacaattcatttacttatcctcaagaaatttaaccctgtttctttaatagatggtccattttcagaggaccatcaaagccttcacaatcgtaacctgagactaggtcttctggagatggtatcagagaaaaagtgccctaaacctcacagaaagagacaataccaagttcttctattacccacactgggtaaaacttcagggcttcgaaccttgggtccacatctcacaactcaaaggacctctccagactcctggaactacacacctgttggagactttaaggtatttgaccacagtctttctggagaatcctcaacagaacattcaggcaatgctgaactaggtgcttctgttagatggttagcagtgtcctacttctgccaagtttttggaaatggtgaaatagctaagcagcctgagaaggaaaacggagtggcaagagttcagcgatgctcaaatcaaccaacaacaagaggtgaggcaactattgcgggtattccaaaacaggatggtcatgaatacaccaaaaggtcactgaggatgcaccttcatgggcctgttaaccggctgtacttggaggcaactggagtgtcactccagaatgcatccatggcacttacggaaggtctcacttccggggtatcccaggatacatacagtatcctgcaccctcttgtgcaattactcatgacccccagggtcgtgtgtacccccttaccaggctccgtgtcctattcagctcctcagggcccagcacggaatgggccccgcgctgactcacccccactcgtggggcccggcgcgcgggggccgcatggctgccggcaggtgccccgaagccctcgtcgtttctatgcctgcaatctcgctctcctgctgggccaggaaggcggccgccggtcctcctccgccgcctccggggcaccgctctccgacgacgagaagaagcaaagtcatcagccattttccccgcgcctccgccggagcctccgctgcgtcggctctgcccgcgcctgccccgcgctgcgtccggcggccgcgacgcttcacccgagccgcggggagccggcgtcggcgctcgtgttctcccccatgtggtttccacgttaa

SEQ ID NO: 139821 - DNA, 1869 bp, Homo sapiens; identical to SEQ ID NO: 122354

SEQ ID NO: 139822 - DNA, 900 bp, Homo sapiens; identical to SEQ ID NO: 129977

SEQ ID NO: 139823 - DNA, 563 bp, Homo sapiens
tcaaggttcagaaaactgcgctgggtgaatggaatcttgactgcatatgccccacttgcaatccgagcgtggagggtgggtcgaccccccacgggccacagggggcctagccccggggggcgcggcaacaacttcgcactggacagcagcggtacagatcttcgaccgctggaaacatgcgtttgatctacctggaatcttaagtgtggaccgaaagcattgaaaaccgacagtgtgtagggtagccaatagattgatggctgtggattgcattctggctagcgtgcgtcctaagtggggtaagccctgtgccctcagccggaagcgactcaccacacaattccacatagaatcttgttcccgtgtgtaatttgtagctcatggtcatcctgattccgatagcgaactctgtagacagggcatagctgaacaaaaggcacagtaacttctgcagacttaaacgtccctgtgtgacagctctgaagacacagtggttctcccagcacggcatttgagctctgagaacggacagactgctcctcaagtgggtccctgacccccat

SEQ ID NO: 139824 - DNA, 667 bp, Homo sapiens
atgcagatccacctgagaatcactggaatgctctggacccagctggaatgcttccggaacccagtcaggcttctactgccatcgtatagcgccgattttgccggagaaacgtctcgctcgtatggtcgagaagacctggggtcttggactgcgaagaaggacgggattcagaaggcaaaacttggggggtggtaccgggacgttggtagaatgcacgtccgagaactcaaacgccttccaagagcagctttcgcaaacaaagaaggggtcaaaggcgggaaggtcattaaagtcttaggcgctagatcaggcgggaacgtacggaaaggatgcaggcatcaagagttacgtggaatagttttccgcaagtaccggccgcaaagaagcccagttcgctatcggaatcaggatgaccatgagctacaaattacacacgggaacaagattctatgtggaattgtgtgcatcattattggcaaccaccaacttcggtttcaaggcttgtccacttaaattccgggtagcaagcaattttccagcgtccaaaattgacacagttaacagtccattgcggcaaagctccttggatagacactgtggcagtagggttgaacaaactacggttgatatcgggacaaatatcgaggaacaaggagggtgttggtga

SEQ ID NO: 139825 - DNA, 1092 bp, Homo sapiens
ctatcctgctgtgatgctgtgtggtttctcagcaaaaaatggaggagcagctgttaccaaggtgtgcaccagcgagccgttttcggctggcatctgtgtgtagctgctgccactaccgagcgttgagtcaccgtgctgctctgtcagcaggctgagctggaacatgtctttccttttataaaccttttctcccatttcaaaactgccctctgacaccactcctcgaaaccggcgaacagcctgaagatccgaacagctgaggacatgggttctttgcttttcaagacgactgaactttctcatctgttcgacttgggctatctttttccacacaattccacatagaatcttgttcccgtgtgtaatttgtagctcatggtcatcctgattccgatagcgaactggggcaccatctaacattgggctatttattatgaagtcaataccctcccccggctgcgccgtttgcattgttgtattatcgtctttacagcccacaatgctcggtctagtttcaagtccccggcggcaggccaatttagcgtcagtgggtaccacggcatttaagggtcctccgtcaaccagcttcatggtgtcttccggctcgttacaggtaatgacgatagactcagcggcctctgcacccgcagaacgtaaaagatcgacctgcgtggcgtcgccgtaataaactttgtagccgtatttacgcatcaggttaacggcgctgatatcccgctccagcacggtaatgcgcattttatttgccatcagcaaacgaccaatcacctgaccaaaacgcccgaagcccacgacaatgacctggggtttatcatcgttgacccacggtttttcgtcttcttcttccggtccgttaaactggcgggatagccatttatccaccagcttcatcagcaacggcgtggtcatcatggaaagcgtcaccgtcaccagcaacaacgccatctggtcgcccagcagcagcgtcgcggcggtgaacacttcccgcacgccagaagctgcaataaagcggaataccggacgcagtaaatagcgcccaccaatcagcatgccgacaaacgccagcaccttcat

SEQ ID NO: 139826 - DNA, 2516 bp, Homo sapiens
atgagggtaaacaccttcgtccagcatcatatggaagaaacgcttaaagcgttccacgtcacaggccatcacatcctgatagcacgtcacggactcggcgtcggtaaagaaaataccgaacatgccgccaacgtggttaacgaccagcggaattccggcttcttctgccgcttccagcagaccttctgccagacgtgttgtcagctcatccagcgtttcgtgaacgcccggctgcgcgacttcattcagacaggcgaaacccgctgccatcgcaatcgggttaccggaaagcgtacccgcctgatagaccggacccgtcggggccagcgcatccattacatcacgacgaccaccgaatgcgcctaccggcattccaccgccgatgattttgccgaggcagctagcgctacgcggaaaccggtcatcacttcatcgatgatcagcaacgcgccaaattcgtcgcacagcgcgcgcagacctggcaggaactctggcagcggcggaacacagttcatattgcctgccaccggctcgacgataatacaggcaatctcttgcgggtattgctcaaatgcggcgcgtacagaagccagatctcttataagttaccggttaaagtatatttggagaaatctgcggaaagcccgggagttgggttggctaaaaaaacaacacagacggagaagcaacagggacaacaaaaagcagagaggcaagaacaagaaagaggaggaccacggagcggagcagaacagacagggcgagcaacggaagagacgagcaacgcgcgaagaaaaggaacgagcagaaacaccattagtttgttgttcactagtcattggagaacagatgattgatgtcttagggccggagaaacgcagacggcgtaccacacaggaaaagatcgcaattgttcagcagagctttgaaccggggatgacggtctccctcgttgcccggcaacatggtgtagcagccagccagttatttctctggcgtaagcaataccaggaaggaagtcttactgctgtcgccgccggagaacaggttgttcctgcctctgaacttgctgccgccatgaagcagattaaagaactccagcgcctgctcggcaagaaaacgatggaaaatgaactcctcaaagaagccgttgaatatggacgggcaaaaaagtggatagcgcacgcgcccttattgcccggggatggggaacgaaccgatgactggatggatggccgccgcagtcgtcacactgatgatacggatgtgcttctccgtatacaccatgttatcggagagctgccaacgtatggttatcgtcgggtatgggcgctgcttcgcagacaggcagaacttgatggtatgcctgcgatcaatgccaaacgtgtttaccggatcatgcgccagaatgcgctgttgcttgagcgaaaacctgctgtaccgccatcgaaacgggcacatacaggcagagtggccgtgaaagaaagcaatcagcgatggtgctctgacgggttcgagttctgctgtgataacggagagagactgcgtgtcacgttcgcgctggactgctgtgatcgtgaggcactgcactgggcggtcactaccggcggcttcaacagtgaaacagtacaaagcttcgcatgctgcagacagactccagtcctggcaggccctctgaatacagcaggaacaaaaaatttctggcggaaaaggtgttactgggtggtaattctcttctacagcctctggtggttggctccatgtgtatctgtgtggcccgtgtctgatctggtgcactcctgtgtgagagaggtagtgtggaagggtggcaagagcgtgtcctttggagacagacccaggctcaaatgggtggactggggtcagcagccccagtctttcggctacatacttgatcctttcagcgaaggtacttttggtctgggctttgcggagaggcagtacgcccatgatactcagtactttcttccagtcttggcccagttcgctatcggaatcaggatgaccatgagctacaaattacacacgggaacaagattctatgtggaattgtgtgtgacactgatcccatcgacatcctgcacgttcatgacaatatgcactgtggtcccgcacccatcatgtgtcccgtacgccagtcgccacccccaaatggcttgcgcattggccagcaatacacggtcttaaccaccatggccattagcgtattcataaaaagttctcaagtgagcctcctcatcttacagtatgcaaaaacgaatgagcaccagaacaacaaacagaccatccaaacacaggaaccgcaaacacaaccaacaacgcaagacctacaagcacgacgagaagcaaacacaagagaaaaaccaaacaacaagacagaaaagaacacgaaaagacacaagaccaaccaagaccaacgagcgccaaacgcacaaccatcagcaccacaagaaaaacatacaataaccaaacgaccatcaacctcagaacacaaataa

SEQ ID NO: 139827 - DNA, 1253 bp, Homo sapiens
ttcgctatcggaatcaggatgaccatgagctacaaatacacacgggaacaagattctatgtggaattgtgtggatttcgtgtaaacccgccttggctagccaccgatgtaacgcatgccgcaatggcgttgcttaccttggtgaccacgggtttacatatagtgggggagtgggggaagcatgcgacaccacctgtaccttacagcatttgcagtaacccgcctaggcgtgccgcgtatattacggtttggcgcaaccgcccctgcacgcttggcgatcacttgttcagtattgcttaccctcgtgggctgcgttatgatatgggggggggaggggagggaaccgcgtgggcaaatgttaggcaagcactcgcacggaccaccggacgagcacaacattggaccaaggataacgccaaaagctcacgagaagcccggcaccccagacagaacaaaacgaaaactcacctaggtaaacctgttttacgttgggtagaccgagttttgatcaaagcaaatatgacagcatcgtctggaacccaatcattattatccggtaccgaaaccgtcgacccaggtagggcagaaagttctgataaaattttgaactataccaacaccgaaatgaaagaagcgatagcgcacataccagcaaagaagggctgcaattctatgaagtggttcctgttgcattagtggttgcggggacgcaaatggctacaggcctccgtaccatggatactcgcctctattttgaaggtgagctgattgatgcagcgcctaataaaccggttatcaaagtcgttcgtcagggcgaagagccggactggccaagcaaaggtgatgcgggggacggagagaaagtacccagttcgctatcggaatcaggatgaccatgagctacaaattcacacgggaacaagattctatgtggaattgtgtggtgagtcgcttccgctgaggacacagagaagttgttcggggccgttgggcagagtacgatgcaacgagattgagcggtctgttgagcgcttctttgagtggaacaccccccgagtttggaaaataaaaatagaagagaaaaaacaagcagccaggtgttgtggttggtgtagggaagacagattgcgaattgagggagcagcagcggtacacacgcaccagcccgttttggataagcggattgacaggcggagcaaagagagaacaagagttgaatatcgttggcccactccgagggaatacggaaaatag

SEQ ID NO: 139828 - DNA, 285 bp, Homo sapiens
gcgttacttttagaacagcaggacggcaaaactctcgcatcagtacagactctggacgaaagtcgcctgccggagggcgatgtcacggtcgatgttcactggtcgagcctgaactatgaaagatgcgctggcgattaccgcaatgattatcggtactgccggttttaccgccatgctgtgtgtgatggcgctggaagatgccggtgttcgcccgaagacggggagattgtcgtgacgggtccagtggtggcgcggcagtaccccgtggcgctgctgcataagttg

SEQ ID NO: 139829 - DNA, 434 bp, Homo sapiens
agcttcagcagctttacacagcgtaccgccagtgtgatcatatcatcgaccagtacgcagtcacgacttgcaacgtcaccgatcttagcgatagcgcgggcacgcacaagccgccgatgtccggagaaaccacaattgggttatccagattcagctgcgcatgtcttccagcaggatcgggctaccaaatacgttatcaaccggaactcgaagaaaccctgaatctgttcagcgtgcagatccactgtcagcacacgtcaacaccgacgctggagaggaagtctgcaaccactttcgcagtgattgtacacgagcggaacggacgcgacggtcctggcgcgcatagccaaagtagggataacagcggtgatacgacctgcggaagcacgacgcagggcatcaacataacgactaattccatcaggttgtcgtta

SEQ ID NO: 139830 - DNA, 473 bp, Homo sapiens
tctgccatgttcgaacactaatcgaacccggctcaaagacccgctgcggcgggtttttttgtctgtaatatccatttgtatgacctatgcctccttcacctgccatttagttgacagatgatgcgctcacggatgaaacattattgtgaacaaaatattttcctcacatgtgatgcctttccgcgctctgatcgacgcttgctggaaagaaaaatatactgccgcacggtttacccgtgacctgattgccgggataaccgtcgggattattgctatcccgctggcgatggcgttggctattggtagtggtgtggcaccccagtacgggttatataccgcagctgttgcggggattgtcattgctctgacgggtgggtcacggctttatcgttttcggtcccaattgagcatttggggaaattctctattcccggtcggaccaggtttggactggggggactccgggttggggc

SEQ ID NO: 139831 - DNA, 809 bp, Homo sapiens
atcaaaaggtcccacggtccacgttttccccccccctcccccccaactgtgaatgcgctgtcacagcttcttatattatgtccgtaaggtcgtggggcgattacttctcccgttccaacagggcttacatgatgcatgccaccacctccccgctgtatgccatctgcgcatccaacgacgtggcggtgtcgatgatggacggcaacagcggcctgtcactgacacaggaagtgattgacgaagcggttgatttccgtcaggcgatggcgcggctatataaagagttcaccgctgacggtagctggttcttcaaaccgtggaacaaagaagtcgtcaccgacccacaaaccggcaaaacctatgactttgctgacgcaccaaccaaactgctgaccaccgttcaggactgctgggtaatgcatccgggcgaaagctggcacggcttcaaagatattccggataactggagtatgctcgacccgattaaaatcagcatccttgctccgggaatgggtgaagatggtgaactggaagaaaccggtgttccggcggcgctggtcactgcctggcttggtcgccacggcattgtacctacccgcaccactgacttccaaattatgttcctgttctctatgggcgtaacccgtgggaaatggggaactctggttaacaccctttgctccttcaaacgccactatgacgccaacacaccgctggcgcaggtgatgccggaacttgttgaacaatatcctgacacttacgcgaacatggggattcacgatctgggtgacccatgtttgcctggctga

SEQ ID NO: 139832 - DNA, 1509 bp, Homo sapiens
ttatcggtatggaatacgggtctgcgtattcttgatgcgatgatgcatccggtgccgccgggtgtggcgggtgatctctatctcactggcattcaactggcgcagggctatctcggaccgcgtatcatttgcgcagcacttttgccagcactttgtcgccaacggtgtcaatgccccagcccagacttgtttttccagaggacgggattcggcgaactcatcacgagggagaacacggctagcacctaaacttttcagatattcatgggtactttcgcgaccggaaacggcaacgacctgataacccaacttatgcagcagcgccacggcggtactgccgacgccaccactggcacccgtcacgacaatctccccgtcctgcgggcgaacaccggcatcttccagcgccatcacacacagcatggcggtaaaaccggcagtaccgataatcattgctttacgcgcgtccagcccttgcggcatggcaaccagccagtcacctttcactcgcgcctgctccgccagcccaccccagtggttttcaccaacgccccagccagtgagtaacacctcctgaccggcatgaaaacgcggatcttcgctggtgcgtacagttccggcaaaatcgatcccaggaatcatcggaaaattacggatgatttttcccttaccggtaatcgccagcgcatctttatagttcaggctcgaccagtgaacatcgaccgtgacatcgccctccggcaggcgactttcgtccagagtctgtactgatgcgagagttatgccgtcctgctgttctgtgaccggctctgctgccctcacggaaaccacaaaacactctttcagtcctgacatgggcaggatgggagctgattcaggcccagcactcagcttcctctcagtccgtgattgcgcaatcagcgcagcattggcttcgcgcagctgttcaaccagtgcctctttttgaatatattgtgcaatcagtccggcgaataactgtaaaacctgttccgcgcgttcactccactggcgcttctcactgctggcggcgcaaagcgtgccatagaatgatccatccggtaagtgaattggcgtgctcagaaatgtggtgatgccaagattgcgtgccgcaatacagtcaccccaacggtcggggacttcgtcgctgaaaaagcagttttcatcaatggcgcgtttgcataacgagtaatcccacgagacggtaaaattctccgggatgtacattttctggctgttacgggcaaacataatatgctgcaggcgcgcttcgacatccactttggtcaggtaggttgattccatatcagtgaccatttccagcatctccagaagctgtcggaccagactttccagtgactgttctttggcaagggattgcgagacgcgggcggtttgctttgttcttctggcctctgtactgttcccggggttttcttctgctctgtagtcctttcggcccgcgtgtttttcatgtgtttgattgtgcat

SEQ ID NO: 139833 - DNA, 1650 bp, Homo sapiens
atgattaaccgtctacagcacacagtatatactcataaatggaactcatatcgtaccgagcccgacagacgtcatacagccttgaggaatagtttctgcctggtgagattgaatgatagttctcattcacgaagcctggattctaagcagggacacacagaaattactttcgcagctacagagcatcccccctcccctgtatccttgcgcatccacgacgtggcgttcgatgatggacggcaaaccagccgggccccttgtttcaacctggaacaaccagggaagctggattgtacgaagcggttgatttccgactgctgggtaatgcatccgggcgaaagctggcacggcttcaaagatattccggataactggagtatgctcgacccgattaaaatcagcatccttgctccgggaatgggtgaagatggtgaactggaagaaaccggtgttccggcggcgctggtcactgcctggcttggtcgccacggcattgtacctacccgcaccactgacttccaaattatgttcctgttctctatgggcgtaacccgtgggaaatggggaactctggttaacaccctttgctccttcaaacgccactatgacgccaacacaccgctggcgcaggtgatgccggaacttgttgaacaatatcctgacacttacgcgaacatggggattcacgatctgggtgacaccatgtttgcctggctgaaagaaaactactctggcgcacggttgaacgaagcctattccgcctgccgtggcgaagtggctcatctggaacaaaccattgccgatacgttgggcccggtcggtactatgcgcgcgctacgtaccattccgcatctgtggcaaatttgcgaggacatgacggaagtctgccccgatgccaccatgctcaactatgttaacccaatggcgatgaatacctgggcgatgtatgcccgctatccgcatatcaaacaggtcgggctgtgccattcggtgcagggaacggcggaagagttggcgcgtgacctcaatatcgacccagctacgctgcgttaccgttgcgcaggtatcaaccatatggcgttttacctggagctggagcgcaaaaccgccgacggcagttatgtgaatctctacccggaactgctggcggcttatgaagcagggcaggcaccgaagccgaatattcatggcaatactcgctgccagaatattgtgcgctacgaaatgttcaaaaagctgggctatttcgtcacggaatcgtcagaacattttgctgagtacacaccgtggtttattaagccaggtcgtgaggatttgattgagcgttataaagtaccgctggatgagtacccgaaacgctgcgtcgagcagctggcgaactggcataaagagctggaggagtataaaaaagcctcccggattgatattaaaccgtcacgggaatatgccagcacaatcatgaacgctatctggactggcgagccgagtgtgatttacggcagcgtccggacatggatgaaattggaaatcatcattctcagtaaactatcgcaagaactaaaaacctacaccgcatattcagcagctgtcttgttccgcccatccaagccatatgtttttacccgtatgaaccttgataatttagtgtaa

SEQ ID NO: 139834 - DNA, 789 bp, Homo sapiens
atggtgatcccgatacccgaggtgaaactaaggtacggaaaccggaatatactcaatcaggcgacaaagcgtgccagacccatagaatcaaaaagatccccgacagcaaggtcgcaaccagcagtcctgccatccaaactgttgcgacacgggatagagaattaccacaaatgccgcagtcgaccggaaacgctaaagcgtgacccacccgtcagagcaatgacaatcccgcaacagctgcggtatataaaccgtactggggtgccacaccactaccaaagccaacgccatcgccagcgggatagcaataatcccgacggttatcccgcaatcagtgatttgatttcatcgctcagcgaatggtatcgcagacaacgacttcatcaattacagagttacgcaggttgtcgccgcgttgccagagaagatcgggtgagtcgcgtacgcaaatacacgttagcaccacgttctttcagagcttcagcagctttacacagcgtaccgcagtgtcgatcatatcatcgaccacagcttagcgatagcgcgggcaccacaacgccgccgatgtccggagaaaccacaattgggttatccagattcgctgcagcatgtcttccagcaggatcgggctaccaaatacgttatcaacggaacgtcgaagaaaccctgaatctgttcagcgtgcagatccactgtcacacacggtcacaccgacgctggagaggaagtctggaaccctttcgcagtattggtaccaagcggaaaggacgcaagggtctggggcgatag

SEQ ID NO: 139835 - DNA, 990 bp, Homo sapiens
atgccaccacctccccgctgtatgcatctgcgcatccaacgacgtggcggtgtcgatgatggacggcaacagcgcctgtcactgacacaggaagtgattgacgaagcggttgatttccgtcagcgatggcgcggctatataaagagttcaccgctgacgggtgaagatggtgaactggaagaaaccggtgttccggcggcgctggtcctgcctggcttggtcgccacggcattgtacctacccgcaccactgacttcaaattatgttcctgttctctatgggcgtaacccgtgggaaatggggaatctggttaacaccctttgctccttcaaacgccactatgacgccaacacacgctggcgcaggacgcatcgcggcaaatcagttatcccgtatccgccaggaatcccgatgctgctgtctggtgaaacttcggcgataaaaacagtccgcaaggtgccaattttaacaccacggtcgcacctcgagcacggtgcaaatttgtacacgacggacgcaaacacgttgaaggtacaatttgaacacgacgcacgcccctacgtgcacggtgccagtttgtacagacggacacacctacgtgaacggtgccaaaatgaacaccacggacgcgacacgtgcacggggccaaaaagtacaccacgcacgcacccacgtgcacgggccaaaatgtacacgccggacgcacccacgggcacggtgacaataggtggcgacgggcgcacccacgtgcatgcggcaaatttgtacactacggacgccccacgcgcacggcgccaatttgtacaccaagaacccacctacgtgcacctgccaatttggctacgacgcacgcaccctggtggacggagaaaatttgacacgacgcacgcagccacgtgcacggtgccaatttgtacaccacgcaccacctacgtacgcggtgctaatttggacaccacggtggcaccctacgaccgtgtgcacagatag

SEQ ID NO: 139836 - DNA, 3069 bp, Homo sapiens; identical to SEQ ID NO: 127300

SEQ ID NO: 139837 - DNA, 1284 bp, Homo sapiens
ttacgccccgccctgccactcatcgcagtactgttgtaattcattaagcattctgccgacatggaagccatcacaaacggcatgatgaacctgaatcgccagcggcatcagcaccttgtcgccttgcgtataatatttgcccatggtgaaaacgggggcgaagaagttgtccatattggccacgtttaaatcaaaactggtgaaactcacccagggattggctgagacgaaaaacatattctcaataaaccctttagggaaataggccaggttttcaccgtaacacgccacatcttgcgaatatatgtgtagaaactgccggaaatcgtcgtggtattcactccagagcgatgaaaacgtttcagtttgctcatggaaaacggtgtaacaagggtgaacactatcccatatcaccagctcaccgtctttcattgccatacggaactccggatgagcattcatcaggcgggcaagaatgtgaataaaggccggataaaacttgtgcttatttttctttacggtctttaaaaaggccgtaatatccagctgaacggtctggttataggtacattgagcaactgatgggggatccgcaccactgacttccaaattatgttcctgttctctatgggcgtaacccgtgggaaatggggaactctggttaacaccctttgctccttcaaacgccactatgacgccaacacaccgctggcgcaggtgatgccggaacttgttgaacaatatccgggcagatagttcaccggggtgagaaaaaagagcaacaactgatttaggcaatttggcggtgttgatacagcgggtaataatcttacgtgaaatattttccgcatcagccagcgcagaaatatttccagcaaattcattctgcaatcggcttgcataacgctgaccacgttcataagcacttgttgggcgataatcgttacccaatctggataatgcagccatctgctcatcatccagctcgccaaccagaacacgataatcactttcggtaagtgcagcagctttacgacggcgactcccatcggcaatttctatgacaccagatactcttcgaccgaacgccggtgtctgttgaccagtcagtagaaaagaagggatgagatcatccagtgcgtcctcagtaagcagctcctggtcacgttcattacctgaccatacccgagaggtcttctcaacactatcaccccggagcacttcaagagtaaacttcacatcccgaccacatacaggcaaagtaatggcattaccgcgagccat

SEQ ID NO: 139838 - DNA, 1329 bp, Homo sapiens
ctacagaagacgagaatcagtaggccgagtgaactgaagagatagactgagacctacaaacaggatccgacggttgaacaatccggatattaggtctacataaggacgggatctaattaagtagggttcgcccgaagagttgagtaccatcgacacaacgcgtttgttgccacgagcagcgaacagtgccgcttcgttcaccaggttcgccaggtcagcaccggagaaaccaggagtaccacgggcaatgattgccgcgtcgatatcgggtgccaatggtacgtcgctccatggtgatgacggaagcgcagaaagaatcgacggcgataaaccggcattcagcttccaggggcaccctgaagccagccctggtccacacgacgccgcgccgttgttcgaccactttatcgagttaattgagcagtaccgtaaaaccgctaagtaatcaggagtaaaagagccatgccaaaacgtacagatataaaaagtatcctgattctgggtgcgggcccgattgttatcggtcagcgtttgggctggcgcgacagtgatggagtcagactttgtggagttctcggaagccaggaaaatgtgtgtgaacttgatgaaaagggagaggaacggtggagcatatcgggtacatcgtctgagttcacccggtagaccacttatgccctggggagcacggatacgattgccacgagggattgcgggtacagtctgactgggccaacggactaaaacgatggatgccgtaagctcttcaaaggactctggaacccgtgggttttggaacgcaataacttttgtcacatgtttacatattcctctcccaaaatgcacactttcattatccgcgaagcgttcctcaacattacggtgaccaaagattcccccacccgctacagcgaagccggacaccctatcgccacttatcagttcccgcaaataatgcgcgtccagctgcggcagcgtgatctgcaagggggcttcgctgttcggcgcaacgtcgcgcagtttaatctgctgcgtcgcgagcgtttcaccttcggcgcgcacctctgcgtgcagggtgtagtcatcaagcgtggtaaaccacagtttattttcgactttcaactcgccgcgagtcagatcccgcgcgtggatttttaccggcgcgataacctgtttgtactctttcaggcccggtcccggcgtctgatcggaatagatcaaaccatcaaatggtttgataaggggaaatctgttttgtttggctctcattctctctctttgcctgctgccatccatgtaagatgtgacttgttcctgcttgccttctgccat

SEQ ID NO: 139839 - DNA, 798 bp, Homo sapiens
atgagcgacgcagaagacggtgcaaggacgaccctggggtcgggtaacgccgttgagcgtctggcagatgctttaagccagcaaaatgttaccgtgattaaatccacctccttggatgatggttttgccattctctcttcaaacgaagccattgactgcctgatgttcagctatcaaatggaacatccggacgaacatcaaaacgtcagacaattgatcggtaagcttcatgagcgccaactaaacgtgccggtcttcctgttgggcgatcgggaaaaagccctcgccgcaatggatcgcgacctgctggagcttgtcgatggaattcgcctggatatttggaagataccgccgactttatcgccggagcgcgccgttgccgcgatgacccgctaccgccagcagctgttgccgccactgttcagcgcgctgatgaaatatagtgacatccgagtgaatattcctgggcagcgccaggccaccagggcggcgttggttttgaccaaaacacccgccggacgtttctaccatgactactaccgtttgttgcgtgtcgcttgggttcttcataagacggagtgtagattaatcaactttcctgagacacctatttttggcaactcatttagatatgacattgaagtgtcgaatgaatcaccggatgaagaagtcaaactacgacgtcatcatttagccagatgtatgaagaattttaagacggatatctatttcgtttccacgtttgaaccgtcgacaaaatcggtcgatttgctcacggttgaaacttttgctggtacg

SEQ ID NO: 139840 - DNA, 1788 bp, Homo sapiens
ttatgcgccgaagcggtcggcatagtgttggcagccagggcaccagtaaaacgggcgagatgacagcgtggttttctcaatgatgctgccacaacgttcgcacggttcgccatctcgatgaaaaaccttaaagcgaaacagcgccccatgatgtttattctcatccacctgcccccgcgtagcgtaggaaaatcgaggaatctccagtaacgcgtgtgcgagtgcatccagttgcgccgcattgagatctttcgctttatgatttccagtcaacccaacctgccagaggatctccacccgcaaataattgccaagcccagccagaaacgcttgatcgagcagtaatccagcaaactgacggttacgaaagcgcggcgacagggaagtagatacaaatcgtctaggttcttctcctgatgtggtcgcatacatacaatattggtcagtataggagctagaccctgtttctgcgtacaatggcatatcatctgtgtggttggtgtcgatcgtttgtacgataccatgaccggcgtggcaatggtactgaaagagtatccgaaaacggcggttaacgtgattggttataccgacagcacgggtggtcacgacctgaacatgcgtctctcccagcaacgtgcggattccgttgccagcgcgttgatcacccagggcgtggacgccagccgcatccgtactcagggccttggcccggctaacccaatcgccagcaacagcaccgcagaaggtaaggcgcaaaaccgccgtgtagaaattaccgtttctaagggcgactgtgtaatcccagtcggcatcgaacttttcgctgacccagtagacatggggattctcagtcggagtgccatgcccaagcttgatcagctcgcgcgccaccaggcccgcaacagttggtgacttgcaataaatgatcgttgcgtcgacacatgcgtgcgcgatttcccccagcgctttgagcttggctttgtcgtcattcgctttgatgccgaacgtcttaacatctagcgcgacgcgaatgctgttaacgaacggtcccgtcaggtaaaactgcctggagaccttaagcagtttgcttaacgcaatgttgagctcgatgactcgttcgtcttgatgatcaatgtccccgcttttcagttgtcggaacgtagatacaggtctctcaagcttcaccccttgtgtcggtaggccggtgtcatagtcgcgtacaactggcgaatagccatcttgtggacgtggacgaaacgcccccatccagcgcggccgtgcatctttacgccacggacgcagactccattggtaactgcggaacggatcgcgaattttgtccatgtaatccaataaggcgtcatgcattttgctgcgaacgtcaactgcaccaacgatcagatcgttgttggagattgaacggaacacctgctccgcgccctcttcggaaagctgtaccagccctttgagcagctgtttttgcttcaccggatctttcaggcggatacgacggaacagttctggtgcgaagttcggaataccggtgaacttcatcatctcaccatgggtaaaggtgtcgccgatctgaatggtgctgtggttgtgcaggccgaggatatcgcccggatacgcttcttcaacgtgcgaacggtcacccgccataaaggtcagcgcgtcggagatcaccacatctttcgcagtgcgcacctggcgcagtttcatgcctttttcatatttaccggacaccacacgcataaacgccacgcggtcgcggtgtttcgggtccat

SEQ ID NO: 139841 - DNA, 4977 bp, Homo sapiens; identical to SEQ ID NO: 136654

SEQ ID NO: 139842 - DNA, 2001 bp, Homo sapiens
atgtcaaagccaaaatacccttttgaaaagcgccttgaagtcgtgaatcactacttcacaactgatgatggttacaggatcatctcggcacgttttggtgtcccccgaacccaggtcaggacatgggttgccctctatgaaaaacatggagaaaaaggtttaattcccaaacctaaaggcgttagtgctgatccagagttgcgtattaaggtcgtgaaagctgtgatcgagcagcacatgtcccttaatcaggctgctgctcactttatgcttgctggtagtggttctgtagccaggtggctgaaggtctatgaagagcgcggagaagctggtttacgcgcgctcaagattggcaccaaaagaaacattgcaatatcagttgatccagaaaaagcggcatcagcattggagctgtcaaaagaccgacgcattgaggatcttgaaaggcaagttcgatttcttgaaacgcggcttatgtatctaaaaaagctgaaagccttagctcatcccacgaaaaagctctcagcaagcctgacaagtatgcggacgttaaaaagcgtatttagtgagatttatcacgagaatagaggccgatacggataccgtagggtaacgctgtctcttcatcgagaagggaaacagattaaccataaagctgttcagcgcctgatgggaaccctctcacttaaagcagcgattaaggtcaagcgataccgctcttacagaggagaggtagggcaaaccgcccctaatgttctccaaagagatttcaaggctacgcggccaaacgagaagtgggttaccgatgttactgaatttgcagtcaatgggcgcaagctgtatttgtctccagtaatagatctcttcaacaacgaagttatttcttacagcctttcggaaagaccagtgatgaacatggttgagaatatgctcgatcaggcattcaaaaagcttaatcctcacgagcatcctgttctgcactctgaccagggatggcagtatcgtatgagaagatatcaaaatatccttaaagaacatggtattaaacaaagcatgtccagaaaaggcaattgtctggataatgctgtggtggagtgtttctttggaaccttaaagtcggagtgtttttatcttgatgagttcagtaatataagcgaactgaaggatgctgttacggaatatattgaatactacaacagcagaagaattagcctgaaattaaaaggtctgactccaattgaatatcggaatcagacctatatgcctcgtgttaactgtccactttttgatactctaaggattccggacatcggcggcgttgtgcgtgcccgcgctatcgctaagctgctgaacgataccgatatggcaatcatcgacaaacgtcgtccgcgtgcgaacgtttcacaggtgatgcatatcatcggtgacgttgcaggtcgtgactgcgtactggtcgatgatatgatcgacactggcggtacgctgtgtaaagctgctgaagctctgaaagaacgtggtgctaaacgtgtatttgcgtacgcgactcacccgatcttctctggcaacgcggcgaacaacctgcgtaactctgtaattgatgaagtcgttgtctgcgataccattccgctgagcgatgaaatcaaatcactgccgaacgtgcgtactctgaccctgtcagaaaaatatactgccgcacggtttacccgtgacctgattgccgggataaccgtcgggattattgctatcccgctggcgatggcgttggctattggtagtggtgtggcaccccagtacggtttatataccgcagctgttgcggggattgtcattgctctgacgggtgggtcacgctttagcgtttccggtccgactgcggcatttgtggtaattctctatcccgtgtcgcaacagtttggactggcaggactgctggttgcgaccttgctgctcggggatctttttgattctgatgggtctggcacgctttggtcgcctgattga

SEQ ID NO: 139843 - DNA, 3827 bp, Homo sapiens
cagatggtatagccaacacggttaggtccgtaacggttctggaacagacccagcaggcgacgttcgccaaagctcatgaatggcccgcaggtgacaaccatatcggcaaaccccggaatatatttcgcaatccgatcgtcaggatgcagtttgccttcgctcatcagcttttgcagggcgaagttcgtggcgtacattttggtgtttgaggccaggtcatacagcgtcccggtggtggctttgacaggctgttccatcaacacgctgccatcgtactttttcgccgctccccaggctttgcgatacacaatctgattatctttaatgatcagcaggtttacgctgggataaccgacatcaacttgctggctaatccagcgatccatctggttaagccgttcgacgttaaaccctgctttctctggcgagctttctgtcagaacagggtattttgcggcgctgacgctacaacaggctatcaggccgataaacaaaccgcccgccgcgccgcctaaacaggcggtaacaaacggcttcatgcggggcagggtgacaccgtaaatcagcggttcaccaacgcccagcaggccgggaataatcgccccgcgtacctgactgcgtagcgcactgtgcggtggcgcccgacagtagagtgccagcgccgcgcccacctggcccgcgcctgccatcgaacggatgggacataagctgttgaatacctggctgtccattaacgcgaggtaaaccggaattaaggcctgatgcaggccaataacacggcgatcaggaaaggccgttaaaaccgaaaacgaacctatatcgctgagattgattctgcaccctgcgcgtttattgtcggcttgccgaacatcaacgaggcgattgccgatctgaacggatcgctctttcccttcggctgggcaaaattgctgtggcgtttgaaagtcagcggtgtgcgaactgcgcgagtaccgctgatgggcgtgcgcgacgagtatcagttcagccgcatcggcccggtgattgcgcgccgagcgaatcaaatggtggccttccagctcgatatcgtggagattctttttcacggtccgcacatgatcgcgtgctgcgcgctgggcgacgtgcggcagccgctgcaacaccgcgttgtagatccgcgcatgctggcgatcgatctgctttttttgctgtggtcgatggtagagattatttacgctggcaaacactgaattaaacatcagatcggtcaatgattgcagcgtaaacaccagcacctgattgtgagaagcctgacaaatggcgagatggaaagcgtgatccaactgcgcatgttcgatcagcgaaatctctttgttgttctcactggcggcgagcattttttcataacagcgggttatcacaacaaaatcagcctgcgttcccagcgttgccgccagccttgccgattcgccctccagtaatgcgcgaacgtcgagcagatcgtacagcgttcgcggctgcgtactgaacagatggatcagcgggctggtgtcctgcacccgattaagccgtgcgacacgagaatcgcgaccctgcgccgtttcaataatcccgcgcccgcgcagcacggtcagcccttcacgcagtgcggagcgtgagaagccgagcttttcacacagtcgacgttccgagggaagcggctgaccgaccttcagtacgccgtcgataattaaccgttcgatactctctgcaaccacttcgcaaatagggcgacgttcatctttcattcccggacctcgtgcacagtggcttaaccccctggctgtacagagcggattttccacattaccgctggtgcccaaatacccccagcccaggccgagcgtaaaatcgaacggcccccaggctttgctggcaacaagatattccgcatcaaacagccccgtaccgccgatatcccgcgcaccaaccgccacttgcggcagccagtaactctcttcccacaaacgcagtttgagatcgaaggctttatctttatacgtttgatcgccagagaacgcttcgacgctgctgtactgccgggtgcgcacgtcggtgtagcgcagcgttgtttccagccacgggaagagttgcactgaagctgagtaataacggtactgatcgttatcgcgatagttcagactcaactccccttcccgtgccatacgcgcggtgggcgtttgtaataatcctacgccaccgaaatccgactgggcaaggggaaagatttggcagacagcgtctgccaaatctttgccgatgggaattctgcagacggtgtctgcggaattcccaatggtgttaattcgccagacattggcctggctggatgcgccataacaaatcatgcgaatgttgaacggttccagtacgccgaatacctctttgccaacgccgcaagcttttgacaggtcattgccaatgagcgcgaccagcgccagaccttcttccacctccacccgacacagtgcggaaagctccatcagcagagattgcgtcagcaacgtatcgccagtggaggttgaaccggtggtatcaagggttaatgccacgctcacttctgacgtggtgattaagtctaccgaaatattatgccgcgcgaggatgccgaaaacttccgcgaggaaaccgcgagaatgcagcatattcaggcagcgtaccacctgcgcgtgggtctttgctggatccgacaaagaccgggatatcgctgcgtactgcgggtagcaacgttgccggatgcagtacttttgcaccaaaagttgccatctctgccgcttagcaaacgcgatttcatcaatgcgttgtgccccggccaggcaaagatgttgtcgataatcatcgtcccgccaatcagttcgccgatatgcatccccacggcggtgatcatcggcagcgaggcattgcgcaggatgtggcgacgttcggtctgtttgtcgttcaggccgcgcagacgcgcccaggatgcatccgggcgaaagctggcacggcttcaaagatattccggataactggagtatgctcgacccgattaaaatcagcatccttgctccgggaatgggtgaagatggtgaactacccgcaccactgacttccaaattatgttcctgttctctatgggcgtaacccgtgggaaatggggaactctggttaacaccctttgctccttcaaacgccactatgacgccaacacaccgctggcgcaggtgatgccggaacttgttgaacaatatccagccttcgtcattaaccagtgaaaccagttgcccgttacgccagtaaccttctgccatactggcagcccgcagccacacttcattattaacgattttcacttcccgacccggcagcggcgaaccaacgtctgccaggccgtcggcttctttcgcacacaccgtggaggcaaactcggtcagaccatagccgcaaaagcaacgaatcccctgctcgcgcgcctgttccgtcaactcgaccgggatagccgcgccgccaagtaacaccgctttcagggaaacggaactacggttaaccagcaaacgccagagttgtgttggcaccagtgaagcgtgagtacagcctgccagcatttgctccaatggctgtttatcacgtaccgtcatccgcgcaccagcgtataaccagcgccacataattccctgaccggagacgtgaaacagcggtaaagagagcaaccaatcatcgtgatcgccaaacggaatcagcgataacacaccttgcgcactggcaagatgggcctgataagtatggacagcggctttcggcaaaccggtagaacccgaggtcaacgtcat

SEQ ID NO: 139844 - DNA, 1346 bp, Homo sapiens
gcctggctgccatgaacaggttagcagtttatcccgtcccgtctcgcttaaggcctgctgcaaacgtagtgattcgtcggcaggcacaacgtcatcgtcgaggccatgccacagcagtagaggtctgtcactaagttgttccaggtggtttgtcgcttcccactcgtggggtggcgagcggtaatccccagtgccgtcatcgcgcccatcgacgcgccaccgactgccagacgggtcatcaagcagccagttttcttcggctattgccgcacgtaaagtagtgaattcctgcatactttgtagcaagatttgccagaattgatttaaccgccgcgctgcgtcaccactaaaacggctaccgtgatcgggcgcatccggcatgatcacccgcaaaccagcctgcgccagcgcaacggcaaaatagctatacaccagactggatgaagtaaagccgtgataaaaaattacgcacggtaacggggtatctttttgcccgacaggataagcatgaagaacgggaatatctgccagctcgcgtgatttggaggtgcagagcaaaaagcgcagttttccagcattgaattggccggcagtgtattgctgcagtgccctcggtagcgcgccaaaatgcaagccaataccgtttctaagggcgactgtgtaatcccagtcggcatcgaactcttcgctgacccagtcgacatggggattctcagtcggagtgccatgcccaagcctgatcagctcgcgcgccaccaggcccgcaacagttggtgacttgcaataaatgatcgttgcgtcgacacatgcgtgcgcgatttcccccagcgctttgagcttggctttgtcgtcattcgctttgatgccgaacgtcttaacatctagcgcgactgtattgaagtcggtagaaacgaaagtatgcggatatccaagtttttcgagaccgcgaatgctgttaacgaacggtcccgtcaggtaaaactgcctggagaccttaagcagtttgcttaacgcaatgttgagctcgatgactcgttcgtcttgatgatcaatgtccccgcttttcagttgtcggaacgccaacttgtaaaactcgtcaatgacgaagagggcaatgttgacgatgtcctcacgctcgttcactcgcttctgaagtaacacataaaccggctgatcggaaaggcccacttgcgaactggggggtgaacccgatttcggcccccgaatcccttttcgatcggggacgggtttcccggtaaaaaccgcgtcggacaccccaacacaatcgtcatagccttatcgcagccatacgtcaaagcggctttgacccggctttcggccctccc

SEQ ID NO: 139845 - DNA, 4210 bp, Homo sapiens
agccgtgcagccgactctagaggatcgtttcacgtttgttctgttcgtgggctacgactctaatctactaaccgagcctgaaacgccggggttcgaggatgacctggagaaagaaacagcggtgctgttcgaaaaattcgcggctgacctcatcgaggattcgccgtttgcgaatctttgcatccacgtattcatttatccagccccgagtcttgagcggttaacccaattagttgatgagaaggtgagagaggtcgtatgacagagatctatgaacaggcgaaacatagcctgcagggtgaggacttctggatcgttcaattatctgtttgcggctaacaagctgttgtctaaccctgtttcgtatgacttgggacgggacttgatcgtgcgagctctcgattcgcgcgagcggttttccgagcacaccacaattttgaaaaatatggggagaaaatcaggtttgttcccgtatctcaaaaaggagttcaccagcctgacaccggatgacctgagggtgcttgagctataccggacgccattctcggatggttatgttttccactcaatgcaggtccacatattcgatctgctcaagtctggtcaaaacgtggtgctgagtgcacctacaagcatgggcaaaagtgcaatcgtcgattcattgctcggcatgggaactttgaaacggcttgttctggttgttccaaccgtggctctttgccgacgaaacccgtcgccgactggaagagcgatttcgtgaccgatatcagatcatccaccacagttcccaagtgtgccattccgatcaggctgtttatgtgttaactcaggagcgagtgaacgagcgtgacgacatcgtcgacattgacctcttcgtcattgacgagttttacaagttggcgttccgacaactgaaaagcggggacattgatcatcaagacgaacgagtcatcgagctcaacattgcgttaagcaaactgcttaaggtctccaggcagttttacctgacgggaccgttcgttaacagcattcgcggtctcgaaaaacttggatatccgcatactttcgtttctaccgacttcaatacagtcgcgctagatgttaagacgtcggcatcaaagcgaatgacgacaaagccaagctcaaagcgctgggggaaatcgcgcacatgtgtcgacgccgatcatatcaaaaacggtattggcttgcattttggcgcgctaccgagggcactgcagcaatacactgccgaccaattcaatgctggaaaactgcgctttttgctctgcacctccacgatcattgaaggagtcaacactatcgctaagaacgttgtgatctacgacaaccgcgcggggtctacacgaacgatatctgccgacatcattaattcggtaatttgtggccttaatacgctgaagtcattcgacacaaggtgggcgttacttttagaacagcaggacggcaaaactctcgcatcagtacagactctggacgaaagtcgcctgccggagggcgatgtcacggtcgatgttcactggtcgagcctgaactataaagatgcgctggcgataccggccgtacgcggtggtgatattttcatcatccagtccacttgtgcccctactaacgacaacctgatggaattagtcgttatggttgatgccctgcgtcgtgcttccgcaggtcgtatcaccgctgttatcccctactttggctatgcgcgccaggaccgtcgcgtccgttccgctcgtgtaccaatcactgcgaaagtggttgcagacttcctctccagcgtcggtgttgaccgtgtgctgacagtggatctgcacgctgaacagattcagggtttcttcgacgttccggttgataacgtatttggtagcccgatcctgctggaagacatgctgcagctgaatctggataacccaattgtggtttctccggacatcggcggcgttgtgcgtgcccgcgctatcgctaagctgctgaacgataccgatatggcaatcatcgacaaacgtcgtccgcgtggcgaacgtttcacaggtcgtgactgcgtactggtcgatgatatgatcgacacttgcggtacgctgtgtaaagctgctgaagctctgaaagaacgtggtgctaaacgtgtatttgcgtacgcgactcacccgatcttctctggcaacgcggcgaacaacctgcgtaactctgtaattgatgaagtcgttgtctgcgataccattccgctgagcgatgaaatcaaatcactgccgaacatgatgcgctcacggatgaaacattattgtgaacaaaatattttcctcacatgtgatgcctttccgcgctctgatcgacgcttgctggaattcagcgcgctgatgaaatatagtgaacatccatgaatatttcctgggcagcgccaggccaccagggcggcgttggttttaccaaaacacccgccggacgtttctaccatgactactatggtgaaaatctgttccgcaccgacatgggcatcgaacgaacttccactgcggtttctttgcttgaccattctggcgcatttggccaaagcgaaaaatatgccgcacgcgtatttggtgccgatcgctcctggtcggtagtcgtcggtacttccggctctaaccgcaccatcatgcaggcttgcatgaccgataacgatgtcgtggtcgttgaccgtaactgccataaatccatcgaacaaggtttgatgctgacaggcgcgaaaccggtctatatggtgccaagccgcaaccgctacggcattatcgggccaatctatccgcaggaaatgcaacctgaaaccttgcagaagaaaatcagtgaaagcccgctgaccaaagacaaagccgggcaaaacccgtcttactgcgtggtgaccaactgcacctatgacggcgtgtgttataacgctaaagaagcgcaggatctgctggaaaaaacctccgatcgtctgcactttgacgaagcctggtacggctatgcacgtttcaacccgatctatgccgatcactatgccatgcgcggcgaacctggcgatcacaacggtcctaccgttttcgccacccactccacccacaaactgctgaatgcgctgtcacaggcttcttatattcatgtacgtgaaggtcgtggggcgattaacttctcccgcttcaaccaggcctacatgatgcatgccaccacctccccgctgtatgccatctgcgcatccaacgacgtggcggtgtcgatgatggacggcaacagcggcctgtcactgacacaggaagtgattgacgaagcggttgatttccgtcaggcgatggcgcggctatataaagagttcaccgctgacggtagctggttcttcaaaccgtggaacaaagaagtcgtcaccgacccacaaaccggcaaaacctatgactttgctgacgcaccaaccaaactgctgaccaccgttcaggactgctgggtaatgcatccgggcgaaagctggcacggcttcaaagatattccggataactggagtatgctcgacccgattaaaatcagcatccttgctccgggaatgggtgaagatggtgaactggaagaaaccggtgttccggcggcgctggtcactgcctggcttggtcgccacggcattgtacctacccgcaccactgacttccaaattatgttcctgttctctatgggcgtaacccgtgggaaatggggaagttgcgggggcgctcgctgcctgtcggccactgtcgagaatgctggaatggagccgcgcatttctttccacggttctgggacccgcctcgtgcgctacgccattcccccatccagaagtcctcggaccgatatttcggtattcggcatcgttctcgttcatcagctgctggcgctggcgagcggtgcgaagactgtccaaatgaaatttggtcaccacggcggcaaccatccggttaaagatgtggagaaaaacgtggtaatgatcaccgcccagaaccacggttttgcggtggacgaagcaacattacctgcaaacctgcgtgtcacgcataaatccctgttcgacggtacgttacagggcattcatcgcaccgataaaccggcattcagcttccaggggcaccctgaagccagcactggtccacacgacgccgcgccgttgttcgaccacgttatcgagttaattgagcagtaccgtaaaaccgctaagtaa

SEQ ID NO: 139846 - DNA, 896 bp, Homo sapiens
atggagccagctgcaggagcttttttcagactccagtggttcctggaactccagcaagacagaccaacaatccgcttccctggaaaagggccatggagccagcagtctcactcagagggtcccactcccatggagcccagcaagcatgaccgggatgtgagacatggagtcaaaggagattattttggaactttaaagtttaatgactgtcctagtgcattttggacttgcatggggcctgtagccctttcattttggccaatttctcccatttggtataggggtatttatccaactcctgtacttccattgaatgtaggaaataacaatactgcagctggtcgtctgtgggatatgagcgccggtcagcttaaacgtggcgactatcagttgattgtgaaatacggtgaatttcttaacgaacagccggaactgaaacgcctggcagagcagctggggcgttctcgggaagccaaatcaataccgcgcaacgatgcgcagatggaaaccttccgcaccatggtgcgcgaaccggcgacggttcctgagcaggttgatggtctgcaacaaagcgatgatattttacgtctcctgccgccagaactggcgacactagggataacggaactggagtatgagttttaccgtcggctggtggaaaaacagttgctcacctatcgcctgcacggtgagtcgtggcgtgaaaaagtgatcgaacgtccggtggtacataaagattacgatgaacagccgcgcgggccgtttattgtctgtgtggatacttccggctcaatgggcggctttaatgaacagtgtgcgaaagcgttctgcctggccttgatgcgcattgctctcgcagaaaaccggcgctgctatattatgctattttccaccga

SEQ ID NO: 139847 - DNA, 721 bp, Homo sapiens
atgggttttatgcagccagagccagaaaacgaggagacatatcaggaagataatcagcggaacggggagtcccagcacatccaggttagcgaaatctgtaaacgccatcgggaatccaccaataccttcgtaccccgtcgctccagccataccggaaagcagcagagcgctttcggcaaacagatacagcgtgccaagcgtaatcaccagcgggacgctggcggcgataaattattacagcagagaagggacgctctcgcgaacagcagctggccatactccacactgaacctggccgatatgcggcagttgcagcagcagcatagtcaaacgagactggccgataccgccgccgatggtctgcggcatttcaccgcgcagcagcgcctgatgccactccagctccaggcgatcttcgtcaccggtcagcgccagttgatgcttcagcgtgtcggctatcatacacggatccccatggaggaaagctcaaacgcatcttccagtaccgggttccacaccagaatatcgccgttcagacccgcatggcccagctctgacggggtgctccagtcatcataatccggtgcgcgcacgtcgtgggatgaccatcgctcagcttgccgccaatcccgacaaggaataccgcgccagatctttcgctatcgcccgctcacgccctttggcatcaagatccggatacgagacagtaactcctggctgt

SEQ ID NO: 139848 - DNA, 1117 bp, Homo sapiens
atgctggaagcggcagtttgtctgtgcgtgttcgtgtcgtgctcactggctgaaggacgcgcgtgctgccgcgttgctgtaagcataccagtatctgtgcgggcaagaattcatttgctggagtctgaccacttggggcgttttcgggaacccaaatcaataccgcgcaaagatgcgcagatggacaccttccgcaccatggtgcgcgaaccggcgacgtttcttgaccaggttgatggtctgcaacaaagcgatgatattttacgtctcctgccgccagaactggcgacactagggataacggaactggagtatgagttttaccgtcggctggtggaaaaacagttgctcacctatcgcctgcacggtgagtcgtggcgtgaaaaagtgatcgaacgtccggtggtacataaagattacgatgaacagccgcgcgggccgtttattgtctgtgtggatacttccggctcaatgggcggctttaatgaacagtgtgcgaaagcgttctgcctggccttgatgctcattgctatcgcaaataagtggcgttgctactattatgttatcatctcaccgagatcgtccgttatgagctttcaggcccacaaggcatcgaacaagcaatccgttttttaagccagcagtttcgtggcggcaccgatcttgccagttgttttcgcgccattatggaacgcttgcaaagcagggaatggtttgatgccgatgcggtggtgatttctgattttatcgctcagcggttgcctgacgacgtgacgagtaaagtgaaagagctgcagcgggtacatcagcatcgctttcatgccgtggcgatgtcggcacacggcaaacccggcatcatgcgcattttcgatcatatctggcgctttgataccgggatgcgaagccgcctgctcagacgctggcggcgataaattattacagcagagaagggacgctctcgcgaacagcagctggccatactccacactgaacctggccgatatgcggcagttgcagcagcagcatagtcaaacgagactggccgataccgccgccgatggtcttgcgggatttcaccgcgcaacaacgcctgatgccactccagcttcaggcgatc

SEQ ID NO: 139849 - DNA, 1108 bp, Homo sapiens
catacgccatcactgtgatgctgagctagcatctcaaggtaccagtgaagagcagaggacctggaagggtgctgagccagggatggagggctgggagcatctcaaagggtggaccctagcagtaagggaaggggcacctagagtaagtaagaacctcggccaatgcaaggccaaatggagactcccagagaagagtctaggagctccccagcagctaggcctttccgagcgtgaacaggtactggaaatcgtcgccgaagaggcgaaaggtaagattaaactcatcgcccacgtcggttgcgtcagcaccgccgaaagccaacaacttgcggcatcggctaaacgttatggcttcgatgccgtctccgccgtcacgccgttctactatcctttcagctttgaagaacactgcgatcactatcgggcaattattgattcggcggatggtttgccgatggtggtgtacaacattccagccctgagtggggtaaaactgaccctggatcagatcaacacacttgttacattgcctggcgtaggtgcgctgaaacagacctctggcgatctctatcagatggagcagatccgtcgtgaacatcctgatcttgtgctctataacggttacgacgaaatcttcgcctctggtctgctggcgggcgctgatggtggtatcggcagtacctacaacatcatgggctggcgctatcaggggatcgttaaggcgctgaaagaaggcgatatccagaccgcgcagaaactgcaaactgaatgcaataaagtcattgatttactgatcaaaacgggcgtattccgcggcctgaaaactgtcctccattatatggatgtcgtttctgtgccgctgtgccgcaaaccgtttggaccggtagatgaaaaatatctgccagaactgaaggcgctggcccagcaattgatgcaagaacgcgggttgagttgtttccctcgatcgcccttaccgggtgaggggaataaacgctctgtacctacatttcatacaaagcggttgggcttcccaccgggggacaccaagaggttctaccgagaatctgcggttgttcttccacggcaaggtggcattctcggcgcgtga

SEQ ID NO: 139850 - DNA, 750 bp, Homo sapiens
atgctgaaagaatacgcaggtttgagcgtcaatctggttaccggaattccagcccccgacctgattgccgacggtctggatgtggtgatccgcgtcggcgcgttgcaggattccagcctgttttcccgccgtctgggcgcgatgccaatggtggtcgtgcggcccgacaatgaatttgaactgatcgcaccggaagggatctcgactcgcctgatcccacaaggaagatttgtgactaatgatccgatgacgctggtgcgctggctgacggcgggtgccgggatcgcctacgtgccgctgatgtgggtgatcaacgagatcaatcgtggggagctggagatcctgctgccgcgttaccagtcagatccacgcccggtttatgcgttatataccgaaaaagataagctgccgctgaaggtacaggtcgtgatcaactcgctgacggattattttgttgaggtcggggcgaggggaccgttcgtgcacgtagaaagattaattatccttctgaaaatagtgaaattattacgcagtaccgccaacagtcaggttatcgactttcaacgttggctggcccacgccaaccggcaaactttgcccttctttaccgcagacacccacgccgttatccagtttcaggtcgttgccaaccatcgaaatctgctgcatggtttcgataccggaaccaatcaacgttgcgcctttcaccggcttcgttactttaccgttttcaatcagatatgcttctga

SEQ ID NO: 139851 - DNA, 1742 bp, Homo sapiens
taaatcacttttaagtcagagtgaataatggaacgactaaaacgcatgtcggtgtttgccaaagtagttgaatttggctcttttaccgccgccgccagacagctacagatgagcgtttcgtccatcagtcagacggtatcaaaactggaagatgagttgcaggtaaagctgttaaaccgtagcacacgcagcattggcctgaccgaagccggtagaatttactaccagggctgccgtcgtatgcttcatgaagtgcaggatgttcaatgagcacctgtatgccttaaataacacccccatcgggacgttacgcattggctgttcttcaactatggcacaaaatgttctcgccgggctgacagccaaaatgctgaaagaatacccaggtttgagcgtcaatctggttaccggaattccagcccccgacctgattgccgacggtctggatgtggtgatccgcgtcggcgcgttgcaggattccagcctgttttcccgccgtctgggcgcgatgccaatggtggtgtgcgccgcgaaaagctatctcacacaatacggcataccggaaaaacccgccgatttgagtagtcattcatggcttgaatacagcgtgcggaccgacaatgaatttgaactgtatcgcaccggaagggatctcgactcgcctgatcccacaaggaagatttgtgactaatgatccgatgacgctggtgcgctggctgacggcgggtgccgggatcgcctacgtgccgctgatgtgggtgatcaacgagatcaatcgtggggagctggagatcctgctgccgcgttaccagtcagatccacgcccggtttatgcgttatataccgaaaaagataagctgccgctgaaggtacaggtcgtgatcaactcgctgacggattattttgttgagacacccacgccgctatccagtctcacgtcgttgccaaccatcgaaatctgctgcatggtctcgatacccggaaccaatcaacgtctgcgccctttcaccggcttcgccactcaccgtctccaatcagatctgcttctgcaagtcatgacgatatccagagggagattttcacgtagcgcaagattcaacggaccgacaccatcaggtagacgactcattcgcgtcattatttcgacagagagcggttcacggtcgagcaaccccagaacaacaggctgctttgaagaacactgcgatcactatcgggcaattattgattcggcggatggtttgccgatggtggtgtacaacattccagccctgagtggggtaaaactgaccctggatcagatcaacacacttgttacattgcctggcgtaggtgcgctgaaacagacctctggcgatctctatcagatggagcagatccgtcgtgaacatcctgatcttgtgctctataacggttacgacgaaatcttcgcctctggtctgctggcgggcgctgatggtggtatcggcagtacctacaacatcatgggctggcgctatcaggggatcgttaaggcgctgaaagaaggcgatatccagaccgcgcagaaactgcaaactgaatgcaataaagtcattgatttactgatcaaaacgggcgtattccgcggcctgaaaactgtcctccattatatggatgtcgtttctgtgccgctgtgccgcaaaccgtttggaccggtagatgaaaaatatctgccagaactgaaggcgctggcccagcagttgatgcaagagcgcgggtga

SEQ ID NO: 139852 - DNA, 1008 bp, Homo sapiens
atgatcatcggaaatattcataatcttcagccgtggctaccccaggagttacgccaggcgattgagcatatcaaagcacacgttacggcagacacgccacagggcagcctcaatcgaagcccgtccggctactggaagccgctgcgcgatcagatctttttcatcgccgtcgaacagcagttgccgctgaacggccaaaatggcgcatccgataccatgctgcgcgccagcgcctcattctttaatggcggcaaatacagcgacgaatggcacccgaacggttcaggctggtttgcccaaaacctgtacctcgatgcggcgcaatatatccgccaggatattcaggcgtggacggcagattatcgcgtcagctggcatcagaaggtagctaacggacagactattgagccttacgctcacgttcaggacaacggctatcgtgataaaggcactcagggcgcgcagcttggcggagtcggggtccgctggaatatctggaccggcgagacgcactacgacgcctggccgcacaaatcaataaaaatcatccagaagaagaggttacgtagcggaaaacgaaaccagacaatggcaaatgccgagagcatcgagacggtaattttgccgagcgtaatgctgaacgccatcacaaagctgttaagcaacatgccgcagatccgcgtgattgtggatgaagagctggagagcgtgtggaccgagtctcgctctgatagcgttgtcgatcccgttgccgcgattgaaaatgctgagatcgtgattgtcggcggcgggaatactttccagttgctgaaacagtgccgcgagcgcgggctgctggcaccaattactgacgtggttaaacgtggcgctctgtatattggctggagcgcaggcgctaaccttgcttgcccaactattcgtaccaccaacgatatgccgattgtcgatccgcaaggtttcgatgcgctaaatctgttcccgctgcaaatcaacccgcatgctcattaa

SEQ ID NO: 139853 - DNA, 2583 bp, Homo sapiens
atggagatggtcgccgcttccaaaatgcgtaaatcgcaggatcgcatggcggccagccgtccttatgcagaaaccatgcgcaaagtgattggtcaccttgcacacggtaatctggaatataagcacccttacctggaagaccgcgacgttaaacgcgtgggctacctggtggtgtcgaccgaccgtggtttgtgcggtggtttgaacattaacctgttcaaaaaactgctggcggaaatgaagacctggaccgacaaaggcgttcaatgcgacctcgcaatgatcggctcgaaaggcgtgtcgttcttcaactccgtgggcggcaatgttgttgcccaggtcaccggcatgggggataacccttccctgtccgaactgatcggtccggtaaaagtgatgttgcaggcctacgacgaaggccgtctggacaagctttacattgtcagcaacaaatttattaacaccatgtctcaggttccgaccatcagccagctgctgccgttaccggcatcagatgatgatgatctgaaacataaatcctgggattacctgtacgaacccgatccgaaggcgttgctggagcagtgcagctgcatgcttaggtcaccggcatgggggataaccagtacagatacaactcgagctcgtaccgacttggcatgtcccatctggcttcttttagatccctaccccaagcttatgggtaatgcgccaaaagcgctggcgtctgtcgataaacgtggtgtaccagtaaataccattctggtgtctgcactggtaacggcgttgtgcgtactgattaactaccttgccccagagtccgctttcggactgttaatggcgctggtggtatctgcactggtaatcaactgggcgatgattagcctggcgcatatgaaattccgtcgcgccaagcaggaacaaggcgtggtaactcgcttccctgctctgctttatccgctgggtaactggatctgcctgctgtttatggcggcggtactggtgattatgctgatgaccccaggaatggcgatttcggtatacctgatcccgcccttacaaaccaacaccttcaactccacgaccattgcgatggcggattaccagatggaatccctgtcggcggaaatcaactttgcggcggcgaaactggcgcgagcttgtgctgacgagtggaccgcgcgcacgccagagaaaccgcgctacgttgccggtgttctcggcccgaccaaccgcacggcgtctatttctccggacgtcaacgatccggcatttcgtaatatcacttttgacgggctggtggcggcttatcgagagtccaccaaagcgctggtggaaggtggcgcggatctgatcctgattgaaaccgttttcgacacccttaacgccaaagcggcggtatttgcggtgaaaacggagtttgaagcgctgggcgttgagctgccgattatgatctccggcaccatcaccgacgcctccgggcgcacgctctccgggcagaccaccgaagcattttacaactcattgcgccacgccgaagctctgacctttggcctgaactgtgcgctggggcccgatgaactgcgccagtacgtgcaggagctgtcacggattgcggaatgctacgtcaccgcgcacccgaacgccgggctacccaacgcctttggtgagtacgatctcgacgccgacacgatggcaaaacagatacgtgaatgggcgcaagcgggttttctcaatatcgtccgcggctgctgtggcaccacgccacaacatattgcggagatgagtcctggccgtaaaaggttaacgcgcgcagaatcgagctcggtaccctcgacgctgccgggtaaagcctggctggaacatgcactgccgctaattgctgaacagttgcaggtcgccgctcagcggtgtttattccctttcgctggcgtaacgcagacctgggatgattacacagcgaaaacggctgcggttctcgctccgctgggtgtttctgtcaccggtattcatagcgttgtcgatcccgttgccgcgattgaaaatgctgagatcgtgattgtcggcggggggaatactttccagttggctgaaacagtggccgcgaagcgcgggctggtggcaccaattactggacgtgggcggcaggggctaaacttggttggccaaatattcgtaccaacaacgatatgccgattgtcgatccgcaagggtttcgatggcgctaaatctgttcccgctggcaaatcaacccggcacttcaccaacgcgctggcggaagggcataaaggtgaaacccgtgagcagcggtattcgcgaactggtggtcgtcgcgcccgaactgacgattattggtctaccggaaggttactggatcacggaaaaacattaaccgtaaaaggtaattatgtctataatggtcatttacgcaccgtattagtgatgaaatcggacggagatagtagtatacttcgggttcctagctatgtgaaaaatgctggaggaagcggcgcggccacgctaaacgggatcgaactcataactgtgaatggcgatgaatctccagcagatgccttcagatga

SEQ ID NO: 139854 - DNA, 1117 bp, Homo sapiens
ggcgcgaacctcctggatcttacatttagcgatgcgcagcaggacgctcagagcgctaaacggtcacgccagggccttcacagatgacgcgtacacccgcgaccagtccagctggtcctgcgcccgctcccctatagtggactcgcttgcgggcgggagaacattgcgctatgggcaaaatattctcttaaacgggccgatgagtcgggcagcataaattctcctgtaaaaaacggaatatcccgtacttttgggttgataaaaaatagtcatgagcgaactattagttatttccattggcttgaattcgttacctgctcaaatcactttccagaagcaatgtgcgacatcgtgagccatgtcagtaagtggttaaattcccagtggtagcatgcctcccgccatttctaactagccggagaagtaatggacctgcttttattgagtaactcgacgctgccgggtaaagcctggctggaacatgcactgccgctaattgctgaacagttgcagggtcgccgctcagcggtgtttatccctttcgctggcgtaacgcagacctgggatgattacacagcgaaaacggttgcggttctcgctccgctgggtatttctgtcaccggtattcatagcgttgtcgatcccgttgccgcgattgaaaatgctgagatcgtgattgtcggcggcgggaatactttccagttgctgaaacagtgccgcgagcgcgggctgctggcaccaattactgacgtggttaaacgtggcgctctgtatattggctggagcgcaggcgctaaccttgcttgcccaactattcgtaccaccaacgatatgccgattgtcgatccgcaaggtttcgatgcgctaaatctgttcccgctgcaaatcaacccgcacttcaccaacgcgctgccggaaggccataaaggtgatcctcgtttgtttcgttattcgcgaactgctggtcgtcgcgccagaactgacgattattggtctaccggaaggtaactggatcacagtgagtaaaggtcacgctacgctgggtggcccgaacaccacttatgtgtttaaggctggtgaagaagcggttccgctggaagctggtcaccgtttttaa

SEQ ID NO: 139855 - DNA, 370 bp, Homo sapiens
atggatcacgccatcgcgggtattgccgttcaattccgtggcggcaatttgttgcggtttaaagcctttcagcagcgggttaaataccgtatgtgtcaggccgagcgggcgataaatcgactcttcaacatagcggtcaagcggctgaccggtaaccgactcgacgataaatccaagcagcatataatcgacatcgctgtagatatacccaagtggtcggatcacctgcatatcataagaaggaaacaccatgaccctacgcaagattctggcactcacctgcctgctgttgccgatgatggcttccgcacatcagttcgaaaccggtcagcgagtgccgccgattggcattaccgatcggggcgagttg

SEQ ID NO: 139856 - DNA, 1337 bp, Homo sapiens
  misc_feature (1)...(1337): n = a,t,c or g
ctgaatatggaatcttcccgctgggcgcgggccaatcgacgtttaaaagcgatcaatacgctatcgctgacgctgattacccaatcctgcgcggtttctaccggcgtgtcaaaaaattcgcggaaagtatcagtgatcaattccgggaaggttgggttattaccacagacatgcaagtttcggatcgatgagatagctgtccatcgccgtgccgcatttcgggcaacgacgtttgcgcgcagcgcgntggtttcagcatcttcgccttccagcacgttcagcacttcgttttccggcaccaggttaatggtggttttgcaacgctctttcggcggcagcgcatagccagaacagccaaggaataccccggtgctcgctgtgcgaatccccattttgcgaccacaagtcgggcagtcaatgctggtcagaaccatctggttcgggcgcataccaccctcttccggatctttttcagctttatctaactgctgggtgaaatccgagaagaagtgatccagtacagctttccactctgcttcgtgatttgccacctggtcgaggctgttttccatctgcgcggtaaagtcgtagttcattaactcgcggaaattttcttcaaggcgatcggtgacgatttcgcccattttttccgcatagaaacgacgattttctactcgcacgtagccacgatcctgaatggtcgaaatgatcgacgcataggtagacggacgaccgataccgcgtttttccagctctttaaccagcgatgcttcactgaaacgggctggcggcttggtaaagtgctgggctggtgtaagttcaacgagcgtcagagcatcgcctttattaactgctggtaagatgcgatcttcatcgcctttacgcaacgcaggcatcacttttgtccagccatcaaaacgcaaaatacgaccgcgtgctttcaggcggaaatcgcccgcaccaacggtcagcgtcgtggagtcatatttcgctggggtcatctggcaggcaacgaactgacgccagattaactggtacagtttctgcgcatctgcttccatatccttcagcgattccgccatcacattgacgtcagaaggacgaatcgcttcgtgcgcttcctgtgagttttctttgctggcgtactgattcggactttccggcagatatttcttaccaaaattatcgctgatataaccgcgaaccatatttaccgcgtcctgactcaggttagtggagtcggtacgcatgtaagtgatatagcctgcttcatacaacgctgcgccatcatcatggtttttttcacaccaaatccaagacgggtgctggctcgtcat

SEQ ID NO: 139857 - DNA, 1710 bp, Homo sapiens; identical to SEQ ID NO: 124845

SEQ ID NO: 139858 - DNA, 649 bp, Homo sapiens
tgctggtgggcgaacgtcgggggttgggtcagtcagaaagcctctcctgctacgccgtttactcgccgcgtatggcgaccaccgttgaggccgatcgcacctgtatctctaacattcaccagggcggcacgccgccggttgaagccgcagccgtcattgtggatttggcgaaacgtatgctggagcagaaagcatccggcatcaacatgacccgataaggaggcatcatgccagctttagatttgattcgaccgtctgtcaccgctatgcgggtgattgcctccgttaacgccgattttgcgcgtgaactgaaattgccgccgcatattcgtagcctcggtctgatttctgccgactccgatgacgtcacctacattgccgctgatgaagcgaccaagcaggcgatggtggaagtggtgtatggccgctcgctatatgcgggcgctgcacacggcccgtcaccgactgccggtgaagtgctgattatgcttggtgggccaaacccggcggaagtgcgtgcaggtctggatgcgatgattgcgcatattgaaaatgggcgcagctttccagtgggctaatgacgcgcaagatacggcattcctggcacatgtagtttcgcgtaccggttcttatctctcatcaaccgccg

SEQ ID NO: 139859 - DNA, 561 bp, Homo sapiens
atggaagggatgaaagagaagatgggaaattaccagaacgtgcgggctggtctctttgagtttggaggccaggaacatgcagacagcacccaggagttgcagatgggacttcggagtcgggaccccagccaagaaacggtccagcatgtctgtggtaataacccaacctgcgacggttacgagatcgaagagggcgaattccgcattaaaggttatgacggcccgatcgttgagtgtgaaaaatgtggctctgaaatgcacctgaaaatggggcgtttcggtaaatacatggcctgcaccaacgaagagtgtaaaaacacacgtaagattttacgtaacggcgaagtggcaccaccgaaagaagatccggtgccattacctgagctgccgtgcgaaaaatcagatgcttatttcgtgctgcgtgacggtgctgccgctcttttgcggccacccagctacccagcagcagagggcactgaaaggcagtgcaggttcactgtgccttttacctccgtcatccagagagacccagcaggctttgacaacagcctccagagctag

SEQ ID NO: 139860 - DNA, 2967 bp, Homo sapiens
tcactggggaccaaagcagtttccatgcccaaaggtgtggctgtcgtcatcatcaacagtaacttcaaacgtacactggttggcagcgaatacaacacccgtcgtgaacagtgcgaaaccggtgcgcgtttcttccagcagccagccctgcgtgatgtcaccattgaagagttcaacgctgttgcgcatgaactggacccgatcgtggcaaaacgcgtgcgtcatatactgactgaaaacgcccgcaccgttgaagctgccagcgcgcatgaccggcggcggatttggcggctgtatcgtcgcgctgatcccggaagagctggtgcctgcggtacagcacgctgtcggtttgttgcatttcagagccacatttttcacactcaacgatcgggccgtcataacctttaatgcggaattcgccctcttcgatctcgtaaccgtcgcaggttgggttattaccacagacatgcaacttacgtttcggatcgatgagatagctgtccatcgccgtgccgcatttcgggcaacgacgttttgcgcgcacgttgcgtttcagcatcttcgccccggtgctcgctgtgcgcatccccattttgcgaccacaagtcgggcagtcaatgctggtcagaaccatctggttcgggcgcataccaccctgttccggatctttttcagcttgatctaactgctgggtgaaatccgagaagtagtgatccagtacagctttccactctgcttcgtgatttgccagctggttgagggtgttttccatcaccaactgtgcggcaccggtgacctcggaaagctgtgcgctggatttaggttccgctgaagcaaaagcgtggattggtgttgaaaatccgcatcgcgcagacgtattaacagaactgcgccgcagcaccgtggcccgcgtttgtaccggtcgtgccggtccgcgtccacgtacgcaggcgctgctgcgtttcctggccgatcactctcgttcgaaagataccgtactgaaagaagtgccggaagagtgggtgaaagcgcagggcttgctggaagtacgctctgaaattagcgacaaaaatctctacctgactcgcccggatatgggccgccgcctgtgtgcagaagctgttgaagcgctgaaagcgcagtgtgttgccaatccggacgtacaggtcgttatttctgatggcctgtcaactgatgcgatcaccgtgaactacgaagagatcctgccaccgctgatggcgggcctgaaacaggccgggctgaaagtcggtacaccattctttgttcgttatggtcgcgtgaagattgaagatcagatcggtgagatcctcggcgcgaaagtagtgatcctgctggtgggcgaacgtccggggttgggtcagtcagaaagcctctcctgctacgccgtttactcgccgcgtatggcgaccaccgttgaggccgatcgcacctgtatctataacattcaccagggcggcacgccgccggttgaagccgcagccgtcattgtggatttggcgaaacgtatgctggagcagaaagcatttcggcatcaacatgacccgataaggaagcatcatgccagctttagatttgattccaaccgactgtcaccgttttgcggtaccctatttaacccgctgctgaaaggctttaaaccgcaacaaattgccgccacggaattgaacggcaatacccgcgatggcgtgatccatttcccgaatatccgcacctccactctctggggtcaggtgcacgatgaaaaagccttttattcgatgggcggcgtttccgggcacgcaggtttgttttccaataccggcgatattgcggtgttaatgcaaacgatgctgaacggcgggggctatggtgatgtgcagctgttcaatgcggaaacggtgaagatgttcaccaccagctctaaggaagatgccacttttggcctcggctggcgcgtgaatggtaatgccaccatgacgccgacgtttggcacgctggcaagcccgcaaacctacggtcacactggctggaccggaacggtgaccgttatcgatccggtgaatcatatgacgattgtgatgttaagcaacaagccacattcgccggttgccgatccgcaaaagaatcccaatatgttcgaaagcggtcagttgccgattgcaacttatggttgggtagttgatcagatactggctatagcgcgacatgctgaaacagaagatccagtagatcagcgcggcgaaaacatacccttccgtcgacatacccaaccaggcgggatcaacggttgcctgctgaacgctactgaaaagatcgaacaacccgataatgatcaccaggctggtatctttgaagagtgcgatgatgccgaagttcgcccacaggttagcgggatcgtactgaatcgcaatttcactgaaggcagcgatgtgcaagcaggccagtccctgtaccagatcgatcccgcgacctatcaggcaaattatgacagcgcgaaaggcgaactggcgaaaagtgaagccgccgccgccatcgcgcatttgacggtaaaacgttacgttccgctcgtgggtacgaaatacatcagccagcaggagtacgaccaggccattgctgatgctcgtcaggccgatgccgccgtgattgccgcaaaagccacagtcgaaagcgctcgcatcaatcttgcttataccaaagtcactgcgccaattagcggacgtatcggcaaatcgactgtgaccgaaggcgctcttgtcactaatgggcaaacgactgaactggcgactgtccagcagctcgatcctatctacgttgatgtgacccaatccagcaacgattttatgaggctgaagcaatccgtagagcaaggaaatttgcataaggaaaacgccaccagcaacgtagagttggtcatggaaaacggtcaaacctatcccctgaaaggtacgctgcaattctccgatgtga

SEQ ID NO: 139861 - DNA, 3942 bp, Homo sapiens
atgcaggtggttaatccgccgggctatgacttaagccaggactcttcaatgctgattgacgcggttaaaaataagatcacggccggagaggtaaagcacgatatcaccgaaagtatgctggagctggcgacggatgtttgccgtgatatcaaccaggctgccgggcagttttcagcgatgcagaaagtcgtattgcaggcagccacagaccatcatctggaaatttgcggcggtggcacgcacccgtttcagaaatggcagcgtcaggaggtatgcgataacgaacgctatcaacgcacgctggaaaactttggttatctcattcagcaggcgaccgtttttggtcagcatgtccatgttggctgcgccagtggcgatgacgccatttatttgctgcacggcttgtcacgatttgtgccgcactttatcgccctttccgccgcgtcgccatatatgcagggaacggatacgcgttttggctcctcacgaccgaatatttttccggctttcctgataatggcccatgccgtgggtcctaactggcacactttgaagcccgtttcgtggttgggtacacccgatgatcacggcttaagattgtccgggcttaattacaaccgggcccgcccaagtggccgcccccccggggaaatcgatacccaccccaacactggccgggaccgagctgatctctcttatcacgagagtttacaacgcattgttaaaggcgatgtcgatgcggtgatctggaacgtggtggcggaaaacgaactgaccatgctgggattagaggcgacgccgctcacagacgatccgcgatttttacaggccaccgaagccgtggtcctgacgcgagtcgatgattacccaatgcaacaactgctgcgtgccgttgtagataaacacgccctgctcgcccatcaacaacgggtagcaggcgttattgataaggacatctgcaaaggcatgatgcaggtcgtcaacgtactggaaacagagtgccatctgccggtgcgcagtgagcaaggaacgatggcgatgacacatatggcgagtgcactgatgcgcagtcgccgtggtgaagaaatagagccgctggataacgagttgctggcagaactggcgcaatccagccactggcaagccgttgtgcaattgcatcagttaacccgtgtgaagaaggctatttgctggccaacctttatggattatggatggctgctaacgaagaggtttgaagctcccgacaaatccacgtcgcacaagctgaatattccaacaactgactcttcattcacgggacagaaacgatggcaacagaatgtttgtgccagtacagaaattgctggcagcagacgcatcgcccagccatcgacgccagccagactcaacaacaggaagaagcccatcggcgtccagatgctgtaccaggtcggaacggtatcaatgctgttatacacacgcaccatcatccagacaaagatgacgccaagaaccatcgtcactatcagccacagcgtacgcaatgccggtgacagctttttcagcattgccagcaaccagccgatgccggctacgggaaaaaagatcgaaccgctggcgatttcgttactgagtgctgaagcccctaaccggttgagcgagttaaaagcgcgcattggtgaaccaagatggagcatagaggcgataaagccaattcaatgggcgggcgcatatcggcgcgcaatggcacggcaggtgagtggggacacaatccgctaccgtggatggacgaagacgaactgcgttatcgcgaggaagtccctgactctagaggatcccccctcgggtcacggcaaactgcaatataccgacgaaggttttccgttccccatcgatgtgccgtttgtccccagcgataacccaaccggtgcctatcaacgtattttcaccctcagcgacggctggcagggtaaacagacgctgattaaatttgacggcgtcgaaacctattttgaagtctatgttaacggtcagtatgtgggtttcagcaagggcagtcgcctgaccgcagagtttgacatcagcgcgatggttaaaaccggcgacaacctgttgtgtgtgcgcgtgatgcagtgggcggactctacctacgtggaagaccaggatatgtggtggtcagcggggatcttccgcgatgtttatctggtcgcaggatatcgctattctacgcaaggtttttataacttatccgacagtgcctacagtcgaatgagtggttacaccgtcaagcctcctaccggagacaccaatgagcagacacaatttattgattattttaatctgttctacagtaagcgtggtcaggaacaaataagcatctctcagcagcttggaaattacgaacagtacgcaaacaccgctctccccaccctgcccggtcaaccgcaaaatccatgcgtctggccccgtgatgaattaaccgtcggtgggataaaagcccatatcgatactttccagcgttggctgggtgatgcctttgacaatgggatctctgcagaacagttgattgaggcgcgcaccgagtttatcgaccagctcctgcaacgattatggattgaagcgggattcagccagattgccgacctggcattggtcgccgtcggtggctacggtcgtggcgagctgcatccactttcagacgtcgatttactgattttaagccgtaaaaagctcccggacgatcaggcgcaaaaagtgggcgagctgttaacgctgctctgggatgtaaagctggaagtcggtcatagcgtgcgcacgcttgaagagtgcatgctggaagggttatcggatttaaccgtcgccaccaatttaatcgaatcccgcttattattggcgatgttgcgctgttcctcgaactgtcaaaaacatattttcagcgaaggattctggccttccgacaagttctacgcggcgaaagttgaagaacagaaccagcgccatcagcgttaccatggcaccagctacaaccttgaaccagacatcaaaagcagccctggcggcttgcgcgatatccacactctgcaatgggtggcccgccgtcattttggcgcaacatcgctggatgaaatggcggagcgggcggaattaaacgaatgtctgcatatattgtggcgtattcgctttgccctgcatctggtcgtcagccgttacgataatcgcctgttattcgatcgccagcttagcgtcgcccagcgtctgaattacagtggtgaaggtaacgaaccggtcgagcggatgatgaaggattacttccgcgttacacgccgcgtcagtgaactcaaccagatgctgctgcaactgttcgatgaagccatcctcgcccttcccgccgacgaaaaaccacgtccaatcgacgatgagtttcagctacgcggtacgctaatcgacctgcgtgatgaaacactatttatgcgccagccggaagccatcttgcgtatgttctacaccatggtgcacaacagtgcgatcaccggcatttactccaacacgctgcgccagttacgccatgcccgtcgccatctgcaacaaccgctgtgtaatattccggaaactggaccgctttgcaataagaatgacaatcaatccgacgaagataacgctatcgatgcgaccacgccggagcaaaggaattgccagcagggtggggccgttacggcggggcatgatgaactgatcgtagatcgcgaaggccaggagtgcggcgatgaaaagaaaatcgcgttcgatgtgactatgatcattttcgttctgctcaatgcgccgcagctgaccacacgcgttaccccgatgaccgtagcaacccatcgtcaggatttggttacggccatcttcaccctgtacggaggctttcagatgcattacggagctacattggatactccagactggcaacgactgtga

SEQ ID NO: 139862 - DNA, 1023 bp, Homo sapiens; identical to SEQ ID NO: 135500

SEQ ID NO: 139863 - DNA, 4809 bp, Homo sapiens
ttaaacgacatgcaaagtcaatcgcctgtgctggcgctgacagcggaaggcatgttgaatctggccgatcaaacctgcgacacccagttcgatattcgggtcgtgggtggctgaaccgggcacagcaactgattgattcctgaaagaacgcagtacgctggggttatgcaccggagcagtcattccgcctaagggctcgtcgtgcacttttcggaaacagactccgtaatatggcgaggatgacccgtgtgcactgcacgctctgaaattgtcaggcccctggctaagcgaggctcggtgggcaatcgtgtaaggcgccttccataggcggacggtccccccgcaagcattggacgccgtctgtcccgttgggctctcgctatacgccgagacgtccgattcgtccagattagttattcgagctcggtacctaacggcgaggagcagatggtggttatcacctaagttgaccggcctggcgcgcgtcctgattgggttgtggatcaggtattcgatctgttcgttaacctcgacgcgaccgacgagcagatggacttcccgatcgtttacgctcctgcgctgaactggtatcgcgggtctggaccacgaagatatggcggaagacatgacttcgccgacggtcaggctaataccgtcgatgccaataaatcctttgtacagaatatatttcatcaactgactatcctggactttaaaccatatctggcgattattttcccatgtaaaactcattggaacaggcctgggagctagcgaaacagcgtttcgcggcggtggggattgatgtcgaggaggcgctgcgccaacttgatcgtttacccgtttcaatgcactgctggcagggcgatgatgtttccggttttgaaaacccggaaggttcgctgaccggggggattcaggccacaggcaattatccgggcaaagcgcgtaatgccagtgagctacgtgccgatgctttcccatgccgacgacagcattcgccagttctggattgatcactgcaaagccagccgtcgcgtttcggcctattttggcgagcaactcggcacaccatcggtgatgaacatctggatcccggatggtatgaaagatatcaccgttgaccgtctcgccccgcgtcagcgtctgctggcagcacgttgctgccgttggtgccggggtcgcggcggtatcaacatttgcctgcgaaggcgaaacaaccgcattctgttgcggatcaacagctggtgctggcgcagttacggcaggtgtttgcgtgttggttgcggtagtatccacagacgctggcggcgtggacgttgtagccgggtctgtagttgtcgacgtatttaatggaacactctgcccctgctcgctattaaggaatgagttttttgtcagcatggtcagcgccgcaaagccaccaatcactgtcgccagcaccggcagcgtgatatgccacagataatcggtgattttctgataccacggcagcgaatcaaagttagcggaaaccaggccgcgtagagggaacaggtcgaaatagctgccgcccgcgaagaagacaatcagcaggatggcaaacaaaaaggccggaatggcgtagccgatgatgataaatgcgctactccagacgtcaaagcggctcccattataaacagctttgcgaatgcctaacggaatcgacacctggtggtatgacgtcaataaagcggccaaactgccgtccgccagcaaacagggaacacctaagttcgtatcgatccgattattgttgcccaggatggttcgctttctggtcctggtatggcatactgttttggttactatagccttgtagtatagtttgaagtcaggtagcgtgatgcctccagctttgttcttttggcttaggattgacttggcgatgcgggctctgttttggttccatatgaacttgaaagtagttttttccaattctgtgaagaaagtcattggtagcttgatggggatggcattgaatctataaattacttgggcagtgtgccatattcgcatatggaccagtagtgacacagaaacatctggctcgcctgacgggatgcgacgaattttcgccgccccataaagtacgcccacgactcgttcgcactggcccgtgccgtggagtagctcatctgggcgtaattccgggaaagccgccaggcgcttgatgcagtgtgggaagaggaacaggtgaagtttattgaagatatcaacttttccggaatgattcagggccgccgttcccgcagatggggcagaatagcccggcaaaccgatggtcggaatgccgccgtctggcgtgttgtgcaaggccaaaagcgacagaaggggcgacgccgtaacgctcatttttgactttgtcgcgtccggcatcgtgcgtttttttctctgacgtagtacgcgagaacgccaatcaagctgccgacaatcagcgataacgcatgcgaagccaaaattgttcgtcccgatacggatctggttttgctcgcggtggtacggttcgacgttgcggtctaaccagcgcaattcgaaataagggagccagtgttcattaatacggtaacggaaggtgttagtgatttcccaatgatgatctttcccgttgctactattaaagtcattcactcgcatgaagtaatgtggctcaaatgtataggaaaatttatcggtgattttaaaattccagtaggtgccaatttcataggtgtcattattatccagttccccgctcaaatctgttgaactatagttattatggttatagcgatttcgtactgtcagattaaaccatggtacaaatttatagttgacgtccagatacacatcgaacccaatacgctgtttggttcgcgaccaccggtgctgccggacgatgacgcgttgtgggatatattcgaacatggtatcttgagatggtcgggtccgggctttccccactttctggacttgtgcgctggatcttttgccgatggcgccgctacaggggggctcgggacgccctattgggtctcttatcgccccatgccgagtccgccggcccgttggtgttatcccggtgttccccttgggccccctggtttgtgcccgggggacccctctttgttgcccttgcagcaatgtggttgcattgggtgccccgtgggccggttgaaagtccccccgcttggaccgtgggtcgttgctggccgctgacattgcagaaacggtggtcagccacgtcgagggggcgcgttttgcgctggtggaacgcgtggctgaagaggtggcggagctgctgttagcacgcttcaactcgccgtgggtgcgtatcaaactcagcaagccaggcgcagtggcgcgggcggcgaatgttggcgtaatcattgagcgtggcaataatccacatccgggttgatgtgctgaagtcgcgtaagtcattcggctgccttcgcgttctacggagatatccagcaccgcttttgccgccaggcccagcggtgacgtcgctttgccggtcatcgccagcagcgcgatagatttatcttccagacgcggaataatcagatccagttccttcgcgccaccggagtaagagataaacagcatcacatcgcggctttcgatcatccccagatcgccgtgcagcgcttctgccggatggacaaaaaaagccggagtgccggtactggcaagcgttgcggcgattttcttaccaatgtggcccgatttgccaattcccgaaaccaccactttgccttcacagtgcaggatgatattggcggcgcgaacaaaatcatcgcccagacgttccggtaaacggcttgcttcctgcaactccagcattaacgtctgacgtcccgcgttcagtagtgcttcactcattgctctccgatgcaggttggcgacgtcggtttccagcatccgcgcgcaggcagcccagttgtgatgattttgtgccagtgcctgacgaatagtttcacgctggaacgcttctgtcgcttcacgcaggttttgcttaaccacgggcaccgccgccacttctggcgtcggcaacgtcacctcaggaaaagcaaaatgttgcgcctcaagaatcacttcatcgccgctgcgggtggctctcgccagaactaccgcccgatgaatagcatgttccagttcgcgcacgtttcccggaaactgtagtgttgcagtaaatttcgcgctccggcacttaatagccaccgctgggagagcccctgccgcaaaacggtagttgagcgttttgagccggaagcggtgattgtactgtttaccatcttcatactgcgccgccgatgcgctaaacgctaaaactacataattaccgatcgccaggctaacattgttaaatgccgcaccggtatcggtattgaaaatggtgtaataattgccgctatttgcagaagaaacggtaccagtaaaggtagtggtcattgtttcctgagtatcaaatacgcaatcttgcaggcgaatcgcctgttcagccaaatccggattaatctcgcgtttaatttctactcctaaaccgcgaaacgcttctgcctgcgccagcacatttccgcgccctgaagagagttttttcattgcctgccgataattatcctgcgctttgtcgagactttgaccactcgcggacatgtcatcgatgaacaatacggtgcaggtataattgtcttttgggtgagttttattgaacgcgtaaggccctgtgtcatcgttgtcgtatggtgttctgaataaccttttgcctaagcctgttcggccagacgaccaagttacacgaaacat

SEQ ID NO: 139864 - DNA, 2985 bp, Homo sapiens
atgaaggcgtttacctatgaacgagtgaataccccagccgaggcggcacttagcgctcagcgcgtacccggcgcaaaatttatcgcgggcgggaccaatctgctggacctgatgaagctggaaattgaaacgcccacccaccttatcgatattgaagtgaccgacgcgggtgggctgcgcatcggcgcactggtacggaacaccgacctggcggctcacgagcgcgtgcgtcgtgattacgcggtactctcccgcgccctgctcgctggcgcgtctggtcagttacgtaatcaggcaaccaccgcaggtaatctgctccagcgcacgcgctgcccctatttttacgacaccaatcagccctgcaataagcgcctgcccgggagcggctgcgcggcgcttgaaggctttagccgtcagcacgcggtggtaggcgtaagcgaagcctgcattgccacccatccgagcgatatggcggtcgcaatgcggttgctggatgcggtggtggaaaccatcacgccggagggaaagactcgcagtatcacactggctgatttttatcaccctccgggaaaaacgccgcacattgaaaccgccctgcttcccggtgagcttatcgttgcggtgacgttacctccaccgctcggcggaaaacatatctaccgtaaggtgcgcgatcgcgcctcctacgcctttgccctggtatcggtcgcggcgattattcagcctgacggcagcgggcgcggaaccttatggtttcctgttagtagtctgaacggagtacacagtatcgcgattggataccagctaaagacatcgcgtgtgtttcatagtgctcccctgtttgctgtgcctgagcctcttgtgaccaaaagctgcaaaggtaacgatggtcgcttgcctattgtgtcgctggaggcggtgcagagtgagtttatctcttctccgggatcgtggccgcaggcaatgcgccgtttgtgtgagcaacaacttgtcactcaccagagcgtggatatcgaagagatattttcgcaattaaccgaagcgacgcgtaaactccaggcccgtagcgccaagggggcgttgacggtcagtttactccccagtttcgccattcattggttggttccgcgactttccagctttaattcagcttatccgggaattgacgttcgaatccaggcggttgatcgtcaggaagataagctggcggatgatgttgatgtggcgatattttatggtcggggcaactggccggggctacgggtggaaaaactgtacgccgaatatttattgccggtgtgttcgccgctactgctgactggcgaaaaacccttgaagacaccggaagatctggctaaacatacgttattacatgatgcttcgcgccgtgactggcagacatatacccgacagttggggttaaatcatatcaacgttcagcaagggccaatttttagccatagcgccatggtgctgcaagcggctatccacgggcagggagtggcgctggcaaataacgtgatggcgcaatctgaaatcgaggccggacgtcttgtttgcccgtttaatgatgttctggtcagtaaaaatgctttttatctggtttgtcatgacagtcaggcagaactgggtaaaatagccgcctttcgccaatggatcctggcgaaagccgctgctgaacaagaaaaattccgctttcgggatcccatatcccagcaacctacccttgatgccaatctggaagaccttctgcctgttcgttggtacagccatcttcacattcgaaggcgtcggtatggtgagatagggagagacactggaactgttctggttgtcatagcagagagcacagcaaagctgagccatgagactacagcatgcagctgcatgcctcttccttttatcgcagtgcgcttgtctgtatgtgtgacagggaccgagcaaggagacaaaggaggcggcaaagcgaactctcgggcagttttgtttcctccttccctcctgcagcccgttcgcctcctctcctgcacacacacgtgcgcgcgcacacatatgcacacacgtgtgaatgcagggtattggccacaccagtttcttctgagctgcggagaccgcttcccgggaagctccgggccggactgggtttcagcggctgctgcagctgctaccaacgcggcctatgtgggactgggcgccggggtcgtggactcaggctcgcggcgtgtctgggagccgctaagggtttttggcaagcgccgcagcccttatgacacgcgagtggactcttccaacggcccttttggggggaaggcccgtgtaaaccccggaccccctatgaacctggtccccgagccaagcctggaggagggaattaaccccactgtaccgtacggactgggtcagcaccccttctccggcggcaaacacgacgcgatcgacgtcattggtcgcacgagccatgaggtcaccggtgccatcacgcagggtacatgcgttacgctcaagtcaaatttggatctagttaacgggtacgaggtagaactgtgtctgtgttgtcatgggtatgtctccgtgaataaaaaacgccagcggcgatggctggcgtatgaggtaataaagcgcgtttgggaaggtgaaatgttggtggtaaatgattcggagtcagcgggggaaggtgtcgcccagaatgcttcagtgattaatatcgtcgcctgctcctgtgtcattcctggtcgacatatccaggcatccagagcctcacgagcctgttcaggagtgattttcattgttcaaaaagcaagtccctgtgagacagtgaagatgacggctgtgcaccaagcctggagagccaccagactgacaggagcaacggaagataaattgacacgcggtagttcgctaaactgccgtgaagtgcggcaccccgtaggtcagacaaggcggtcacgccgcatccgacatccaacgcccgagccggttgcctga

SEQ ID NO: 139865 - DNA, 803 bp, Homo sapiens
agaaaaatttgaaaccgcttgacctgattacaccatgacctgattacgccaagcttgaaaattggctgatgagcttaaacgctgagtatccagagcctgcagaagcacgccatgcttgagaaggcctgaaaactaagggggagaaagcgtctcccccttcatgtttaagtttttgtaaaaatgaatttgttatctcctccactgactacgctttaagccagagtcaatccggaggcgttatgcatcgacaatcctttttccttgtgccccttatttgtctttcttccgctctctgggcggctcctgcaacggtaaatgtcgaagtactgcaagacaaactcgaccatccctgggcactggcctttttacccgataatcacggtatgttaatcactctgcgcggcggcgagttgcgtcactggcaagcaggaaaaggattatctgcgccgctttccggagttccggacgtttgggcgcacgggcagggcggcctgctggacgtggtttaagcgcctgattttgctcagtctcgccgcatctggttaagttattccgaagttggcgatgatggcaaagccggaactgctgtgggttatggccgcttaagtgatgatctctcaaaagtgaccgacttccgcgccgtctttcgccagatgccaaaactgtctaccggcaaccattttggcgggcggctggtattcgacggtaaaggttatctttttattgctctgggagaaaacaatcagcgaccgacggcgcaggatcaccgggtgccgagctggtataaataatcggcgcatctc

SEQ ID NO: 139866 - DNA, 1320 bp, Homo sapiens
cttcgctggcgggcacagtccggtgagcattttcatggtggtggatttaccgcagccgttcgaaccaagaaaaccaaaaatctccccgcgtggaatgcggaaattaacgtgatcaacggcaacgaaggaaccaaaacgcatggtcagatcgcgcgcttcgatggcaatctctgcgttttcaggttgatacggtgggatcactaccgcctgatgcgcctggcgttgcgcttgcggtaacagatttataaatgcttcttccagcgtagcctgttgcgtttgctgccgtagctcttcggcgctgccagttgccagcacttctccggcattcatcgctaccagccagtcgaagcgttcggcctcttccatataggcggtggcgaccagcacgctcatattgctctgccgctggcgaatactgtcgatcagatcccagaacctaggcgacataattgggggggagggcaagatgcatgcctgcaggtccagttttattgcgccggtgcatttgccgttttcatccaccaccggtgcggcagtgattttgcgcttcatcaggatctctttggcgtcgatggcgcgactttgcgattgcaacgtggtgccgccgaccgtcatcgcttcattgactggcgtggtgagtgcgccgccgccaaccagccagcgacgtaaatcgccgtcggtaaagacgccttgtacctgttgttgagcgtcacataccgccaccagccccagaccggtgcggctgagttccagcatcgcatccatcacgctggcggttaacgccacctgtgggatggcatcgtcacggcgcatcagatgatgcactttattcagcaagcgagcgcccagtgccccggctgggtgggagcgggcaaaatcttcttcattaaatccgcgcgcctgcatgaccgccatcgccagcgcgtcacccatcatcagggtattgacggtgctggaggtcggcgcaaagtgcatcgggcaaggctcgcgttccgactcgactgaattatcaccattcataaagatggtgccaccaaattcactgactactgcgctggctgttatccctccattttctttgtcagatacgcttccagaggtcttaatatcgctatcgcttatatataatactttgttttgactatcaacagaaataccataagatccatcaccactagtcatcacactggcattatttatatatccagttacaccgtcatccactttcacagcatggctttcgtcttcagtggttagatactctccattacttatcggattattatctttgatttcaatcggcgattcttcatcagtcat

SEQ ID NO: 139867 - DNA, 2163 bp, Homo sapiens; identical to SEQ ID NO: 135501

SEQ ID NO: 139868 - DNA, 2055 bp, Homo sapiens
ttacccctgacgcttatcttccgtattcgtctcgaaatcactggcgtcatggcgctcatgcaactgctcattcagcggtccgttggtgcggttaacaatacgcccacgtttcaccgccggacgttcgcctacttctttcgcccagcgttgtacatgcttataactgcccgcatcaagaaactcagcggcatcatacacaccacctaacaccacgttgccaaaccacggccaaatcgccatatccgcaatggtgtactcatcgcccgcaacaaacttatgctgcgccagttgcttatccagcacgtcgagcagataggctcggtaccgctcgtaatggacgcaatttcgctggtggaagcccatgaccatctgctgctgggtaaagtaggccgctatattgaagagccaattaaagctcgcgttattgagtgagttacgcccgaaaacgcgtgcgccaagcgaaaagcagaccggcaagccatcgaagaaagtactggctaaacgtgccgttccgaacagggtatgtcgctgctgcaaccgggtaaagcgccgctgcatatgccaacccaagcgcaggaagtgtatgacgttaccggtgcgggcgacacggtgattggcgtcctggcggcaacgctggcagcgggtaattcgctggaagaagcctgcttctttgccaatgcggcggctggcgtggtggtcggcaaactgggaacctccacggtttcgccgatcgagctggaaaatgctgtacgtggacgtgcagatacaggctttggcgtgatgaccgaagaggaactgaagctggccgtagcggcagcgcgtaaacgtggtgaaaaagtggtgatgaccaacggtgtctttgacatcctgcacgccgggcacgtctcttatctggcaaatgcccgcaagctgatggtcgcggctttcaccctgcgggaagtaaccgttgatcacggtgacattacccagcagtgaggggatttccgccataataatccgccgctgcgcctcttcgtcgtcaccgggaaagccgcgacgcacggcaatcggcgtctctttggtcagcagcgccacgccataatggcctttctgcccgtgataaaacacgttgtagccgagcttcgccacctcttcgagcggaaacatatcgtcatgaacttttgtctcctgcaggccaatcacatccggttggtgcttttcgacgatggcttcaagcgttcccgcattgccgagcagcagctcgctgttgctgccgtaagtgcgagcgtaatgacgcgccagcgattcagtcaggaacggatagcggcggcgcaggcgagcggcataatcgtcgcggtcgccttcaatggcgccacccggtagcacactctctttcgtccatgccgggccaataccctgataatacggcgttagtttttccagcgcatgttccgccagttttcggtaggtggtcagcttaccgccgaataccgacagcagcggtgctttgccattttcatcatgaatatcaagggtgtaatcacgggtaatagcctgcggcgagtcggactcatcatcacacagcggacgcacaccggagtaggtccagacgatatcgtcacggcttaactgctttttaaagtgcgtgttaattgccgccggtaaagcacatacccacgccatcaggatgctggttaccgttttacgctgtaacccaccgccgtccaccaccatcgtccctgcaactgcagacgagaggacgtgtgttgtggagacgggcatcccaatataactggcaagaccgatagacactgccgccgtcatttgtgccgccatgccttgcgcatacgtcatgccgcgcttaccaatcttctcaccgatggtcatcgctacacgacgccagccaatcatggtgccaatgccgagcgccagtgctaccgccatgatgatccacaccggagcgtactcaatggtgcttaacatatcgctgcgaagttttttcagcaggttctggtcttctttactgacgcctggcagtttcgctagcttcgcggaggtatcagagatgcacagcat

SEQ ID NO: 139869 - DNA, 1926 bp, Homo sapiens
atgctgtcgaagcggctccgacccgggatctctagagtcgaagcgtctatgctaacgagttgcgtgcgatgtgcgccgtttgttttccgtcgttacatcgatttcagcgtgattcagtcgctgcgcaacatgaaagggatgattgcccgtgaagtgttccagctcattcgcggcggacgcgaaccgtcgctgcaatcgcgctctttactgccaacgctcagcgccattgccgagctgcatctgctttctgaaaacgatgctgaacaattgcgagtggcgtatctgttcctgcggcgtctggaaaacctgctgcaaagcattaacgacgaacaaacccagacgcttccttctgatgagcttaatcgtgcgcggctggcgtgggcgatggactttgctgactggccgcaactgaccggggcgctgaccgcacatatgaccaatgtgcgccgggtgtttaatgaattgattggcgacgatgacagtgaaactcaggaagagtcgctgtcggaacagtggcgtgagctttggcaggatgcgttgcaggaagatgacactacgccagtgctggcgcatcttagcgaggatgatcgcaaacaggtgctaacgctgattgccgatttccgcaaagagctggataagcgcaccatcgggccgcgaggacgtcaggtgctcgaccatctgatgccgcatctgctaagtgatgtctcccttatcaaccggaccgaattcccgatgctaccgattagggttgcagattttcttcagaaccagctccgggaacccttcggtatagccaaaccaggagcgttcctgcatccagcgaggatcgcccttaattttactttctggtccggtaagcgaaatcagggtatgaccattttcatcaagaatggtaacccccatcggcaacgtacccgaaacgtaaggcaacgtaaagatatacggaatctgtgccaaaagtggacaaaatcttcgggccgggtaacgcctttgtcaccgaagcgacacgtcagtaatactgcaatatctgaatgcgtttgttcgcatgtacggcgcagatgccgtagaagccgccagtgcgaaatccggttcgccatgtttggcaaaagaagcgcgtacgctgttcgccagtgcattaatgtaatcgtggttatcggcgtaatcacgtataaacgatatccccggaatgctacgtttgcgcgccagaatgcgtgccagttcatcccataccgcaccgaccgtagaacaggagaattgcggataaagcggcagcaccacaatatgatctacatgctctgccaggagttcatctacggcgctttccagcctacaagttcagcgatctacattagccgcatccggcatgaacaaagcgcaggaacaagcgtcgcatcatgcctctttgacccacagctgcggaaaacgtactggtgcaaaacgcagggttatgatcatcagcccaacgacgcacagcgcatgaaatgcccagtccatcagctcaagaaatcctggggctccaaggacactccagccaaggctctgatgaggcagcggggcactggaggaggcccctggggggaagtggactcccgacctccgtgggcgttgccatgcctggtcagcctacgtggggcccaacgatccaccagtaacgggcccaacctcatttgcggcctaccttcatccagtcctttccctggctgccacagcttctcccctatggcgttgttaatcactaaaaaaggcatcaattgtgatatgtgtgaacccaatgcccccccccccggcccctctcaatgggagatcatatctacgagattaacaaacgataagtgtacccgaatgcgtagggcgctacgagacaccaacctgccagaagaatgggcctgtgacccagtcctggtcaacgagtctgctcaggttgag

SEQ ID NO: 139870 - DNA, 1547 bp, Homo sapiens
tggaaaaaatcctcggctaattcgaaagcgcgcacggacagtcccctcgccccctcggggagagggttagggtgaggggaacaggcccgcacaagcaaacttatcagcaatctcaggccggatattcattcggccttttacaaaaacctcaatctgcgctattcctttttctgatttgacctctcacagcaattagttcttcttcctcacttttccgctacaattatcaacaagttgaatcgataagaggcggtaatgcgtcagactaaaaccggtatcctgctggcaaacctgggtacgcccgatgcccccacacctgaagcggtaaaacgctatctgaaacaatttttaagcgacagacgcgtggttgatacctcacggttgttatggtggccattgctgcgcggcgtgattttgccgctgcgctcgccgcgtgtggcgaagctgtatgcctctgtctggatggaaggctggctcgccgctgatggtttacagccgccagcaacagcaggcgctggcacaacgtttaccggagatgcccgtagcgctgggaatgagctacggctcgccatcactggaaagcgccgtagatgaactcctggcagagcatgtagatcatattgtggtgctgccgctttatccgcaattctcctgttctacggtcggtgcggtatgggatgaactggcacgcattctggcgcgcaaacgtagcattccggggatatcgtttatacgtgattacgccgataaccacgattacattaatgcactggcgaacagcgtacgcgcttcttttgccaaacatggcgaaccggatctgctactgctctcttatcatggcattccccagcgttatgcagatgaaggcgattctctgcgcgaattgtacgcggtggcaaatcctaacccaggtccaggtatgggcgtgctgctggcgtacatgttctttggtcgtggtagcgctaaacagtctgcgggcggttccggcctggatggcttgctgcgacgaacaccacccattacccctggcggttatttttccgtattcgtctggaaatcactggggtcatggcgctcatgcaactgctcattcagcggtccgttggtcgggttaacaatacgcccacgtttcaccgccggacgttcgcctacttctttcgcccagcgttgtacatgcttataactgcccgcatcaagaaactcagcggcatcatacacaccacctaacaccacgttgccaaaccacggccaaatcgccatatccgcaatggtgtactcatcgcccgcaacaaacttatgctgcgccagttgcttatccagcacgtcgagcagacgtttggcttccatggtaaagcggttgatggcgtactcaatctttaccggtgcgtaatggtaaaagtgaccaaaaccaccgccgaggaacggtgccgcgccctgtaaccagaacagccagttcatcgtttcagtacgctttgccaaatcctgcggcaggaagtagccatgcttggccactaaataaggcagggtcagggcagtttcagtcacgc

SEQ ID NO: 139871 - DNA, 651 bp, Homo sapiens
atgattattcacttcctcggtgggatccacgaactgtatttcccgtatgtgctgatgaagccgctgaccattattgccatgattgcgggcggtatgtctggcacctggatgtttaacttactggacggtggtctggtggctggcccaagtccggggtctatctttgcttacctggcactgacgccgaaaggctcgttcctggcgacaattgccggtgttacggtaggtaccctggtgtcctttgctattacttcgctgatactgaagatggaaaaaacggtggaaacggagagcgaagatgagtttgctcaggttaagcgtatcgcctttgtttgcgatgcggggatgggctccagtgcgatgggcgcgaccaccttccgtaaacgcctggaaaaagcggggctggcaattgaagtaaaacattacgccatagaaaacgtgcctgcggatgcggatatcgtcgttactcatgccagtctggaagggcgcgtgaaacgtgtgacggataaaccactgatattgattaataactatattggacgatccaaaactcgacactttattaatcaataccgccggtccaagcattctgataagtcccaccactttgggagtcagaggcagaaggattgcttgaggccaggagtttga

SEQ ID NO: 139872 - DNA, 1650 bp, Homo sapiens; identical to SEQ ID NO: 127453

SEQ ID NO: 139873 - DNA, 1509 bp, Homo sapiens; identical to SEQ ID NO: 139213

SEQ ID NO: 139874 - DNA, 2383 bp, Homo sapiens
aaccgaatttgttgctgaatatggggtcaacccacggcctggcgatggtcttttccatgctgctggcggcgattatctggaacctgggaacgtggttcttcggtttaccggcctccagttcgcacaccttgattggtgcgattatcggcatcggtttaaccaacgcgctgttaaccggctcatcggtgatggatgcgttaaacctgcgtgaagtgaccaaaattttctcctcgctgattgtttcccctatcgtcggactgtcagttgttgcgctggataacgttaacttcacgctcaataaaggcgaagttcgtgcgctgttaggtaaaaacggcgcgggcaaatcgactctcattcgaatgcttaccggcagcgaacgcccggatagcggtttagtgaagatgagagcctgcattaataatcaacagattcgccaccataacaaatgcgtgattctggaactgctgtaccggctaaagcgcgccaataaatcaacgctggcccggctggcgcaaatttcgattccggcagtcagtaatattttgcaggaactggaaagcgaaaaacgggtggtgaatattgacgatgaaagccagacgcgcgggcatagtagcggtacatgggctgattgcgcccgaaggtgactggaccgctgtgccctgaacgtgaccgcccaacccagtattgagtgtcaggttgctaatgcttgtttaagtccgaaaggtgaatttgagtatttacagattgatgcaccgacgccgcaggcgctgctgtccgaaatcgaaaaatgctggcatcgccaccgtaatgtgtggccggaccataccatcaacctggcgttggcaatccacggtcaggttgatcctgtgaccggcgtgtcgcaaaccatgccgcaagcgccgtggacaacgccggtggaggtgaaatatctgctggaagagaagctcggcattcgggtgatggtcgataatgactgccagttacattattgtaagacagcaattctcaactggagccgaaaaatggcgctttcaagacaaaaatttaccttcgaaagacttcgcagattcaccttaccggaagggaaaaaacaaacttttctttgggatgcagatgtaacaaccctggcatgccgagcaactagcggagcaaaagcctttgtattccaaagcgtatatgcggggaaaacccttcgcatgactattggcaacattaacgactggaagattgatgatgcgagagccgaggcaagacggttacaaacattgatcgatacagggatagatccacgaattgctaaggctgtaaaaatcgcagaagcagaatccctgcaggcagaatcacgtaaaacaaaagtgactttctccgtcgcctgggaagactatcttcaagaattgagaaccggtatcagtgcaaaaactaaacgcccatattctactcgatacattgccgatcacattaacttgtccagtcgtggaggcgaaagtccgggcctgggactgctgctggcgtttaccttgtttggtaaagggatgagtaaacgttctgcgcccggggcgatgattattcacttcctcggtgggatccacgaactgtatttcccgtatgtgctgatgaagccgctgaccattattgccatgattgcgggcggtatgtctggcacctggatgtttaacttactggacggtggtctggtggctggcccaagtccggggtctatctttgcttacctggcactgacgccgaaaggctcgttcctggcgacaattgccggtgttacggtaggtaccctggtgtcctttgctattacttcgctgatactgaagatggaaaaaacggtggaaacggagagcgaagatgagtttgctcagtcagccaatgcggttaaggcgatgaaacaagagggtgcattctcgttaagcagggttaagcgtatcgcctttgtttgcgatgcggggatgggctccagtgcgatgggcgcgaccacggttccgtaaacgcctggaaaaagcggggctggcaattgaagtaaaacattacgccatagaaaacgtgcctgcggatgcggatatcgtcgttactcatgccagtctggaagggcgcgtgaaacgtgtgacggataaaccactatatggtccagctgttgtcttccagcctgggtgaaatcatgaccacgctgacagcacaacagattgcctgtgtttacgcctggctagcgcagttgttctcccgtgagctggacgatgaacaactgacgcaaatcgccagtgcgcagatggctgaatggttttcgttgctgaaaaacgaaccgccgctcactgcggcggtgaacgagctggaaaaccgtattgccacgctgacagtacgacgagcaagagattaa

SEQ ID NO: 139875 - DNA, 343 bp, Homo sapiens
gaatactgccatgacaccttcaaattatcagcgtacccgctggctgacactcatcggtactatcattacccagtttgcgctggggtcggtttatacctggagcctgtttaatggcgcgctttccgccaagctggatgcgccgaattctgttgcgggcaaattacaggaacgttttggcgttaaacgcgtcaccatggcttccggcattttgctgggattaggcttcttcctgacagcgcattctgacaacctgatgatgctgtggttaagcgccggtgtgctggtgggactggcagatggcgcgggttatctgctgacgctctctaactgtgtgaagtggtaa

SEQ ID NO: 139876 - DNA, 1290 bp, Homo sapiens
ttaaaatctggcgctaacccccatcgtatacagatagtcgctattattagtggtattttctgcctgagttagcgcggcataggcggcaatattttgattgagcaacatatcagcgcctacggtgacatccagccagttgccgttctggtttgtcgccgtcatccggctcaggcctgattgcgccttccagatattctcgccaaattgctggttatagctgatttgcgcccagggtcggagatcgccaagccgggagtcaacacgccagcctaaggtactcacgctggcatgccataacggatcggtcagcgtggtagtactgtctccaaactcgttatacatcgaggtggttgtgccatcgtaatgtaatgccgcgaccgggccggttgtaacctgtttatataaaggaaaattccagcccatactcatactgctggtcacatccacaagggtttcttcctgcatatagacttccggattgtaaatgcaccaatcagcatcccacgtcgatttcagacgctgacgctcacgctcgatattctcaagtttctcgttaaagcgcgcccaacgttcgtcatccaccaggcccagttcacgaccgatttcagtcaaacgcagatccgcattatcttcgcgtagcatcagacgatattctttggaaggcccgcgtgggaggaatggttttaccccaagagttaaaaaaccaacctgctctttctccctgatgggctgtgccagatgcggttgctccttctccccaaaggtctgggatctgattctcctcacttccctttctggacccaatttcttctttctcaagactttgcctaaaatttgctgttgccgggcgaaaccctcatgcttcagataccgcttgataccgctggcggatactcgactatggaacaacccatgctgcttcctatcggcgctgcgctcggagtggcgaatgagcaccccctgcagacgctgcattaagatgagcgtcagtcccgtgcgagcctcatagggcgcggtccgtttgctgccttccctcccgtcctccccatgtttccatgctgtctccgacaggctatagatcgccggctggctacaccgactccaaataccgctttcaggtaccacgacgccaaaacactcatataagcccatgttcttggcatatgattggcagagacaaacattaatgccctgttcgatgaagtggcgcacagcccaggcatccttatcaccatcaccactggcaaagccttggtaggccatgtcaaacaacgcaaagagattcctttt

SEQ ID NO: 139877 - DNA, 3969 bp, Homo sapiens; identical to SEQ ID NO: 115214

SEQ ID NO: 139878 - DNA, 730 bp, Homo sapiens
cgccatcctgcgcggcttacttgatgccatcaacattctcaatccacacgccgaagtggatgtgatgagccgctatccggtcagttcttcctggctgctcaaccgcccggacgttcgtagaaaaaacagccttgcggcaaccggtttatcaatggcggggagggaatccagcaataatcgggtgtatggatgtgcagccagggtggaagttgagcaaagaaagccccagctgttcgcaacgctgcatttcatctataaaggcatcgcgcgatttttccagagcttcagtgaccggatgtccgaggttaatcagataactgtcgtggggaagaatttgcgccgatgtgtagtgatatttttcacaggcggctttgaattcatcgatctgacgcctgtgcaaaaaaaagcccctcgattgaggggctgggaatgggtgatcaacgggaggatgtatggttcagtgtgttcgacattttgtcttacccatactcatactgctggtcacatccacaggggtttcttccgccagattgacttccagtcccagcgccctttggctactttgaatacgttgcgacaaaatatcgttgtaatcaggttgatgatcactatcccaggtgtaacgctctgtggaaagtccgggttgcgtatcaacgatatattcttgttgccaggcgtaagctgtgttgagaaaaaaggcactgattaccacgctcgccagcaggcttag

SEQ ID NO: 139879 - DNA, 2379 bp, Homo sapiens
tcaggtggctggagtgagccctgctccccccgggctcattccagcctgggcatccttgagttccaaggcctcattcagctctcggaacatctcgaagcgctcacgcccacggatctgaagggtgaaatattctccatccagtggtttcttctttggctggggagaggagctggtgttgttgggcagtgctcgcttagtgctccctgggggcagctcgtggtgaggctcccctttcttgcggagattctcttcctctgtgcgccggtctctcccaggacaggcacaaacacgcacctcaaagctgttccgtcccagtagattaccactggagtcttccagtgtgatgatggtgaggatgggcctccggttcatgccgcccatgcaggaactgttacacatgtagttgtagtggatggtggtacagtcagagccaacctcaggcggctcatagggcaccaccacactatgtcgaaaagtgtttctgtcatccaaatactccacacgcaaatttccttccactcggataagatgctgaggaggggccagaccatcgctatctgagcagcgctcatggtgggggcagcgcctcacaacctccgtcatgtgctgtgactgcttgtagatggccatggcgcggacgcgggtgccgggcgggggtgtggaatcaacccacagctgcacagggcaggtcttggccagttggcaaaacatcttgttgagggcaggggagtacgtgcaagtcacagacttggggatttcgtgggcaacgcctgccgcaagatgccccagcgccaccagcttctctttgcgcttcatttcatcttgtagaagctggcgcgagcgcagatagcggcgataccagaagaatgacaatacgcttgccagcaagaccgtcgccagggcgaagaggataatcagggtattgcgcttttccccactctgggttgcaaccagatcactggcatcaacggcgataaaaatagcctgttgtgcatctgagcctggcagctttctccaactttggaagcccaggagcatggcccctgtccacagatgcacctggcacgaggcgtgcccagagggacagaggcagatgagttgcgtctcctccactggattgtgagggctcagaacactctgcatgtttccctctgagttcactcccaggaagacaaagtcctctgttttgtcaaagtggaagcaggaaagagggggagcaggccaacggtattccagtgcaacagaaaaacagcaagaggacagcccgtagaacagcattccaaaaaccacttgccagcatatccaggcggcgatcgggaaggttttagtgttgtacatcagcaggttcggcccccataggtaaggtgtgccgtaaactttgccgccaacattaaaccagtcgcctttaaccacgcgcggatcgagcgttttccagttgggaatcaatgcggtattaatcggctgcacgcgtttacccataatcaaacgcagcgaggcatcgccggatgccgtaaccagatcgtaaccccctttggtcatcagactgaccatttcatcggaagtcgcggcggttttcacattcaccgcgcagcctgtctctttttcgaactgcgttacccagtcgtattgtttatcagtttgtccgcgttcgatgtatcccggccaggcgataatatccagtcgcccttccggtttatctaaattggtaggcggttcggcggcgtgagcggtcattattgtcatgctgagcgcacacaggctgcggcagagtattccggtggtatgatgacgtccccaggtgtgctcgtcgccctccccgggtgcacctggttggaacttcacgcgataggccagcagggctttgacaacgtccacccgcccgtgcctgacggccagcatcagggccgtctgtcctgctgcagcctcaacctcacaccaggctccattctgtgtcttcgcgccttcctctcctctcttgttttcttgcgccgtgtcttgtgtctgtcgtttttctttttcttgtgtttttgttttgggtgcggttccttttgtgttccctgtctctcgttctcttttcccttcgccgccttcgtccctgctgttcgcctgctcatggttgcgcttgcgctcgtgcttttctcttcgttttcgtcgtgtttgtgtgcttttttgcgtttttctttcgttcttctttcgctcgttcttgcttctacttttttcctcgtccagataccagtcacccactgtatcatgaggggtgaccaggtagttgtctggtttagctgaactaaggagcaaattcgccacgagcgataaatggccaatggaccttggcccaaggggtggaaaaacggttaaccccaaaattttcttggccat

SEQ ID NO: 139880 - DNA, 495 bp, Homo sapiens
atgcccggtgacctgtatcgatatggcgatgcagtcagcattattccggctgaatatctgggaaaaacaggttatgaattaccggcggaactggatgccgacaaagcattattagcccgcattgaatctatccgtctacaagcgggtaaagcaatgggcttaggtgatgtcagtaatatggttatccctaaacctgtgcttatttctccagcgcagaaaggcggggcaattaatgtgcgttattttatgccgcattcttgccatcgcgcgctggcgataaccggtgctattgctatttccagtagttgtgcattggaaggcaccgtcacccgacaaatcgtcccttctgtaggatacggcaatatcaatattgaacaccccagtggtgcgctcgacgttcatttaagtaatgaaggtcaggatgccacgacgttacgcgcatctgttattcggacgaccagaaaaatattttccggtgaagtttatcttccctga

SEQ ID NO: 139881 - DNA, 4466 bp, Homo sapiens
atggaagaaaaactgttctcaagggacgatgatgatgtcaccaacaacacgcgtgtatacgccagcttcgcgacctgctttacgcagttcagtcattttatctacagttacgccacgggaatccgcaactactgcagacagcggccttcgacaaatacccgtgcgtctgccgctgctgatactacttcgccaaacagcgtgtcgtattcttcttgcgcagaagtcgcagttagttgctgcaacgcccgggataacgatgccaaatttaccgttatgttcaatcaactccctggtccatgtcgatttatctaccacaatcgccacgcgtggagtcaaatggtcagtctgatgaccaaagggggttacgatctggttacggcatccggcgatgcctcgctgcgtttgattatgggtaaacgcgtgcagccgattaataccgcattgattcccaactggaaaacgctcgatccgcgcgtggttaaaggcgactggtttaatgttggcggcaaagtttacggcacaccttaccaatgggggccgaacctgctgatgtacaacactaaaaccttcccgacgccgccggatagctggcaagtggtttttgttgagcaaaatctgccggacggcaagagcaataaaggccgcgttcaggcttatgatggccctatctatattgcggacgctgcgttgttcgttaaagccactcagccgcagttgggcatcagcgatccgtatcaactcaccgaagaacagtaccaggcggtgctgaaagtgctgcgcgctcaacacagtttgatccatcgctactggcatgacactaccgtgcaaatgagcgatttcaaaaacgagggtgtggttgcttccagtgcctggccctatcaggccaacgccctgaaagccgaaggccagcctgttgctaccgttttcccgaaggagggtgttaccggttgggctgataccaccatgctgcatagcgaagcgaaacatccggtttgcgcctacaaatggatgaactggtcattaacgccaaaagtgcagggcgatgtggcggcctggtttggctcgttaccggtagtgccggaagggtgtaaagccagtccgttattaggcgaaaaaggttgtgaaaccaacggttttaactatttcgacaaaatcgccttctggaaaacgcctatagcagaagggggcaagtttgttccctacagtcgctggacgcaggattacattgccattatgggcgtggagtttgacaacgtctcgcggttgtacggtgacgtgcgcgcagtagatggcgtcagtattgcgataaaagatggtgagttcttctctatgctggggccgtccggctccggcaaaaccacctgcctgcgcctgattgctggcttcgaacagctttccggcggggctatctctatctttggtaaacccgccagcaatctgccaccgtgggagcgggacgtgaatactgtctttcaggactacgcgctatttccgcatatgtcgattcttgacaatgtcgcctatgggctgatggtcaaaggcgtgaataaaaagcagcggcacgcaatggcgcaagaggcgctggagaaagtggcgttggggtttgtacatcaacgtaaaccgtcacaactttctggtggtcagcgccagcgggttgctatcgccagagcattggtgaatgaaccgcgcgtattgctgttggatgaaccgctcggcgcactggatctcaaattgcgtgagcagatgcagctggaactgaaaaaactgcaacagtctctcggtatcacttttatcttcgttacccacgatcagggcgaagcgttatcgatgtccgatcgtggtggcggttttcaataatggacgcattgagcaggtcgattccccgcgcgatctctatatgcgcccgcggcaagccggttgtgacggccaaatttaaacagggcactatgcccgaaccttcaaacaaggcgataatattgccgattcgcttcttccctggagtcgtgttaatgatcataaaaaaaagcggtggtcgctggcagctaagcctgctggcgagcgtggtaatcagtgccttttttctcaacacagcttacgcctggcaacaagaatatatcgttgatacgcaacccggactttccacagagcgttacacctgggatagtgatcatcaacctgattacaacgatattttgtcgcaacgtattcaaagtagccaaagggcgctgggactggaagtcaatctggcggaagaaacccctgtggatgtgaccagcagtatgagtatgggctggaattttcctttatatgaacaggttacaaccggcccggtcgcggcattacattacgatggcacaaccacctcgatgtataacgagtttggcgacagtactaccacgctgaccgatccgttatggcatgccagcgtgagtaccttaggctggcgtgttgactcccggcttggcgatctccgaccctgggcgcaaatcagctataaccagcaatttggcgagaatatctggaaggcgcaatcaggcctgagccggatgacggcgacaaaccagaacggcaactggctggatgtcaccgtaggcgctgatatgttgctcaatcaaaatattgccgcctatgccgcgctaactcaggcagaaaataccactaataatagcgactatctgtatacgatggggcgtacccgctggctgacactcatcggtactatcattacccagtttgcgctggggtcggtttatacctggagcctgtttaatggcgcgctttccgccaagctggatgcgccggtaagccaggtcgctttctctttcggcttgttaagtctggggctggcaatttcgtcttctgttgcgggcaaattacaggaacgttttggcgttaaacgcgtcaccatggcttccggcattttgctgggattaggcttcttcctgacagcgcattctgacaacctgatgatgctgtggttaagcgccggtgtgctggtgggactggcagatggcgcgggttatctgctgacgctctctaactgtgtgaagtggttcccggagcgtaaaggtctgatctccgcgttcgctatcggttcttatggtctgggtagcctgggtttcaaatttaatcgacacgcagctgctggaaacggtcggtctggaaaaaacctttgtgatttggggagcgattgcgctgttgatgattgttttcggcgcaacgttaatgaaagacgcaccaaaacaggaagtgaaaaccagcaatggtgtggtggagaaagattacacgctggcagagtcgatgcgtaaaccgcagtactggatgttagcggtaatgttcctgaccgcctgcatgagcggcctgtacgtgattggggtagcgaaagatatcgcccaaagtctggcacaccttgatgtggtttccgcagccaatgcagtcactgttatttccatcgccaacctttcaggtcgtctggtgctgggtattctgtctgacaaaatcgcccgtatccgtgttattaccattggtcaggtgatatcgctggtgggtatggcggccctgctgtttgcaccattgaatgcagtgacgttctttgcagcgattgcctgcgtggcatttaactttggcggcactattaccgtctttccgtcactgcatttgtggttcgattatcgcctcactgtttggcggcttctatgtgaccttctacgtgattttcgccctgctgattctgtcattggcgctttctacgacgattcgtcagccagagcagaaaatgttgcattttacttatctgactacctccgcactttttcctgccgggccgaaacggaactggatgccgacaaagcattattagcccgcattgaatctatccgtctacaagcgggatacggcaatatcaatattgaacaccccagtggtgcgctcgacgttcatttaagtaatgaagctccggcaggattaagcgaactggcgtgggtgctttttggtatttacctggcggccattgtggggctggttatcaagcctttcccggaacctgtcgtactgttaattgccgttgctgcctcaatggtggtggtcggtaacttatccgacggtgcgtttaaaaccaccgccgtattaagcggttactcttcaggtaccacctggctggtgttctcggcgtttaccttaagcgccgcatttgtgaccaccggtttaggtaaacgtattgcctatctgctgattggtaaaatcggtaacaccacgctgggtctgggttacgttacggtattcctcgatctggtactggctccggcaacaccgtctaacaccgcgcgtgcgggcggcattgtgttaccgatcatcaacagcgtggcggtggctttggggtccgaaccggaaaaaagtccgcgtcgtgtcggacattacctgatgatgtccgtttggtaccggtcggtccgcgatctgtgctgggctaa

SEQ ID NO: 139882 - DNA, 356 bp, Homo sapiens
cgggcatcggcaaacggcgtttcgcgaactggaacgggtgcttaattttccgcaatcaaacttgtgccttaaacgtgagaaacaggacgaaagctgttcattaacgcaggcattaccatcggaactcaaggtgagcgccgacaatgtctcattaaccggtgcggtaagcctcgcatcaatgctgacggagatatttctctggagctcaactggacgcttccgggtcagccggaataccacgccgccaggtggtgaaactggtggtttgaacgctggggtcggcttaagcgataccaggcaagtggattcagggttcgctgggtctgcagacttagatagtgattcctctgatggat

SEQ ID NO: 139883 - DNA, 2142 bp, Homo sapiens
atgtatgaaacactggaagaggtgctccgctcctctggcgatcccgccgatcagaaatatgttgagctgaaagcgcgtgcagaaaaagcgctggatgatgtgaaaaaacggaagctgtattgctggagacggcggcagatctgcgctttgcgccggataagtcgctcgccatatcccgggcaccaactcgagtgcatcgctagcttcgaccgcaacttcgaggccatgcaaaaggagatgtacgggcagtttgaaaacaccttcatgatgtacctgccgcgcctgtgcgaacactgcctcaatcccagctgcgtggcgacctgcccaagcggcgctatctacaaacgcgaagaagacggcattgtgctgattgatcaggataaatgccgtggctggcgtttgtgcataagcggttgtccgtacaaaaaaatctacttcaactggaaaagcggcaagtcagaaaaatgcatcttctgttacccacgaattgagtccggtcaaccgaccgtgtgctcagaaacctgcgtgggtcgcatccggtatctgggcgtgctgctttacgaactcaccgcccagcagttcttcccagtttggcccccagatcactttgtccatccgtttgccgtcaatcagttgaataaagagaaactggatcggtggttgaaagatggcatcaccacgccgggtggaaaactcccttcagaaagagagctgggagaactgctgggcattaaacgtatgacgctgcgccaggcgttgttgaacctcgaggcagaatccaaaatcttccgtaaggatcgtaaggggtggttcgtgacccagccgcgatttaattacagtccggagctgtcggcgagctttcagcgggccgcaattgagcaagggcgagagccttcctgggggtttaccgagaaaaaccgtaccagcgatattcccgagacgctcgcgccactgattgcagtgacgccatcaactgaactctatcgcatcaccggctggggggcgctggaaggacataaagagtttaaaatggataagaagcaagtaacggatttaaggtcggaactactcgattcacgttttggtgcgaagtctatttccactatcgcagaatcaaaacgttttccgctgcacgaaatgcgcgacgatgtcgcattccagattatcaatgacgaattatatcttgatggcaacgctcgtcagaacctggccactttctgccagacctgggacgacgaaaatgtccacaaattgatggatttatccattaacaaaaactggatcgacaaagaagaatatccgctatccgcagccatcgacctgcgttgccatcatggctgcacgggagatggcatccggaagcgccttagcagcctgaaaccgaagtttgtatcggtgacctatggcgcgaactccggcgagcgcgaccgtacgcacagcattattaaaggcattaaagatcgcactggtctggaagcggcaccgcatcttacttgcattgatgcgacgcccgacgagctgcgcaccattgcaatgaacctgccagctaagggcggaagtatgatcatgctggcgaaaggcaaccgcagccagcagggtgaaccgtggcaaacgattcgtttaatttctgaattttacccggaagacagcggtctgttctccccgctattgctgaatgtggtgaaattgaaccctggcgaagcgatgttcctgttcgctgaaacaccgcacgcttacctgcaaggcgtggcgctggaagtgatggcaaactccgataacgtgctgcgtgcgggtctgacgcctaaatacattgatattccggaactggttgccaatgtgaaattcgaagccaaaccggctaaccagttgttgacccagccggtgaaacaaggtgcagaactggacttcccgattccagtggatgattttgccttctcgctgcatgaccttagtgataaagaaaccaccattagccagcagagtgccgccattttgttctgcgtcgaaggcgatgcaacgttgtggaaaggttctcagcagttacagcttaaaccgggtgaatcagcgtttattgccgccaacgaatcaccggtgactgtcaaaggccacggccgtttagcgcgtgtttacaacaagctgtaa

SEQ ID NO: 139884 - DNA, 1737 bp, Homo sapiens
ggataattcgctttttaatccataaaaacctgcccaccaatgccaggtttttttttgccctgtcgtgagcgcacaccaaggcgaggttctcccttataagtctggggttacgtcaatagagagttttgtcacaattatctgcaaagtcatacgccgttaattgctttcttttttggcgtaagcgtaagatgcttcatctggtttaaaccaaaaggattaaacaatggcggagaatcaatcccccgtagaaaatgcaaaagagaaactggatcggtggttgaaagatggcatcaccacgccgggtggaaaactcccttcagaaagagagctgggagaactgctgggcattaaacgtatgacgctgcgccaggcgttgttgaacctcgaggcagaatccaaaatcttccgtaaggatcgtaaggggtggttcgtgacccagccgcgatttaattacagtccggagctgtcggcgagctttcagcgggccgcaattgagcaagggcgagagccttttctgggggtttaccgaggaaaacccgtacaggggattttccggggaccctcggcccttgatggcagtgacgccatcaactgaactctatcgcatcaccggctggggggcgctggaaggacatagggtggtttaattttccgcaatcaaacttgtgccttaaacgtgagaaacaggacgaaagctgttcattaacgcaggcattaccatcggaactcaaggtgagcgccgacaatgtctcattaaccggtgcggtaagcctcgcatcaatgctgacggagatatttctcctgcaacaagcacagggaatgccggagccggggtggggaaggatcaccgattcacaccagtggaacaccttgctaagtttgcataacgcgcaattttatttgctacaacgcacgccagaggttgcccgcagccgcgccaccccgttattagatttgatcaagacagcgttgacgccccatccaccgcaaaaacaggcgtatggtgggacctttaccacttccagtgcggtttatggccggacccgatactaatctggcaaatctgggcggcgcactgaagttcaactggacgcttccgggtcagccggataacacgccgccaggtggtgaactggtgtttgaacgctggcgtcggctaagcgataacagccagtggattcaggtttcgctggtcttccagactttacagcagatgcgtgataaaacgccgctgtcattaaatacgccgcccggagaggtgaaactgaccctggcaggatgtgaagagcgaaatgcgcagggcatgtgttcgttggcaggttttacgcaaatcgtgaatgaagcacgcataccggcgtgcagtttgtaatgcataaaaaagagcattcagttacctgaatgctctgaggctgatgacaaacgaagaactgtctaatgcgtagaccggaaaaggcgttcacgccgcatccggccactttcagttttactctttctcggagtaactataaccgtaatagttatagccgtaactgtaagcggtgctggcgcgtttaatcacaccattgaggatagcgcctttaatattgacgcctgcctgttccagacgctgcattgacaaactcacctctttggcggtgttcaagccaaaacgcgcaaccagcaggctggtgccaacagaacgccccacgaccgcggcatcactcaccgccagcatcggcggcgtatcgacaatcacca

SEQ ID NO: 139885 - DNA, 819 bp, Homo sapiens
tcactgtaggagttctaccgtccagtgaccgttatgcttacgcaccagcacatctggaatgacatactcaggttcgccagtctggatcgactgcccggggcgcggatcgagcgactggatcagattgacggcttctttcagcacatcttctttcagacgcgtgacgcgcattaaagtgcggaagtcgtgattggctaacagatcgagatgatcgctaatgatcagtctggcctcttccagccacggcgtggtcttatcgaattgggagagttggatcagcagacagtcacgcagatcttttgccgccacaccgaccggatcaaaccgttggatccgcttaaggacggcttcaacttcgtcgatgtcgatctcttcatcgcctatactttcgagaatatcttccagcgggacagtcagataaccggtttcatcaacggcatcgacgatagaggtagcaatagcgcggtcagtgtcggaaaacggtgtcagctcaacctgccacatcaggtaatcctgcaaggtctgcgtcgtttcgcccaccggtgaaatggtgtcccaactggcatcgagcggcagctcttccggcatctctttttgttcgagcgcgtcgccggtgtccagcgtttcactgtcttgcgtctcgcgggtgtcgatttcttcatgagtgtcgatttgctcaagcagcggattactctccagcgcctgctgtagctcctgctgaagttccagcgtcgacaactgcaacagacgaattgcctgttggagctgtggcgtcatcgccagttgttggctaagcctgagttgcaaaccttgcttcat

SEQ ID NO: 139886 - DNA, 676 bp, Homo sapiens
gaagcctccattttccgtcgcctcagcgtttacgataacctgatggcggtactgcaaattcgtgacgacttgtctgctgaacaacgtgaagaccgcgcgaacgagctgatggaagagtttcacattgagcacctgcgtgacagcatggggcagtcactctccgggggtgaacgtcgccgtgtagaaattgcccgcgcactggctgcgaatccgaaatttattctgctcgacgaaccgtttgccggggttgacccgatctcggttatcgacattaaacgcatcattgagcacctgcgcgacagcggcctgggcgtgctgatcactgaccacaacgtgcgtgaaacactggcggtttgtgaacgcgcttatatccaggagagtacgattctgaacatgaagcaaggtttgcaactcaggcttagccaacaactggcgatgacgccacagctccaacaggcaattcgtctgttgcagttgtcgacgctggaacttcagcaggagctacagcaggcgctggagagtaatccgctgcttgagcaaatcgacactcatgaagaaatcgacacccgcgaaacgcaagacagtgaaacgctggacaccgccgacgcgctcgaacaaaaagagatgccggaagagctgccgctcgatgccagttgggacaccttttacaccgctg

SEQ ID NO: 139887 - DNA, 1452 bp, Homo sapiens
tcattttaaaacatgaaatagtggcacatttagttgagcgtggcgttgaagtgattgataaaggaacctggtcgtcagagcgtactgattatccacattacgccagtcaagtcgcactggctgttgctggcggagaggttgatggcgggattttgatttgtggtactggcgtcggtattttcgatagcggcgaacaagtttgccggaattcgcgcgggcgtctggaaccaaccttatttccgcgcaacttttccgggcagcattacgacacccaaccggctgggtttttgggtcaagaagtgggtgggctccaaactggcaaaaaatgattgtggaatccctgggctgggcgcccaaataccaagggcgggcgttatttaacaacgccagcgccataacggcaccgttttgcggattgatcgacaccagcgccgagttcacttccggcacttgtgccagccaccatgcatcgccaacctgacgaacccagatttgctgacccgtttgcagaacatcggtcactttacgcggcgtcggtccttgctgagtatccgaacggtaaggacgcgcccagcgaacgccttccatactcaatgcgacggtcgacccgtccgccagcatcgccgtcgcttgctgaggattggcgctggtgactgcggcaggcagcagcggaccataggttggcagcgccttcagcgtatcggtaatcttgttgttatcccacgccgactcgcccactttccacagcacatttgccgggccgcgatagccgtggcgcatgtcgtagtccagcacgttattacgtaccgcctgctgcgcggcctgctgcactttgcgggtgatggtggtgtaaatgcgataaccgtcttcataggcactttcgccataacggttatacatctcctggcgcaccatttggctcagtacggcgcagagaaagcaatctgacccagctgtactacccgccgctgccgaagccatggtgcgcatgcggctaccaggccagacggcgtgaacttcatgtacgccaacggcatctgcggtacgaataatcgcagaaacgttatgaggtttgtggactttaatcacgtctggcatcacgcggattttgcgcatgatattcgccagatgcacacggtcacgagcggtcagacgaataaaggcgctgtagacgcgaccatctttctcttccgtattcaaactttgaatattcgaagtcgtggtgttaattgccgccgtcaggtttgccagcgcaccctgatgattgaacatctccaccttgatttcggtgatgaactcctgcgccgtctctttatcccattccacagccataaacttctctggctctttctggtagccacggatattacggcaggattcatggtggatcaccagacctttaccggggctgacgtgggcgataatcgggtcgccaggaataggcggcagcat

SEQ ID NO: 139888 - DNA, 2868 bp, Homo sapiens
atgaccgattttcgggagagcgacaccatgagtttatttgataaaaagcatctggtttcccccgccgatgccctgcctggacgtaacaccccgatgcccgtagccacgctgcatgcggtcaacggtcactcaatgaccaatgtacctgacggaatggagattgccatttttgcgatgggttgtttctggggtgtggagcgtctgttctggcagttacccggcgtttacagcaccgccgcacgtataccggcggctatacgccaaatccgacttatcgggaagtgtgctccggtgatacgggtcatgccgaagcggttgaaatatcccatgaagcgcgtcggcaagcgcggtgaaggtaaatttgaacggataagttgggacgaagccctggataccatcagtgataatcttcggcggatcctgaaagattacggcaatgaggctgtacatgtcctgtacggaacaggcgtagatggcggaaacatcaccaactcaaacgtcccgtaccgtctgatgaactcttgcggtggttttctcagtcgctatggcagctacagtaccgcacagatcagtgccgcaatgagttatatgttcggtgccaatgatggcaacagcccggatgatatcgccaatacgaaactggtcgttatgttcggaaataacccggcagaaacgcggatgagcggcggtggtgtcacttactacgtcgagcaagcccgcgaacgttcaaacgcacgcatgatcgtcatcgatccacgttataacgacactgctgccgggcgtgaagatgaatggctgcccattcgccctggcaccgatggcgcactggcctgtgcgattgcctgggtactgattactgaaaacatggtcgatcagccatttctcgacaaatattgtgttggttacgatgaaaaaacgctgcccgccaacgcaccacgtaacgcgcattataaagcctatattctgggcgaagggcctgacggcatagctaaaacgccggaatgggcagcaaaaatcaccagcatcccggcagaaaaaattatccagttggcacgagagatcggttcagcaaaacctgcttatatttgtcagggttgggggccacaacgacattccaacggcgagcaaacatcccgcgctattgccatgctttccgttctcaccggcaacgtcggcataaacggcggcaactcaggcgtacgcgaaggggcaacaggttcggcggttggggaagtcgttttcaatacttcaatgaccggttatcaagaaatcctcactgatccttcctattctcgtcaaatcgttactcttacttatccccatattggcaatgtcggcaccaatgacgccgatgaagaatcttctcaggtacatgcacaaggtctggtgattcgcgacctgccgctgattgccagcaacttccgtaataccgaagacctctcttcttacctgaaacgccataacatcgtggcgattgccgagtatcgatacccttttatggaaaagaaacacatttatctgttttgttctgcgggcatgtctacctctttactggtatcaaaaatgcgcgcacaggcagaaaaatatgaagttccggtcattattgaagcatttccggaaacactggctggtgaaaaaggtcagaatgccgatgtcgtgttattagggccgcagattgcttatatgttgcccgaaatccagcgtttgttacccaacaaaccggttgaagtaattgactcgctgctttatggcaaagtcgatggtattcgcctcgacgcctcaaccattgaaacacttaatggtctgaaaggtattggcggcaacgtatataacggaacattaggaataatgtctttaatggcaccgttctttattggcatggcgctggcagaagagcgtagagtcgatgcgctggcggctgggttgttatccgttgcagcatttatgaccgtcaccccatatagtgtcggtgaggcctatgcggttggtgcaaactggttaggtggggcgaatatcatctccgggattattattggcctggtggtggcagaaatgtttacctttggcttactggcgggctggcatctcgatatctggggaaagaatcggcggaggttactgcccgcctgggtacggttaaagcacgtgctgctgaacgcgagcaaacccgccaattgctggctggcagcgtgtgaaaccgatattaatgccagcaaaacccggcagcagctcaacgatgtcgcggggaaaatgaaaattattgaggcacggttaagcgcacttacaaataaccagacaaagtcattgaagcttaaaccggtcgcgttgccgaaagtggcaagccagcttcctgatgaactggggtactccttactggcccggcgggcagatttgcaggcggcgcactggtacgttgagtcatcgctaagcaccattgatgcggcaaaagcggcattttatcctgacatcaacctgatggccttcctgcaacaggatgcgttgcacttaagcgatctgttccgtcattccgcgcagcaaatgggcgttacggcaggcctgacgctacccattttcgatagtggtcgtcttaacgccaatctcgatatcgcaaaagccgaaagcaacttgtctatcgccagctacaacaaagcggtggttgaagcggtgaatgacgtggcgcgggcagccagtcaggttcagacactggcggagaaaaaccagcatcaggcgcaaattgagcgcgatgccttgcgtgtgtgcatccaccgccagttgggcgtgctcgctatgcacttgcacttgattttcatggtgactgattcgctccacatgggcattgaggataatatcgacgccctgatcgcgtaa

SEQ ID NO: 139889 - DNA, 618 bp, Homo sapiens
acgacccgcgaatgccggggaaaacgcagccttaaaataggccggatgcggcgtaaacgccttatccggcatacgattttattcggcctggctccccgtaggccggataagaacacatctattgttgttgttggtggtggtggtggttatgtaggcttgctgggcgaggatatcggcggcggtgatccagcgcagcgggatgcccggtgtgcgcgtatgcgggcggataaaaagctgctcgaaggcggtacgctgtcagcggcatgtctttgcaacatgtgtctggaacggacgtcaagtcacgtccggcgcaggaacgtggtcaacaatcgcctggtacagcggggtcatgtcttccgccatatcttcgtggtccagacccgcgataccgttcagcgcagaagcgtaaacgatcgggaagtccagctgctcgtcggtcgcgtcgaggttaacgaacagatcgaatacctgatccacaacccaatcaggacgcgcgccagggcggtcaactttgttgataacaacaatcggcttcaggccgtaagcaaacgcttttttggttacgaagcgcgtttgcggcatcgggccgtcaaatgcgtcaaccaccagcagcactga

SEQ ID NO: 139890 - DNA, 480 bp, Homo sapiens
atgctcaatgatgcgtttaatgtcgataaccgagatcgggtcaaccccggcaaacggttcgtcgagcagaataaatttcggattcgcagccaaaagggggacagagagatggcctggtttggcgctgacgttattaaaattgaacgtcccggcgttggtgacgtaacgcgtcaccagctgcgagatattcctgatatcgatgcgctttacttcaccatgcttaacagtaacaaacgttctattgagttaaataccaaaacagcggaaggcaaagaggtaatggaaaagctgatccgcgaagctgatatcttagtcgagaactttcatccaggggccattgatcacatgggcttcacctgggagcatattcaagaaatcaatccacgtctgatttttgcggtatttaccatcatgccgctggcggcagttaacgcaataacaatcctgctcaaacggaataaccgagagttattcatataa

SEQ ID NO: 139891 - DNA, 554 bp, Homo sapiens
gtcaacgccgggcaactggcgatttacgactacctacccgctgaactgcgcgacgcggtggaagatgtgattcttaatcgtcgcgacgatggcaccgagcgtttactggagcttgccgagaaatatcgcggcagcaaaaccgacgacaccgccaacgcccagcaggcggagtggcgctcgtgggaagtgaataaacgtctggaatactcgctggtcaaaggcattaccgagtttatcgagcaggataccgaagaagcccgccagcaggctacgcgcccgattgaagtgattgaaggcccgttgatggacggcatgaatgtggtcggcgacctgtttggcgaagggaaaatgttcctgccacaggtggtcaaatcggcgcgcgtcatgaaacaggcggtggcctacctcgaaccgtttattgaagccagcaaagagcagggcaaaaccaacggcaagatggtgatcgccaccgtgaagggcgacgtccacgacatcggtaaaaatatcgttggtgtggtgctgcaatgtaacaactacgaaattgtcgatatcgg

SEQ ID NO: 139892 - DNA, 1140 bp, Homo sapiens
tcaacaaagttgaccgccctggcgcgcgtcctgattgggttgtggatcaggtattcgatctagttcgttaacctcgacgcgaccgacgagcagctggacttcccgatcgtttacgcttctgcgctgaacggtatcgcgggtctggaccacgaagatatggcggaagacatgaccccgctgtaccaggcgattgttgaccacgttcctgcgccggacgttgaccttgacggtccgttccagatgcagatttctcagctcgattacaacagctatgttggcgttatcggcattggccgcatcaagcgcggtaaagtgaagccgaaccagcaggtcactatcatcgatagcgaaggctaaacccgcaacgcgaaagtcggtaaagtgctgggccacctcggtctggaacgtatcgaaaccgatctggcggaagtctggcgatatcgctgcgatcacgggcttgacgaactggcggtaccagctgattttccgtttgtattctctcccctcccctcgcgaaacgccctggccaaccaaacggccaggagggagccctccgtcaatgggcctgctgccggcctcataccggatgagagtggtaccaaacatgtcgtggaccaatgccaagcagcctcccggacggtcacatcgggcacggacatgcatggtgagtcgaacgctcttgtacttggcccgtcgcttaatacctttggccagcgcaacgcgtgaccgcgtcggggtatcttttagcataatcatggtaggggcgggaaatacggcgcttccgccatagaacaaggcacccgaccggttggcgccatgggtaatgttgaagtccgcatgtccgcgtttggcaacttgacaccgcagttcccagccgggcatcgccgcggacatggcactagctttggccggtggtagagccatattgccttcccattggaatcggcccgggtatggggcccgccgccgcggcggcggcggcggggttgtagggggccgcggcggcccgggccgggcgtcgacgtgtccagtggcgtagcgcaccgcggtagtggtcggcttagtcataagctgaagttcagcctgcggcctcagaatcagccccgcgccagcagcgccattgaccgcgcgcttgcccat

SEQ ID NO: 139893 - DNA, 2292 bp, Homo sapiens
ttagccacgactacgttgcacttccagccaccacttctccagctccgcggcaaaggcctggcggtcacgttgtgaaaggctatctggtccgccggtctggatcccactggcacgtaaggtatccataaaatcgcgcatcgtcaggcgctcacgaatggtcgctggcgtgtaacgttcgccgcgcggattaagcgccgcagcgcctttctcgatggcttcagcagccaaaggtatatctgcggtgatcaccaaatcgcccgcttcacactgccggacaatttcgttatcggcaacgtcgaaacctgccgcgacgcgcagcgtacgaataaatcgcgatggcggcacgcgtaaactctggtttgctaccagtaccagcggcatctgcatacgttccgccgcgcgatacaaaatctctttaattacattgggacacgcgtcggcatccacccaaattgtcataaagtcatcctttgttgggtaatcctctattgtgtcgcgcttttgccttccggcatagttctgtttatgcttctccgggttttttgaaatccgtggagacaaccgctctacgcaattgcgtccgatatccttcgggtgaacttgtgggacaaattttgccgacagggagcttccgcctttgatcaccgcttgctgaaagtgataatgcggccgcacgtttacccgtgacctgattgccgggataaccgtcgggattattgctatcccgctggcgatggcgttggctattggtagtgttgtggcaccccagtacggtttatataccgcagctgttgcggggattgtcattgctctgacgggtggttcacgctttagcgtttccggtccgactgcggcatttgtggtaattctcttccggccttgctggctggttgcgcggtgatggggattgttaacctgctcggcggacatgttgctaccatcggttcgcaattccactacgtcctggccgatggttctcagggtaacggtattccgcaactgctgccgcaactggtgctgggattctattcgcacactgctgcctgcagcattatcaatggcaggtaccgactgattagggtatatcacggggttgtttattgagcgaagcacataccttaagtgtcgaggctgtgggtgcacgatgcgcctcgtggcagtgtacgcaataacggccagtttgatggacaggtgcaggtgaccgatccgcaaggccgccgtaatcttggtggcaacgtcaatatccgtaacttcaaccttgcgatgataaaccccatctttacccgtggggaaaaagcagcggggatggtgagtgccaacttgcgtctgggtggtgatgtgcaaagcccgcagttgtttggtcagcttcaggttacgggtgtggatatcgatggcaactttatgccgtttgatatgcaaccgagccagcttgcggtcaactttaacggtatgcgctcgacgcttgccggtacagtacggacccagcagggtgaaatctacctgaacggtgatgccgactggagccaaattgaaaactggcgggcgcgggtaacggcgaaaggcagtaaagtgcggatcaccgtgccgccgatggtacgaatggatgtatcgccagatgttgtattcgaggctacaccaaacctgtttaccctcgatggtcgcgtggatgtcccttgggcgcgcatcgtggtgcacgatctgccggaaagcgcagtaggcgtctccagcgatgtggtgatgcttaacgataacctgcaaccggaagagccgaaaacggcgtcgattccgattaacagtaacctgatgtccggtaccgagtatggtgtagaactcgtagtgatgaggtaagtaatctacttttgtattcccgtcgtatggagccggcgttagcgcaaagcacagcttagccatcagggatgacgactctgcagccgcagctgcactggcggcgcaaaccggagagcgcaaagtaggacgtgacgatccttgcccgtgcggttctggtaacttatacaagcagtgccatggccgcctgcaataaaagctaactgttgaagtaaaaggcgcaggattctgcgcctttttgataggtttaagacaatgaagaagctgcaaattgcggtaggtattattcgcaacgagaacaatgaaatctttataacgcgtcgcgcagcagatgcgcacatggcgaataaactggagtttcccggcggtaaaattgaaatgggtgaaacgccggaacaggcggtggtgcgtgaacttcaggaagaagtcgggattaccccccaacat

SEQ ID NO: 139894 - DNA, 5298 bp, Homo sapiens; identical to SEQ ID NO: 136650

SEQ ID NO: 139895 - DNA, 1540 bp, Homo sapiens
tcacccacgcctattggtcccattggcgccactccgcgtcctaccggactgccccatccctgaggacacattcttaaccagcacggtaccttccgtaagtatgtcaccaggcacatcaaataatgccgacaaatggtcggtacccgtcggggcggcgaacaaggtaaagaagtgattgacggctacggtaaaccggcaacgttctaccagatgcaggacaacggtaaacccgttgaaggtcacgcttcccagatgcactacgaactggcaaaagattttgtcgttctgacgggtaatgcttatctgcagcaggtcgatagcaacattaagggcgataagatcacttacctggtgaaagagcagaaaatgcaggctttcagcgacaaaggcaagcgcgtaacaaccgttctggtgccgtcgcagcttgcaaaagcctataaaggccgtcgcgtggtagaagacgtcagcctgaccgtcaactccggggaaattgtcggtctgctggggccaaacggtgccggtaagaccaccactttctacatggttgtaggcattgtgccgcgcgatgcgggcaacatcattattgatgatgacgatatcagtctgctgcctctgcatgcacgcgcgcgccgcggtatcggctatctgccacaggaagcctccattttccgtcgcctcagcgtttacgataacctgatggcggtactgcaaattcgtgacgacttgtctgctgaacaacgtgaagaccgcgcgaacgagctgatggaagagtttcacattgagcacctgcgtgatgcctctctcggacatcgtctctgtcacacaagaggcggaagggtcgcggatagagggcagcggacggggggagaaaaacaagtgaagtcttgaataacacacggtgcccagattgttctttctttggcccacacactcgtttgcacgaaaccgtcgtttttccttcaaggggctttcatccacccgtgtttctccgacacgatgacccggaccgttgtgtgtatgactccgtttggcacgagagcgggtcgaatggtagaaaccagccaacgtgcgggatatcctgggtcgggcgcggcaatgaaatactgtgcgtgggtagagagcgaacattcccggctggcgaattgcctgattcgcgccgcagtcaattagctccggcgggcgatcggcggttaagagaatcagtttttctccggttaacccggcttcaatcagtgccggatagagatttgccaccgccgtgccggaggtcacaatcaccgccaccggctgcttgctgactttcgccagccccagcgccagatgccccaacccacgctcatcgaaatgggtgtggtgaatgaatgcggaattctccgccgccgctaacgttaacggtgtagaacgcgagcctggggcgatacagatgtgtctgacgccgtgacgcgttaatgcttccagaatgaccgccgcccagcgtcggttaaatgcgcttactgacatgagtttgtccggtatcaatattgcggctaagtataaggag

SEQ ID NO: 139896 - DNA, 2532 bp, Homo sapiens
ttaatgtggcagtcggttatctgctgcctgctggctggcttgctgatgtggatccccgactggtttggcgtgatgaatgtctggacgctgctcgttcccgccgcgctgttctttttcggtgccgggatgctgtttccgctggcgaccagcggcgcgatggagccgttccccttcctggcgggcacggctggcgcgctggtcggcggtctgcaaaacattggttccggcgtgctggcgtcgctctctttcgctaccaaacaggtcgcgcaaatcaagccagtgctcaatccacgccacagcgttgcgaccaatcggcaggcggcgctctttgctgcctttccccataacccacacttcaccagactccaggtcgaggtgtttaatatccagccccaccagctcagaaagacgcagacccgcgccgtacatcaggtcgcgtacagcgaggggatcattgatatcaatatccagcagccgattcatatcgtcgacgtcgatgtttttcggcagatgacgcggcgctttcggtgccgaaacacctttcgccgggttagctttgagttcgttctgggctgaccagccagtcaaaaaagctacgtagcgcagaaagccgtaacgccagacttgctgctcccagccgcgttcaatccaacgctccagaagctccggcaacatcagcgcaatttcatgaagtaactgcgttccttgcccttgttgatagtgactggcatcgcgactggtaaacagcacgacaccccaatcagcatcgcttcccagcatcgacatcgccaccgatcccaccgctttcgcttccggtagcaccaccagcagctctgccaggccgagatcgcgcgcccagcggtgaaagcgcatcagcatatcgtcgagactgctggcggcggtgagactgcgctgcaggtagagtaggcgataaaacaggccttcgttggcgatagcctgttccatcaacagcgccatgttctcttccagaacatgaatatgattacgtgcgcgggccatgtgccaactcgaccgacggggggatccactgtccaaatgtgaagagcggacagcgctgcacccatggtgagtaccaaagcggtgaagggtattttccatccaacgaagtttaactatgaatactaatgtgttcagaatacatcttccgtgaatggccgaaagccccggagagattaggtctcccgcagtccctgaatacgtcagctgaatctccttactgccgtatcccaacccgtataggccactgtaagatgtcaaagcaactgcaatttgttcctgtctcttgtctgtctgaggcaatgcctccgtgagagtacctatggacctgtgccagaggtctggcagtcttgacagtgctcggaacacggcgatgctctctgcctcttttaacgtccggtgcggtaacagcgcagcaaaatcactgcggtggtaacgcgccagcagtgcgccagggtagcgcatcataaatgtcgacagcagattcgtcagagtgaagaactgttcttcaacctggctgtgcccccaggtatcgctcaacatattgaaatccggcagacgaatcatcatcacgatcccgtgggtacctactttctcctgatcttccagtaacgttgctaactgattatcgaaaaagagtcggttattgaggccggttttcacgtcctgggcggcataagagcggatcagcgtatcaagacggctgtgttgttcgcgtgcgttctgaatttcacgaagcagcgtatccagcgcactgctggttctgggcggccattcatagatggttcccaacacattagagccacgctcaccgtttaagatacgagtagcccgggtttccagcaattcttgcccggcaagttgccgttgtaaccagcgtaccgccaggaagagcataacaatgatagagcggggatccacgggaatccgcccagggagatcggatgccagcacgagcgtcgttcccttaggatcccttggagaaatttcaggaaccggccggggacaagatcccgtacgcaggggtattcttccaggggtaaatcgttcattatcaggtgaagatggagcctcaatgtagacgctatgaacctgaatacacatctcctgcaagggcgcgttatccgccagatagttcgccatctggcaatattgcgcgacagagatattctccgctcgcatcgccgggtcgatccccattcccgttaacacctcgacgctaaacaggttgccgaggctgttacgaatggttttacgacgctggttaaaggcttcggtggtgatgcggctcaacacacgaacatctttaaccgggtgaggcatcgttgcatgaggaaccaggcgcacgacaaaaaaatccactgtgttttgtggtgtaaccgacgacggcggtacttccagtaccgggatcacattgcaatagtgtggcgccatgacgcttaatcgaccatacgctttgctgttcggtcctgcaaccagacgattcaccacctctttttgcaacataaagtgcat

SEQ ID NO: 139897 - DNA, 5738 bp, Homo sapiens
atgaccgattttcgggagagcgacaccatgagtttatttgataaaaagcatctggtttcccccgccgatgccctgcctggacgtaacaccccgatgcccgtagccacgctgcatgcggtcaacggtcactcaatgaccaatgtacctgacggaatggagattgccatttttgcgatgggttgtttctggggtgtggagcgtctgttctggcagttacccggcgtttacagcaccgccgcaggctataccggcggctatacgccaaatccgacttatcgggaagtgtgctccggtgatacgggtcatgccgaagcggtacgcattgtttacgatccttccgtcatcagctatgagcagttgctacgcaagtaccgttgtgttgccgttgcattgttgggctacttcaaatgcaaaccgatcctgctcaacccgagttataaatccatgcaggatgacttggcatttattgcgcgatttcactttaaagacctcaagtttcggcgctttagtttgaaagcggaccaaaaatcccgcatctatgagcgtgttttatcaattgctggagtcaacagctggaaagataagcaacatcaaccccggcttgttgaacatttgctggtctgcgctgaaagctgggtggcaccccgcgcactctttgacgcagcaatcgagtacctggcccaccagaagatcgccattcctgcctatttggttgcgtttttggttcttggtcccttagtgttgtctctcatcccttcgcagatgttgccgtcgttaacgtggtcaagcatcacgtattcaatagttgttatcgtcgaagctggctatcagtaccattctcgactgcgaagattcggtcgcgtcgaggttaacgaacagatcgaatacctgatccacaacccaatcaggacgcgcgccagggcggtcaactttgttgataacaacaatcggcttcaggccccacggatattacggcaggattcatggtggatcaccagacctttaccggggctgacgtgggcgataatcgggtcgccaggaatcctgccacaggtggtcaaatcggcgcgcgtcatgaaacaggcggtggcctacctcgaaccgtttattgaagccagcaaagagcagggcaaaaccaacggcaagatggtgatcgccaccgtgaagggcgacgtccacgacatcggtaaaaatatcgttggtgtggtgctgcaatgtaacaactacgaaattgtcgatctcggcgttatggtgcctgcggaaaaaattctccgtaccgctaaagaagcgatgctgatttgggtgtcgttgctgtttaccagtcgcgatgccagtcattatcaacaagggcaaggaacgcagttatttcatgaaattgcgctgatgttgccggagcttctggagcgttggattgaacgcgtatgcccgatttacacacagatggtcagcagaaggcgatcatcaattttgccagcgaagccggctgcaatctgcagcgggatcttgggtgtcttccagggctacgaggaatataacgtcaactccggggaaattgtcggtctgctggggccaaacggtgccggtaagaccaccactttctacatggttgtaggcattgtgccgcgcgatgcgggcaacatcattattgatgatgacgatatcagtctgctgcctctgcatgcacgcgcgcgccgcggtatcggctatctgccacaggaagcctccattttccgtcgcctcagcgtttacgataacctgatggcggtactgcaaattcgtgacgacttgtctgctgaacaacgtgaagaccgcgcgaacgagctgatggaagagtttcacattgagcacctgcgtgacagcatggggcagtcactctccgggggtgaacgtcgccgtgtagaaattgcccgcgcactggctgcgaatccgaaatttattctgctcgacgaaccgtttgccggggttgacccgatctcggttatcgacattaaacgcatcattgagcacctgcgcgacagcggcctgggcgtgctgatcactgaccacaacgtgcgtgaaacactggcggtttgtgaacgcgcttatatcgtcagtcaggggcatttgatcgcccacggcacgcctacagaaatcttacaagacgaacaccaggagagtacgattctgaacatgaagcaaggtttgcaactcaggcttagccaacaactggcgatgacgccacagctccaacaggcaattcgtctgttgcagttgtcgacgctggaacttcagcaggagctacagcaggcgctggagagtaatccgctgcttgagcaaatcgacactcatgaagaaatcgacacccgcgaaacgcaagacagtgaaacgctggacaccgccgacgcgctcgaacaaaaagagatgccggaagagctgccgctcgatgccagttgggacaccatttacaccgctggtacaccatccggcaccagcggtgaatacattgacgacgagctgccggtctaccagggcgaaacgacgcaggccttgcacgaagtcatcagtgggcaggttcagctgacacgggcagcgaaaagcagcacgagctacagttgcggattcagggggagcctgtctccgggcagcttaatctggcaggaagttttgatcgcaaagaagaacgctggaaggggaactcttagcaatacccgcttccagacgccggttggcccgtggtcgctgacccgcgatattgcgctggattaccgcaataaggagcaaaaaatcagcatcgggccacactgctggcttaacccgaatgcggaactgtgcgtgccgcaaactatcgatgcgggggccgaagggcgtgcggtggtgaatctcaaccgcttcgacctcgccatgctgaaaccgtttatgccagaaaccactcaggccagcggtatcttcacgggtaaagcggacgttgcctgggacaccacgaaagaggggctgccgcagggcagtatcaccctttcggggcgtaacgtgcaggtaacgcaaaccgtcaactgatgcggcgctgcccgtggcgtttcagactctgaatctgacggcggaattgcgtaacaaccgtgccgaattgggctggaccatccgcctgaccaataacggccagtttgatggacaggtgcaggtgaccgatccgcaaggccgccgtaatcttggtggcaacgtcaatatccgtaacttcaaccttgcgatgataaaccccatctttacccgtggggaaaaagcagcggggatggtgagtgccaacttgcgtctgggtggtgatgtgcaaagcccgcagttgtttggtcagcttcaggttacgggtgtggatatcgatggcaactttatgccgtttgatatgcaaccgagccagcttgcggtcaactttaacggtatgcgctcgacgcttgccggtacagtacggacccagcagggtgaaatctacctgaacggtgatgccgactggagccaaattgaaaactggcgggcgcgggtaacggcgaaaggcattcacttcgtgtcaaagcttgcttggcgtcgcctggttcctcctttctcgttcgtttgtaattatcacatcccaggtcccactttcaggctcagtgtatataccttcccttccttgcctaatcgtgcactgccatgtgggtcacgccagcctggtggggcgtctagtaaacggccgtcccagtcgtctcgtgctcgttttcgtgttggtacggcagccggcacgcacgtttctcccgaaccaacaagtggtggtcgctgggtagcaggcttaggtaatcccgtataccacaccccttgcgcccatgtccgggtgctaccggtcgctccgtgtggtttccgcgggtccgcacgccgttcccccgcctttcgcacgggccacggcgcaccgggtcctcctacttaccctatgctggggtatcctcctctgggccgaaatcggcgctatcgatggtgtagtagtagcagccggagcatcagctcggttggcgtgcacgaggccggggctacttcagctatcgctttcacgccgtatatggataacctcgtcgcgctgccgtcgggtatactggctattattcagtcgtttgtcgtccggccacgtcgcgcccgtttagttctaatcaactgtaaccggtaccctatcaacagccgcttctccttcgcccccctgcattttcccaagtcccctcccccatttctcccactgttgcacgtactagcccaaatccagttgcacgtgacaccctatcgtggctacgcctggtcacaaactacttcccactcctcgctaactcactctccaggccacgcttcgcgcaacactaatgttactaagcccacgacaccactacgtgactatctgctcctggctgccacgctgccggctacggcacaagctctgtctactagactttgcgttccgttatcgcaacacatcgggattagtgtgtacccacttcgcccggactcgcccccgccgggtcagcgcagcagcatcaacgcaaatctatgcgttttcaccgccctgatcaggtccaaatctctcgttgaacaactctcggtacatcccccccgcggtcccctagccggcctagcggcattttcgcgatcttgcgttttttctgagggaactacatcgcctcccgtcctcaacatttaccaattggcgcctgacaggatcgttgacgcgtccccgaggttttaccaaggaatcgcaaattacatgaatgtattgaacgtaatggcaatccaaaataagaaccaggaggagcagcagcatgaacacatgaccgcgcaccggaacgtgtggtgtctgaccggaaaatcggcgctatacgatggcatgccccttatccgccctaatggccataaccaaagcaaaccaccgtatatcaatttctattgggccaagccccacacaagttatagttcaatttcaaaatcggcgctatacgatggcagtaagcccagtaatatgccccgaggagttcatgtacgcacacgaggcaaccattatgggaacgccgtccgtaaggcctggggtccccgagccctcggtagtccgtgcagcctgacccaccggaaggatgtagggtggaattctagagtaagaccacctcgttgggaagttgtcaataatagggtacagggacctccaggtcctcgaggtccacctcgtcgacgtcgtccgcattgttttggaatacacggatgtaggcgtgaagggcatgtgccagttggaccaggagtgctgcatgaaataacaacagtaggaacagcagggacaatcggtcaagtgctctgtgattcagtgcgcaacgttatccgggcaccgagcgcatactgcattcttaaccaatcgtgtgcgcagctcccccatcgcccccctctattcaaaccgtcgttccagatttatccgggcttcttggtagatgcccgagtctcaattcgaacggtccgcgccgctccgtaccgaactgccaatttggggcctgatgggccacggaatgtgcttcttaatagggaaagcgatgttgcatgccgccatgcacgcacagtgccgtggctgatacacggcgtgcgatttcgtcaaggccgcgccacaaggcgatcggcaaatatcctgcatccgacggcgttggtcatcgctcagccacggcaaacgttcactggcaagacgagcagtaaacagtcacgttggggagtccgtcgtagag

SEQ ID NO: 139898 - DNA, 852 bp, Homo sapiens
ttaaaggtttttgccccccgactttggttggttctggtaccggatttgatttttagggggaaataaaccaagactttcgggccgggaataaccgcttggcggagaattgaacccattcggggggcgagctaatacattgggcgtcacgcgcttcggcagagagaatacacttccggcaaacagcgtattgtgcggattctgattgccggtttctggtatggttgtgatcaattttagcccggcatattgctgaatgcgcacgcccattttttcactaagcgggatatgttcgtaccacgcctgttgcagctgcgcgcaccagtcgccgcgatgcagaatgtgatccaaagtggcgacgggcttaatcattaaaaaatggcgaatcggcatggtggttggcgtggtgatttctccctgattaacaaaccccagcttggcgaagaactccaccgcgtcttcacgggcgctacaggtcacgcgcttaacgcctttctgacgcgccaccgactccagggtcatggccattagcgtgcctaaccctttgtcctgcacgtcgggatgaacggccataaagcgaatggacgcttcattgtcggcattaatatacagtcgggctaccggcaccagattaccctgctcgtcgacgaccataaggtgatgcgccatcgcataccacgcgtcgcgtatcgaacctttaggctgatgcaaggtctgcaaccagaaagtgacggagccataattgaccaggcgaacctgcatatacgtagcgaagagttctgattgcgtgtaaattttttgtctgtcctgccactctgtggagaaggtgcctgtttctcctttgccttccgccat

SEQ ID NO: 139899 - DNA, 2798 bp, Homo sapiens
atgtggctccgtattaatcgtacgcatgattcccgcgacagctggcttgcattgctgaatgaagcaggaatgaaaggtttccgcatgcggattaccctgatgctgggcagcttgccgatcagtcccaatttgctctccctgggcttggcgagcgatctcaatactgtcatcgacaacgtgctgcgtatttttccgttgctgttgtcgtggatccccttctggttgctgtacagcattgttcctaccatccgcgtacctaaccgcgacgcgattgtcggcgcgtttgtcgccgcactcctgttcgaagcaggaaagaaaggtttcgcgctttatatcaccatgttcccgtcatatcagctcatttatggtgtgctggcggtgatccccattctctttgtttgggtctactggacatggtgtatcgtcttgcttggcgcggaaattactgtcactctcggggaataccgcaaactaaaacaagcagctgaacaagaagaagacgacgaaccatgattgcattaattcaacgcgtaacccgtgccagcgtcaccgtggagggagaagtgacgggcgaaattggcgcgggacttttggtgttattgggtgtcgaaaaggatgacgacgaacagaaagcaaaccgtctgtgcgagcgtgtgctcggctaccggatctttagcgatgccgaaggcaagatgaatctcaacgtgcaccaggcggccggcagtgtgctggtggtttcccagtttaccctcgccgcagataccgaacgggggatgcgcccaagtttctccaaaggtatgagccagcttccagggttgtcacgggaaacaagagagagtatcgctatgtatcaccttcgggttccacaaacagaagaagaattagagcgttactatcagtttcgctgggaaatgttgcgtaagcccctgcatcaaccaaaaggttcggaacgcgacgcgtgggatgcgatggcgcatcaccagatggtcgtcgacgagcagggtaatctggtggcggtaggccgactgtatattaatgccgacaatgaagcgtccattcgctttatggccgttcatcccgacgtgcaggacaaagggttaggcacgctgatggcgatgaccctggagtcggtggcgccctatttttccgggtccgaaaccggaatgatgaccctcaaccgctatcgtctgcgacatatggcgaaacagggtaatcgctcggccaaacgcgtcgaaaaattgctgcgtaagccagaccgcctgataagcctggtgttaatcggcaataacctggtcaatattcttgcctccgcgctcggcactattgttgggatgcgtttgtacggcgatgcgggcgtggcaattgcgactggtgtgctgacttttgtcgtactggtatttgctgaggtattgccgaaaaccattgccgcgctgtacccggaaaaagtcgcttatccgagtagttttctgctggctccgctgcaaattttgatgatgccgctggtctggttgctgaatgctatcacccgtatgctgatgcgcatgatgggtatcaaaaccgatatcgtggatatgctgctgtcggtgctcgatctggaaaaaatgacgttgatgacatcatgttgccgcgcagtgaaattatcggtattgatatcaacgatgactggaaatcgattctgcgcactctcccactcacctcacggcgccatcgtgctctaccgtgattcgctggacgacgccatcagtatgctgcgagtacgtgaagcctggcgtttgatgtcggagaaaaaagagttcaccaaagaaaccatgctgcgcgccgcggacgagatctattttgtgccggaaggtacgccgctcagcacgcagttggtaaagtttcagcgcaacaaaaagaaagtcggcctggtcgtcaacgagtatggagacattcaggggctggtgacggttgaagatattctggaagagattgtcggcgatttcactacgtcgatgtcgccaacacttgccgaagaggtcacgccgcaaaacgacggttcggtgattatcgatggcaccgccaacgtgcgggaaatcaacaaagcctttaactggcatctaccggaagatgatgcccgcacggttaatggcgtcattcttgaggcactggaagagatccctgtcgcaggcacccgcgtgcgtattggcgagtacgatatcgatattctcgacaaattaagcttttgctttcgctacagtaaccatcgccgcacgaatcgtacgaccattcagcgtataacctttctgcataatgcccagtacgttacctggcgcaacgtcatcagattccaccattgcgatggcctgatgcacattcgggtccagtgggacgttagtttcggcgatcacttcaacgccaaacttacgcacaacatccagcatcgacttcagcgtcagctcaatgccttcaaccatcgcagacatatccgggttagctttatcagccacttccagcgcacgatccaggctatcaatcaccggcagcaattcgttgatgaatttctccagcgcgaatttgtgggctttttcaatatccagttcagtacgacgacgcaggttttccatttcggcttttacacgcaaaatgccgtcacgttcacgggtctgggcttcagccagctgagcttcgagattcgcaactttttcatcgcgcggatccacctgctcagcagaagcttctggctcaactgcctcaatctcttcgtgctgatccatgataatttcttccgggggcttgcccctcaggcttttgtcctctga

SEQ ID NO: 139900 - DNA, 611 bp, Homo sapiens
ctaggcagacaggggaggacctgcaggcacgaatatgcacgtcgcggctgggtacagcagtaccacattggcgcgctgcgtaataacaacctgcgtcagttcaaactgctggggccggatgtaggctttgactccatcaacgacaatggcgtgaatgtctcgttctcgattccaaaagaaggggcgatggcgttctttgatgtattcgccatgctgtgcgcccggatgtagtagcgcatatttccgaccatgtgttctatgccaacgccaataaagcagccacgccgctggtgagtgcggaagtccgtgagaacccaggtatttatccgctgcggatgttcgtgcgaagctgttcactctgaaagtgcaggatccgaaaatcgaccgtgcaaatcctacgatggtcaacatgcggtggatgatgtcagcctgaccatctacagactctagagatccccggtaccggctcggttcggacctagctcgaatctggagctcactcataggtgggaattgaccaatgagaacacctggacacaggaaggggacctcacacactcgggcctgttgtggggttgggggaggggacgggatagcattaggagatatac

SEQ ID NO: 139901 - DNA, 3309 bp, Homo sapiens
atggggttagatgcgattgagaatatgacatcaggtggactaatttatgccgtatctggtgtacctggattgattgctgcaaacagcattactaacagtgcttaccagttcggttatgatatggatgctattgttggcggagctcataatggggccgccgatgcaatgagacattgttacttgatgtgtcgaatgactaagacatttggatcaacaatagctgacgtgataggtaaaaacttagagcacaggcgatcacactattcaatgctgccgggcatgttcagggcggtgtgccagaacggtctggtctgcggcgagtcgtttggcgaggtgcgggtgccacacaagggggatgtggtgagtcaggttattgagggggcgtatgaagtgctggggatttttgagcgtgtggaagaaaagagggatgccatgcagtcgttgcttttaccgccacctgtgcagcaggcactggcaaaagcagcgcttacgtatcgctttggtgaggaccaccagccggttactgaatcgcagatactctccccacgccgctggcaggatgagagcaatgacctttggaccacctatcagcggattcaagaaaacctgattaagggcggactcagtgggcgtaatgctaaaggcggacgaactcatactcgtgccgcgagtggcctggtgatgttgattgccatcctggcgctggtttttgttcactacaatgcgaccggcgtctggaccttcaactatgaagagctgctgaatacgccaatgtccagtggtgtggaatacctgttaatgctgggcttcttcatcgccttcgcagtcaaaatgccggtggttccgctgcatggctggctgccggatgcgcactcccaggctccgaccgccggttccgttgacctcgcggggatcttgctgaaaactgccgcttacggtttgctgcgtttctccctgccgctgttcccgaacgcgtcggcagagttcgcgccaattgctatgtggctgggtgttatcggcatcttctacggtgcgtggatggccttcgcccagaccgatatcaaacgtctgatcgcctacacctcggtttcccacatgggcttcgtgctgattgctatctcaccggcagccagttggcctaccagggcgcggcctgttttgaataaggaaagagcatggacaaggaattaccgtggctggcggataacgcccaagctggaactgaaatataaaaaaggcaaaacgccgctcagtcatcgtcgctggccgggcgaaccagtgtccgttatcactggaagtctcatccagacattgggtgatgaattgctacaaaaagctgagaagaaaaaaaacattgtctggcgttatgagaatttttcactggagtggcagtccgccatcacgcaggccatcaacttgatcggcgaacacaaaccctcaatcccggcccggacaatggcggcgctagcctgtatcgcgcaaaatgacagccaacagttgctcgacgaaatcgtccaacaagaggggctggaatatgcgactgaggtggtgattgcacgccagtttattgcgcggtgttatgagagtgatcctctggtagtgacattgcagtatcaggacgaggattatggctatggttatcgctcagaaacctataacgaattcgatctccgactgcgtaagcatctctctctggcagaggaaagctgctggcagcgttgcgccgacaaactcattgccgcactaccaggaataaacaaagttcgccgcccttttattgcgctgatcctcccggaaaaaccagaaatagccaatgagttggcagttccggctttgcgtgaatttctcgctgccacaaaaatgcctgccacctgtacgctgaaagggctgggcgcagtagaagcagattatccgtactatctgggcatgctggggatgcacggcaccaaagcggcaaacttcgcggtgcaggagtgtgacctgctgatcgccgtgggcgcacgttttgatgaccgggtgaccggcaaactgaacaccttcgcgccacacgccagtgttatccatatggatatcgacccggcagaaatgaacaagctgcgtcaggcacatctgcgtgatgaacattcctggcgttacgaccatcccggtgacgctatctacgcgccgttgttgttaaaacaactgtcggatcgtaaacctgcggattgcgtcgtgaccacagatgtggggcagcaccagatgtgggctgcgcagcacatcgcccacactcgcccggaaaatttcatcacctccagcggtttaggtaccatgggttttggtttaccggcggcggttggcgcacaagtcgcgcgcccgaacgataccgttgtctgtatctccggtgacggctctttcatgatgaatgtgcaagagctgggcaccgtaaaacgcaagcagttaccgttgaaaatcgtcttactcgataaccaacggttagggatggttcgacaatggcagcaactgttttttcaggaacgatacagcgaaaccacccttactgataaccccgatttcctcatgttagccagcgccttcggcatccatggccaacacatcacccggaaagaccaggttgaagcggcactcgacaccatgctgaacagtgatgggccatacctgcttcatgtctcaatcgacgaacttgagaacgtctggccgctggtgccgcctggcgccagcaattataagaagcatcacaagttgaagcagacttttggcgtgaaaattatccccgacgttcacgacccaagtcaggcacagcccgttgctgatgtcgtgaatgtgattcagttgccggcgtttcttgctcgccagactgacctggttgaaacccatggcgaaaaccgcccgggacagatgggtaatatcgttgataaattcaaagaaggcggcaacgaaaaagtgattctttgcgatcgcggtgctaacttcggctatgacaacctggttgtcgatatgctgggcttcagcattatgaagaaagtgtctggtaactcgccggtgattttcgacgtgacccacgcactgcaatgccgcgatccgtttggcgcagcttccggtggtcgtcgtgctcaggtggctgagctggcacgagccggtatggcggtaggtctggcggggctgtttattgaagcgcatccggatccggaacatgcgaaatgtgatggtccatccgcgctgccgctggctaaactggaaccgttcctcaagcagatgaaagcgattgatgatctggtgaaaggtttcgaagaactggataccagcaagtaa

SEQ ID NO: 139902 - DNA, 2016 bp, Homo sapiens
atggcaacgagggccagtgtgactcccatgagcctcttctccgctggcacgtgcctcctgagtacctcttgtgtactcagtcctgtgggagatacagctgaggaaagctgctggcagcgttgcgccgacaaactcattgccgcactaccaggaataaacaaagttcgccgcccttttattgcgctgatcctcccggaaaaaccagaaatagccaatgagttggtaggccttgaatgcccgcgaactcattttcattctaaggagtggttaaaagttgttgctaatgaccccacagcggtgagaaaactcgaacactactggagccaggatatatttagcgatcgagaagccagctacatgtcgcatgaaaaccacttcggctacgcggcctgcgccgcccttttgcgcgaacaaggactggcagccattccgcgcctcgcgatgtatgcccataaagaagattgcggcagtctgctggtacaaattaaccatccgcaagtcatccgcaccttgctactggtggctgataaaaacaaacccagcctgcaacgtgtagctaaataccataaaaacttcccccatgcgacgctcgccgcactggcagaactgctggcgttaacagaaccaccagcccgccctggttatccaatcatcgaagacaaaaagctgcctgcacagcaaaaagcacgcgatgaatactggcgtacgctgttacaaacgctgatggcatcgcaggcacaactggcagcagaagtgatgccggggttaagtactcaaccccagtcagtgctgaagagttatttatcgggagtgcgccacggcacaggaggaacttcaccaatactgtcgcgccgggccatctcttggctgtaccgccagtacgacatgttcgcaaagtgtgccttcaatacaatcacaacgggcgaaacgaatactgctgcgggaataaaaacgcacatcgctcatcggcgtggtgtcctgcaccttcacgagagcagcgggattcatgacatcggcctgccccagtggcagctcttgctctgtctgatggtcgtcgtcatcgtcttgtattttagcctctggaaaggggtgaagacatcaggaaagttcggcccagaacaaggatttcaaaaagtgccccgcatatttgacttcagaaggactcaccccaagccgcggaagcagcgagagtggccaggacaagagcagggagccacatcctggaagggcgacagttccgggggcctgcgaggcgcgctgattgttagcggaattggctggttcgccgccaaaaatgacgcagaccgtcagcgtattgtccgtggcatgtttttcctctggctgttgatgggcgtcgggtttattgcctctgtcatgcacctgggatcgccactgcgggcgtttaactccctgaatcgaatcggagcttctggtctgagtaacgagattgctgccggttccatattttttgccgttggcggattatggtggctggtggcagtcatcggtaaaatgccgcaagcgttggggaaactctggttacttttcagcatggcgctcggcgtcattttcgtctggatgatgacctgcgtgtatcaaatcgacaccgtgccaacctggcataacggttacactacgctggctttcttcctgacggtgatggtgtggatccacggaggggggctgatggtgggtgcggcatcaacctacgatgggctggcccttgctgcccatgaaaacgtggtggtggtgaccattcaatatcgcctgggcatctggggattcttcagcaacgaagtgatcctgatgctgcactctactgcgttggcatttactgccacggtgccggatctgctgaaaatagcccgcgatattaacgccgccacgtatcaaccttttaccgccttcggcattgccgcggtgctctatttaatcatctcttatgtcctgatcagcctctttcgcagagcggaaaaacgctggttgcagcatgtgaaaccttcttcaacgcactga

SEQ ID NO: 139903 - DNA, 2376 bp, Homo sapiens; identical to SEQ ID NO: 122983

SEQ ID NO: 139904 - DNA, 1791 bp, Homo sapiens; identical to SEQ ID NO: 129098

SEQ ID NO: 139905 - DNA, 3777 bp, Homo sapiens; identical to SEQ ID NO: 139002

SEQ ID NO: 139906 - DNA, 1275 bp, Homo sapiens
  misc_feature (1)...(1275): n = a,t,c or g
atgggcaaaagacatgaacggccacctcacattaaaagcaacaccagtgtcctcatcgtgaaactagacgcccgatcttatcctcgaagcaatgaatctcaacaggaactggtgctccgcaggatggcaggacgcggagacgtggtgctgtcaggctgcccacgcagacagcaagccatgcaggacaccacccacgtcagtacgcatagatccacgcacgcagacatcctaccgagcagaaggcacagacccatgcacgcagcgacgcgacgcatccagggacgcgcactgctgcctactcatcccacacaggtctgcaacgatagctctgggcaccgagtgatcagccaagaatatacacgtatggttactctcttcatggttcagagagcaaagaaaactgtggcctatcctctcgctagtgtactagcagataatgacggacaaggaccatgtttggcccgaagcaaaagcgatgatgaaacgcgggcgaacgatgcggttaaccgctacaaattgctgaaaaaagatgcgcgtaccatcgccgcccagcaggtagcaaggctggaatccgccatgtgcctgcgccgccgctggtcgctggaaaacttccagctcttcctggttgagcatccgctggttcgtcacttaacccgccgtctgatttggggcgtttatagcgccgaaaaccagctactggcttgctttcgcgtagcagaagataacagctccagcaccgctgacgatgatcttttcaccctgccggaaggcgatatctctatcggcactcctcacgttctggaaatatcaccaacggatgctgccgcctttggtcagctttttgccgactacgaactgctaccaccgttccgccagctcgaccgtaacagctacgccctgacagaagccgagcgcaatgcccagtgtaacgntgaccccgctgtggcaggcagaaaatgcccgagtggtcgggtcatggggctggcgaataaaggctggataaagggcgaaccacaggatggaggctggatcggatggatgatcaaacctttgggtcgctggtcgttaatcatggaaatcgatgaaggctttgcggtaggcatgtcgccagccgaactcagcgctgagcagctcttaagcaagctgtggctatgggaaggcaaagcagaaagatatggctgggggagtaattcaacacaggaagcgcagttctccgtaatcgatgccatcaccgccagcgagctaattaacgatattgaagccctgtttgaataa

SEQ ID NO: 139907 - DNA, 2430 bp, Homo sapiens
atgccgacaacaccatcgatggcattctggttcaactgccgtataccggcgggtattgataacgtcaaagtgctggaacgtattcatccggacaaagacgtggacggtttccatccttacaacgtcggtcgtctgtgccagcgcgcgccgcgtctgcgtccctgcaccccgcgcggtatcgtcacgctgcttgagcgttacaacattgataccttcggcctcaacgccgtggtgattggcgcatcgaatatcgttggccgcccgatgagcatggaactgctgctggcaggttgcaccactacagtgactcaccgcttcactaaaaatctgcgtcatcacgtagaaaatgccgatctattgatcgttgccgttggcaagccaggctttattcccggtgactggatcaaagaaggcgcaattgtgattgatgtcggcatcaaccgtctggaaaatggcaaagttgtgggcgacgtcgtgtttgaagacgcggctaaacgcgcctcatacattacgcctgttcccggcggcgttggcccgatgacggttgccacgctgattgaaacacgctacaggcaaggcaaaatgtttgacggctcctcgattggcggctggaaaggcattaacgagtccgacatggtgctgatgccagacgcatccaccgcagtgattgacccgttcttcgccgactccaccctgattatccgttgcgacatccttgaacctggcaccctgcaaggctatgaccgtgacccgcgctccattgcgaagcgcgccgaagattacctgcgttccactggcattgccgacaccgtactgttcgggccagaacctgaattcttcctgttcgatgacatccgtttcggatcatctatctccggttcccacgttgctatcgacgatatcgaaggcgcatggaactcctccacccaatacgaaggtggtaacaaaggtcaccgtccggcagtgaaaggcggttacttcccggttccaccggtagactcggctcaggatattcgttctgaaatgtgtctggtgatggaacagatgggtctggtggttgaagcccatcaccacgaagtagcgactgctggtcagaacgaagtggctacccgcttcaataccatgaccaaaaaagctgacgaaattcagatctacaaatatgttgtgcacaacgtagcgcaccgcttcggtaaaaccgcgacctttatgccaaaaccgatgttcggtgataacggctccggctctcctccttcccagccccagtcccagcctacgccgccagaaatcttgttgcaggcgttgctttctgcgggctgcttctacgcggtttactatgtcacctacaaaacccgcctacgcaaacgcgttgctgatgtaccgcgccgtccgctgtttaccatgaaccgcgtggagaccaatcttacgtgggtgatcctgatgggtatcgcgctggtaagcgtcggcatcttcttcatgcacaacggctttttgctgttccggcttaactcctacagtcagatcttttccagtgaagtctccggcgtggcgttaaaacgcttcttttactttttcatcccggcgatgctggtggtctactttctgcgccaggacagcaaagcgtggctgtttttcctcgtcagcacggtcgcctttggcttgctgacttatatgattgtcggcggcactcgcgccaatatcatcatcgcattcgctatcttcctgtttattggcattattcgcggctggatttcgttgtggatgctggcggcggcgggcgtgctggggattgttggcatgttctggctggcactaaaacgctatggaatgaatgtgagcggcgatgaagcgttctatacgtttctctatctcactcgcgacaccttctcgccgtgggagaatctggcgttgctgttgcagaactacgacaacatcgacttccagggcctggctccaattgtccgcgatttctatgtctttatcccttcctggctgtggccgggtcgcccgagtatggtgctgaactcagccaactactttacctgggaagtgctgaataaccactccggactggcgatctcgcctacgcttataggctcactggtggtgatgggcggcgcgttgttcatcccgctcggggcgatcgtggttggtctgatcatcaaatggttcgactggctgtatgagctgggcaaccgcgagcctaatcgctataaagctgcgatattgcacagtttctgctttggggcgatcttcaatatgatcgtgctggcgcgtgaagggctggattcgtttgtctcacgcgtggtcttttttatcgtggtcttcggcgcatgtctgatgatcgcaaaactgttgtactggctttttgaaagcgccggactcattcataaacgtacaaaatcatcgctccggacgcaggttgaaggataa

SEQ ID NO: 139908 - DNA, 888 bp, Homo sapiens
  misc_feature (1)...(888): n = a,t,c or g
cggattaatgggggcccccccaggggttttccctgtcccggcgtgtgaaagcacgggccaaggcccaagctggcaagccgacaagggtggcttctaagggatcctttggcggcccaagggctgtaaagtgtgggacccccagtggtattggcgtgaggttcggtgaaaagaacaaaccgggtccgggcagccttgtggcgagccgtctggctggcgaaaccttgagcgagcacgaagtggcgcagttcaaaactgcggtactggtgttccttggtgccgaatatgcacgtcgcggctgggtacagcagtaccacattggcgcgctgcgtaataacaacctgcgtcagttcaaactgctggggccggatgtaggctttgactccatcaacgaccgtccgatggcggaagagctgtctaagttgctgagcaagcagaatgaagaaaacctgctgccgaaaaccattctgtactgcctgaacccgcgcgataacgaagtgcntgggcaccatgatcggtaacttccagggcgaaggtatgccgggcaaaatgcagttcggttccggctggtggtttaacgatcagaaagacggtatggaacgtcagatgacccaactggcgcagctcggtctgctgagccgctttgtcggtatgctgactgacagccgtagcttcctgtcatacacccgtcacgaatacttccgccgcattctgtgccagatgatcggtcgctgggtggaagcgggcgaagcaccggcggacatcaacctgctgggcgagatggtgaaaaatatttgctttaacaatgcgcgtgacgggtacgtgctagcccaccgggctccagtccaattccttgcttgtgccactttgggcaagatgcagcctctctaa

SEQ ID NO: 139909 - DNA, 833 bp, Homo sapiens
cagaagccagcggagccgacccaggttaccgtacggcatcagccgatcatcaccgtcagccagatggcgtgcagcatgtccggatcggccagattctgtaaaaccggcatcagcccctggctgaatgcctaccacacgccgaccaaagcgactttgcagagtgttaattgagaacagcagcagcagagatgccgcgaggatcaccgaagcaatcgcgctcgctgccgggtaatcaaactcctgtaagcgcacaaaaatcatcagcgacgtcacttccgtcttccacgcgatatttccggcgataaaaatcaccgcgccaaattcaccaagactacgggtaaacgacagcgccacgcccctcaccagcgccggagaaagctccggcagcaccactttgcagaaactctgccagcgcgttgcaccaagcgtttccgccgcttcttcatattccgggcctaacctcttccagcaccggctgcacggtacgcaccccaaacggaatgctggtaaaggccatagccaccgcaatccccagccatgtataggtgactttgatatcaaacttcgccagccattcaccgtaaaaaccctttacgtaaaagagaaaggccagcgttgaggcggcgacagggtgttgccagctcaaagggtaaatccatcagcgcatcaagcagcgtgcggcctgggaagcgatagcgggttaggatccacgccatcagcagaccgaaaacgccgttaaaaatcgatgccacaaacgccgacagcagcgttactttgtaggccgcgaccacctgcgggttggtgatcacctcccagtactgcgcccagctcat

SEQ ID NO: 139910 - DNA, 3051 bp, Homo sapiens; identical to SEQ ID NO: 129099

SEQ ID NO: 139911 - DNA, 4443 bp, Homo sapiens; identical to SEQ ID NO: 121527

SEQ ID NO: 139912 - DNA, 3708 bp, Homo sapiens
atggaagagtacggcggcgtggacgttcgcctgtatcgtattcctgacccgatggcatttttgcgccagcagaaaaacctgcatcgcattgtggtgcaaccgcaatatctgggcgacgggctgaacaatacgctaacctggctgtgggataactggtacggcaaatctcgccgcgtgatgcagcgtactttctcttctcagtcacggcagaatgtgactcaggcgttacccgaattacagctcggcaatgccattattaaaccttcccgttatgtacagaacaaccagttttccccgctgaaaaaatatcccctggtgaaacagttccgttatccactatggcaggctaaaccgttcgagccgcagcaagggagccggggactgtacctcgtcgaggcgatggttggtgggtatcgggcgacgacgggtggtgttgtttccgataccgtggcgcttagcaaagtgtccagcaaagagcttctggtgtggaccgcgggtaaaaaacaggtgaacgaacccggctccgagatctttggactgacggctttgcggattaccgcggaaaatcaggactgtgcatcgctgaccccggaaacttttttaccgcgtatccatgtcattaaaggtgtgaacatttccacggcgacagtttgccgtcagtgtgaagatgcaccgtgcgctaacgtctgcccgaatggtgctatcagccgtgataaagggtttgttcattgtgaagcacgaacgcttcatttgtttgcaaaaacctccgtggcggtcttaaagtacggctcgcaaaaaccgtcaagtagttcatcagagagcgtctcccagctgctgcaactggcgcgtgccggacagtcattttcttccggtaattatcaacatgtaaaactgctggaagatgtcattctcccctcgtatgacgaactcagtaccatgctcgaccagcgacagcaaaccctgctattgccagagagcgccgccgacatcaccgttcagggtgatgcaaccctgctgcggatgttattgcgaaacctggtagaaaacgcccatcgttacagcccgcaaggcagcaacattatgattaagctgcaagaagatgacggagcggtcatggcagttgaagatgaaggaccaggtattgatgagagtaaatgcggggagttgagtaaagcgtttgtacgtatggacagccgttatggcgggattggtctggggttaagtattgtcagccgcattacacagttgcatcacgggcagtttttcctgcaaaaccggcaagagacttccggcacgcgggcctgggttgttgctttgcaacgtctgattgctcaacttgatcctgtcggaactgcttttaatcgtctggtagaacaacagaaacagctcaatgaagcaaaagctaaggggatgctttctcctgacatgtatgaggagctttctggaaaacttcgtgctatgcggagtgagcttgaggttactcaatcacaattaagcaaaaccggaatgtcggcaaaacaaacggcttttgctatgcgcatgttgcctgcacaaatgacggatattgttgttgggttgtccactgcagggcggccattcagctatgcaggagacaagaatcgccagcttacccgttacagcgatacccgctggcatgaagattccgtgcgtaaccgctggttcagcgtgatggtggggccgtctgtgcgcgtgaatgaatggttcagcgcgtatgcgatggcgggtatggcttacagccgtgtgtcgactttctccggggattatctccgcgtaactgacaacaagggaagaactgtggacaatagttcatcaaagttgatcgctattcagattgctgttttgcgctttctcgcctctgctcagctgagaaagaggtttgcgcctgccatttaccgggtaaatcctgaatcgtacgggcagccaggaacaacgcgttactttcctgcgtcgatagccagcgttcaccaaacgcctgctgcgaaagtgtgttcagcaaaaggcgcgtatccgatgagtgaaaaggtggtgttcagtcaactgagccgtaaatttattgatgagaacgatgccacgcccgccgaggcgcagcaggtggtctattacagcctggcgattggtcaccaccttggggttatcgattgcctggaagcggcgctcacctgcccgtgggatgaatatctggcatggattgccactctggaggcaggcagtgaagcccgccgcaaaatggaaggcgtgccgaaatatggtgagatcgtcatcgacattaaccatgtgccgatgctggccaacgcattcgataaagcccgggcagcgcaaacttcgcagcagcaggaatggagtacaatgctgttaagtatgctgcatgatattcatcaggaaaacgccatctatttgatggaaaaagcgggtaaagtggaccatcccctgataagggtcgccctgcaagaagtagttaaccatcaccgcaggttcttcaaggttgccagtaaagttgctcaaaccgttacgcgccggttgcggaacataatcacgccaggcgacagcgaccggtcgaacaatatacggatttccttgttgggtgcaacgccggtaatggtggatgtcgaccgcgatacgctgatggtcacgcctgaagctatcgagtcagccattacgccacgcactaaagccatcattccggtgcattatgccggtgcgccagcagatattgacgccattcgcgccattggcgaacgttacggcatcgcagttatcgaagatgctgcccatgccgtcggtacgtattacaaagggcgacatattggcgcaaaaggtaccgctattttttcatttcatgccattaaaaatattacctgtgctgaaggtggcctgattgtaactgataatgaaaaccttgcccgccagctacggatgctgaaatttcacggtctgggtgtcgatgcctatgacagacaaacctggggccgtgcaccgcaggctgaagtcttaacaccgggctataagtacaatctgaccgatattaacgccgcgattgccctgacacagttagtcaaattagagcacctcaacacccgtcggcgcgaaattgcccagcaatatcagcaagcactggcagctctcccctttcagccattaagccttcccgcctgtgcgcacgttcacgcctggcatctgtttattattcgtgtcgatgaacaacgttgtggtatcagtcgcgatgcgttgatggaagcgttaaaagaaagaggcattggtaccggggtacattttcgcgccgctcacacacaaaaatattatcgcgagcgttttcccacgctgtcgttacccgaataccgaaatgggaatagcgaaccgcatctggttctttggcgctggttccccgatatgtactacccgccgatggccgaacatgttattcacaggccctttagacaacttgtgcaatatgttcatcatttcatatggttgtttaccatctgtatatgcccatcaggagttcacattttcgcagctatatccctttgtctaatgcgcatgtctgatgatcttactgcttcttccgcttcctcgctcactgactcgctgcgctcggtcgttcggctgcggcgagcggtatcagctcactcaaaggcggtaatacggttatccacagaatcaggggataacgcaggaaagaacatgtga

SEQ ID NO: 139913 - DNA, 1539 bp, Homo sapiens
gactacgccattgcgctgcttaagcacaacggcgacagccgcgcggaaaaccaccgcgaaagctttgagacttgcccggaatgtaagcgccagaaatgcctggtgccgtccgaccgtattgaactgactcgccatatgaaagaggccatctgatgagcaatttattaggcccccgtgacgccaacggcattccggtccccatgacggtggatgaatccatcgccagcatgaaggcgtcgttactgaaaaaaatcaaacgttctgcctatgtttaccgcgtggactgcggcggctgcaacggttgcgaaatcgaaattttcgccacgctttcgccgctgtttgatgcagaacgcttcggcattaaagtcgttccttcaccgcgtcatgcggatattttactgtttaccggcgcggtcacccgtgcaatgcgatcccctgcgctgcgtgcgtggcagtccgcgccggacccgaaaatttgtatctcactacggtgcctgcggtaacagtggcgggatcttccacgatctctactgcgtgtggggcggtacggataaaattgtccctgtggatgtttatatccctggctgcccgccaacgccctgccgccacgctgtacggctttgcaatggcgctcggcctgctggagcagaaaattcacgcccgtgggccgggtgaactggatgaacaaccggcggagatcctgcatggtgatatggtgcagccgctgcgcgtgaaagtggatcgcgaagcacgtcgcctggcgggttatcgttacggtcgtcaagatggcggatgattcctttacacagttagggcagggcgaagaacaggttgcacgctggctggaagcggaaaacgatccgcgtctgaacgagattgtcagccatctgaatcatgttgttgaagaggcgcgtatccgatgagtgaaaaggtggtgttcagtcaactgagccgtaaatttattgatgagaacgatgccacgcccgccgaggcgcagcaggtggtctattacagcctggcgattggtcaccaccttggggttatcgattgcctggaagcggcgctcacctgcccgtgggatgaatatctggcatggatcgccactctggaggcaggcagtgaagcccgccgaaaaatggaaggcgtgccgaaatatggtgagatcgtcatcgacattaaccatgtgccgatgctggccaacgcattcgataaagcgccgggcagctgcaaacttcgcagcagcaggaatggagtacaatgctgttaagtatgctgcatgatattcatcaggaaaacgccatctatttgatggtgaggagactgcgtgactgacgttttactctgtgttggcaatagcatgatgggcgatgatggcgcaggtccgctgctggcggaaaagtgcgccgccgccgcgaaaggtaactgggtggtgattgacggcggtagcgcaccggaaaacgacatcgtcgctatccgtgaactgcgcccgacacgactgctgattgtcgacgccacggatatggggctaaaccccggcga

SEQ ID NO: 139914 - DNA, 1953 bp, Homo sapiens
atgaaaatttcccgcctcggagaagcgcctgattaccgcttctcgctggctaatgagcgtacttttctggcgtggatccgtactgcactaggatttctggcggcgggggttgggcttgatcaacttgcgccagatttcgccacgcccgtcattcgcgaactgctggcgttgttgttgtgtctgttttccggcgggttagcgatgtatggctacttgcgctggttacgcaatgaaaaagcgatgcgtctgaaagaggacctgccctacaccaacagcttattaatcattagcttaatattgatggtcgtggcggtgatcgttatgggactgcgggccatgctgatggcgatggagccgatatgggagagtgattttcatacgctctcatatggcttccggcctgagcgcagtgtccaccacgcgatccgcacggtgaaattacagctcacagactgtggtgaaacccggggacgctgggtgattgaaggcgacctgtccagttacttcgacaccgtacatcatcgactgctgatgaaggctgtacgccgcaggatcagtgacgcacgtttcatgactctgctgtggaaaaccatcaaggcgggacatatcgatgtcgaagataaacgggcggccagtgaaggtgtgccacagaacaaaattatatcgccgctattatcgaacatcatgctgaatgagttcgatcaatacctgcatgagcgatacctgagcgggaaagccagaaaagatcggtggtactggaataacagtatccaacgggccgaagtacggcggtcagagaatactggcagtggaaacccgcggtggcgtactgccgctatgccgatcaccgcccgtcgcccgacgctgcttcgtccgctgtggtgcgaaaatcgatggacgggaatggtcgagctggatcgctatctgaatgaacatggcgtacagggatcggcgctgggacgtccgtggctacctccaacggagtctggtgcgcttctcaatgttgtggcgctggccctcgtcgttcttgccattgtggtacaaatggcggtaaccatggtgctgcatggtcaggtcgaaagcattgatgttattcgttctatcttctttggtttgctgattacgccgtgggcggtctactttctatcggtggtcgtcgagcaactggaggagtcacgacaacgtctgtcacggctggtgcaaaaactggaggagatgcgcgagcgcgatttgagcctcaacgttcagttaaaagataatattgcccagctaaatcaggaaattgccgttcgtgaaaaagcggaagcagaactgcaggaaaccttcggccaactgaaaattgaaatcaaagagcgcgaagagacacaaattcataacccccatactagcctggcggatacttatccattacctccagagggtagccgtttagtggggcagtcgtttactgtaactgttcctgatcacaatacccagccgctggagacttttgccgcacaatacgggcaagggttaagtaacatgctggaagcgaacccgggcgctgatgtttttttgccgaagtctggctcgcaactcaccattccgcagcaactgattttgcccgacactgttcgtaaagggattgttgttaacgtcgctgagatgcgtctttattactacccaccagacagtaatactgtggaagtctttcctattggtatcggccaggctgggcgagaaaccccgcgtaactgggtgactaccgttgaacgtaaacaagaagctccaacctggacgccaacgccgaacactcggcgcgtatatgcgatacgaggggagagtttgcctgcatttgttcctgcggcacctataattccatggggtgtacgctatttatattggcaggttgtatgccattccatggttctcacaacagtctgtctgcaccgcaatagatattccagaagctaa

SEQ ID NO: 139915 - DNA, 1191 bp, Homo sapiens; identical to SEQ ID NO: 124815

SEQ ID NO: 139916 - DNA, 1117 bp, Homo sapiens
ctaaagatccgagtagctcaccagcaggcacttggtttgctggtaatgctccagcatcatcttgtgggtttcgcgaccgatacctgattgtttgtagccaccaaacgccgcatgtgccgggtaagcgtgataacagttggtccacacgcgcccagcctgtatgccgcgccccatcttataggccagattaccgttgcggctccagacgcccgcgcccaggccatattgcgtatcgttcgccagctccagcgcttcttccatcgttttgaaggtggtcaccgccagcaccgggccaaaaatctcctcctggaacacccgcatattgttctgaccaaacagaatcgtcggttcgaggtagtagccgtctttcagttcaccttccagcagcttgcgccgcccgcctgtgagcacgtcagcgccctcttttttaccgatatcaatgtagttgaggatggtttccagttgcccgtgagaaacctgcgcgcccatttgcgtcacgctgtcgagcgggttaccgctacgaatgctttcgacacggcggatggcgcgttccataaagcgttcgtagatagattcctgcactaaagcacgactcggacaggtgccaacttcgccctgattaaagggcaacagtgcaaaccttcgtcatgtgccctttttcagcattgtactgtggcgcgccgtacggacaagccatgtggcagtagcggcagccgatacaaacatcttcatcaaccaccacaaagccatcttcacgcttatgcattgcgccgctggggcagacttttgtacatgcggggtcatcgcaatggttacaggagatggagagataataagcgaacacgttctggtgccagacgccattatcttcctgccagtcgccgccagcgtattcataaatacggcggaaactgacttccgggccaagatctttaaaatctttgcacgccagttcgcaggttttacagccagtacagcggtcttcgcaaaaacccgcaatgcggttatcagcatccaccgtttggtcattccagatagccgccgtatacaacacggcgtggttataaatttccgcaatggcagcacagtcggctttgcgggcaaaacggatggacat

SEQ ID NO: 139917 - DNA, 1191 bp, Homo sapiens
atggatgagggaatgaaaatgtacggtttgctccccaccattacgatagatatgcgtgacgtctgcagcaaatcgaacgccttccccacaattaagggtctgccattccccatcaacgcacagatcaagttgtccatcaatgacgacgacatgttcgattacccccttctcatggggcgtcgattcgcttattgcaccagatgccatctgaatcgagaagtgttcaaagcagagttgtggatcataaggaaacagcgaagcgtagcggactgcggcggagaaataaatgttgaaaatggtacgttcaacccggtggcaattttccataatgtcgcgaccgtcggactggactcattacgctcaatctgccctaacattgctttagaaacgcccgtcgcttctgccagtcgcgaaagactccagccgcgctgctggcgtagttgtttaagtgtggtggataaaaagcgagcgagattttccatgcgactcctccggcaaaacggaagtttatcacttgtgcgttataacggacaaatgctacggtgcctgtacgctataacgcgcgttcccggtgggcatcttgccattgaaagtcaactggcaatgaagggaactgtgctggaaacgctggttatggatggtgatgagaacacggtgctggtaccaggcgatcgttacgcgcaaatgcgtaatgtctatttcatcccttccgcgctggcgctgaaaaactggctgaagaagtgtggttttgtagatatccgcattgcggatgtgagcgttaccaccacagaagagcagcgacgcaccgaatggatggttaccgaatcgctggccgatttcctcgacccacatgatccggctggccctcagagacccttggcagggcctgattttcaggaccacggccgcaagcaacctcctggccccctcctccccttcagctctgcaaaccagctccctgaccaaggagactttcagaactgccctctgatcctgcaatctgagaggaccacaattaaggacttacaaagcaaagcgcctgataaaaatatcgttattttcacccataatcattgcctgacatatattgctaaagataagcgtgacgcgacatttaaacctgattatctggtgcattatgatttgaatgtcgccacccgaaaaacgttacgtttgaaaggtcttctgtaa

SEQ ID NO: 139918 - DNA, 1788 bp, Homo sapiens; identical to SEQ ID NO: 138921

SEQ ID NO: 139919 - DNA, 504 bp, Homo sapiens
atggtaccgaagcccatcggactcgcgttttctatgtacttcgctgaccttacccttatggcgctcattccgttacgcgaaatagggatgaagtcacggcatgaaggactgtccggaacccggttattaggtatggaaccgttgtggaccagcgatctaccgcctaagcatatccgcattgcggatgtgagcgttaccaccacagaagagcagcgacgcaccgaatggatggttaccgaatcgctggccgatttcctcgacccacatgatccggccattttccagatctggccatgcaccttcatgcacgcataccacgccttttttgatcccgtcagtcaccaccgcgcctgtcaaaatctgaccacgtttgttccagacacgcaccagatcgccattcgcaataccaaagcgtgcagcatcttcggtgtgaatagtgattggttcacgatcggcgatcgcatattttttacgcagttccgcatagttaagctgactgtgtaa

SEQ ID NO: 139920 - DNA, 2373 bp, Homo sapiens
atgaatatcagatttgcattggattcttcatcagtaacactggatgctagaaaacagtgggataatgccttcaaagttctgaagggtgtggtggcagcaggtgcctcttctgcatggccagggtcccccatcgctcacagctgtcagtgtgcacatgctcagacctgcaccattcctgtccagcccctgcagttaccacctggaatcttcagccaggacttggaggctgtgagggactcctttgaaggtcaaaagttcgaaggcgttcgaagccgagcaggctccctccaggggctggaaggcgcggtttatgatatcgaggagtttgtcgatagcgtcgccaagatttatcacacgccgccacccgccttaaaacaggacaaacttgcctttatggctgcgacagctgacgcgcagttgttgaattatgtcgcctggccgcaggcaacgcttcacggtggacgaggcggaaaagttatcggttttatgatgccaaaagtttctggtaaagaaccgattcatatgatctatagcccggcacatcgtcgccagagttaccctcattgtgcgtgggattttctactctatgttgcgcgcaatattgcttcatcttttgctacggttcacgagcacgggcacgtcgtgggtgacgtaaaccagaacagttttatggtaggtcgcgacagcaaagtggtactgattgatagcgactcctttcaaattaacgccaatggcacactgcatttatgcgaagtcggcgtgtcgcattttacgccgccagagctacaaaccttgccatcatttgtcggttttgaacgcacagaaaatcacgataattttggccttgcgttgctaatttttcacgtcttgtttggtgggcggcatccttattctggtgtgccgcttatctctgatgcgggtaatgcgctggagacggatattacccatttccgttatgcctacgcgtcagataatcagcgacgtggtttaaaaccgacgacacgttctattccgctatcgatgttaccgagtgatgttgaagccatgtttcagcaggcattcacggaaagtggcgtggcaaccggacgaccgacggctaaagcgtgggaagcggcactggactctctacgccaaaagttaaaaaaatgtaacgtatcagcaaagcatgtttaccccgctcatttgactgactgcccgtggtgtgcgctggataatcaaggtgttatctattttaatgaactcggcgaagaggtcattaccaccggcgggaaatttgtgctggcgaaagtctgggcgatggcagaaccgcgttatattattttggttcctgtgctggcggctatctggattattggcagtctgacaagcaaagcgtacaaagcagaagttcagcaacgccgtgaggcatttaatcgtgcgaaaatggactatgaccatttagtccgccagatccagcaggtaggcggcctggaaggttttatcgccaaacggacgatgctcgaaaaaatgaaggacgaaattctcgggttaccggaagaagagaaacgcgctctggcagcacttcatgacactgcaagggaacggcagaagcagaagtttctggagggattttttattgatgttgcctctattcccggcgttggccctgcgcgtaaagcggcgttacggtcttttggtattgaaacagccgcagatgttacccgtcgtggcgttaagcaagtgaaagggtttggcgaccatctgacccaggcggttatcgactggaaagcgagctgtgaacgccgttttgtgttcaggccgaatgaagcgataacgccagcagacagacaagcggtaatggcgaaaatgaccgccaaacgacatcggctggaatcggcgttgacagtcggcgcgacagagttgcagcgattccgccttcatgctccagcacggaccatgccgttgatggaaccgttaccgtgccagcccggcggtgacggagccaaagtcatcgccgcctgcaatcggaatgcccggcaactgttctgccagcgcttttttaatcagcggagaacgggcgctaccgccggtcagggccaatttttccggttagcgggcatcgcgtaccagatcgttaagcagacgaccgttggcactactgtagaaatcactctgcgcaggtacgtcgttgatggcaaccgcattccaccacggcaggatcggcagggcgatgcctttttcggtttcgccacccatacccagcagtggcatcaggtttttaaacgccagcgcgatatccagatcgttaccgccaatacggcaaccactgtgacccagcaggctggcttcacgatcgagacgcgaacgccactgcggccccatcagcagcaatga

SEQ ID NO: 139921 - DNA, 2577 bp, Homo sapiens
atgattattctcttcctcatccgcacggttcggaccgacacccacgtagtggaagatactggccgcaaaggtagccgcaaagccaacagccgcgagcggtttccagatgcctttccagaatttcacggtttcgctgatttccgggttctccggcaagccatgatacagatttggcttgtcagcatggtgcagcacgtacatgacgtgtgtccacgtatccgggcgctacaacatgatctcagtgatgttatcggtcaggaacaaggaaagcgaggactggaaattaccgctgctggcgggcacaaccttttactgattgggccgccgggaacaggtaaaacaatgctcgccagccgtattaatggcctgttgccagatttaagcaatgaagaggcactccatattgcgccaggtaaaaaacagtggagttggggacacagtgaatttggccaggcgtgggataagagtctgaccgacaataacggcccgtatatcgaactgatgaccggtatttttgccgataaccagcccgattttacctggcttgatgcttacgaagagaagcgttttgagcagtatttcctgccttatcattctttgggcatggtgcaaaatgcctcccgcgatgcggtgataaaactccagcgtagtaagcgggggattgagtgggggctgtatgccatctctccgttgaacggataccgcctggcgatccgcgaaatcggtaaatgcaacgcgttacttgatgatgccgtggcactgatgcctgcgaccgccatccagggcgtgttgcacggtatcaatcctgaaaggctgaccattgagctctccgatgccgacggcaatattgtactgagttatcaggaacatcagccgcaagcgttgccgttaccggacgtcgccaaagcgccactggcagcacaagacattaccagtacagatgaagcctggtttatcggtcagcatctggagcaatatcatcacgccagccgttcaccgttcgattactacctgcgcggcgtggcgctggacccgctggatatcgctggcgatgaccagcaggatccgattgccgactccgcgcgggcgatcctcgacggtcacattgtgctgtctcgccgactggcggaagccgggcactatccggctatcgatattgaagcgtcgatcagccgcgcaatgacggcgttgatcagtgagcaacattacgcgcgaattcagtttcaccgcgtatgcccagcgcagaaccgtaaacagataggcatcagcaattgtaaatctttgcccgcagatccagtgctcatccttcagtgcctcgttcacatattgcagcttcttctccagctgcgcgcgaactgtcggtttgtactcttccggtgtatcagggcgaaacagaggtgtgaaacctttatgcagctcggtggcgatgtaattcagccattcgatggttttatagcgggaaatactgtttaccggtgccagcaactggcggtcggggacgctgtcggcaagatactgcataatcgctacgccttccgtcagcaaagtaccgtcatccagcagcaatgcaggcacctggcccttagggttaacggcaaagtgttggctgagctgcaagctagccagctggacgtcacatgtggtaccccgacacgcacagcctccctggcagctgctagcgtgaagcatctatggcagttgaaagatcaactggtcaatgaaggtgaactggtgctggaaacgctggttattgatggtgatgagaacacggtgctggtaccaggcgatcgttacgcgcaaatgcgtaatgtctatttcatcccttccgcgctggcgctgaaaaactggctgaagaagtgtggttttgtagatatccgcattgcggatgtgagcgttaccaccacagaagagcagcgacgcaccgaatggatggttaccgaatcgctggccgatttcctcgacccacatgatccgggtaaaacggtggaaggttatccggcacctaaacgcgcgctggctgatcaaacgccgttaacttcggtgcattgcccgtatatttttcgatatacaccaacgctgagttaccggcacaggcatttgccagctgcgagctggggatatccgccgttaacacgttcgcactgccgtttttacacaagccattttccagatctggccatgcaccttcatgcacgcataccacgccttttttgatcccgtcagtcaccaccgcgcctgtcaaaatctgaccacgtttgttccagacacgcaccagatcgccattcgcaataccaaagcgtgcagcatgctgttcagattttcgttcctgctggcggtgccgatgatgatgggcgcaacggcgctcgatctctactaaagctggggcttcctgacaagcggcgatatcccgatgtttgccgttgggttgatcaccgcttttgtggtggcgctgatagcgattaaaaccttcctgcaattgattaagcgcatttcgttgatcccgttcgccatttatcgctttattgtgccgcctgcggtgtatgtcgtgttcatttaattgaggaatagtgtcggatg

SEQ ID NO: 139922 - DNA, 4411 bp, Homo sapiens
ttacatgcggcccaagacaattcttcttcttccaatgtggctcagggaagccaaaagattggacaccccggcggtagcgcccgttctccgctgattaaaaaagcgctggcagaacagttgccgggcattccgattgcaggcggcgatgactttggctccgtcaccgccgggctggcacgcgtcgccatggtgcacattgtggcgcttatgagccccggtcccgatttcttttttgtctctcagaccgctggcagtcgttcccgtaaagaagcgatgatgggcgtgctgggcattaccttcgccggttgtcctgatgaagtgatgatcggcagggaatagcatctgcgccggacgcgcatttaccgtctgctcatgatgtgccagacattcgatgttcaaaccataccggtgcgcgagataatcctgacaggcgttatgccgcacgctaaccatcgcactaacttgcggtttaacggcaagtatgatcaacgtttccaggcggcggcgcaatgcatgcattacggattcatcgcatacatacagctgatacgcgttatcttccggcaccaccagcgaaccacgcggacctgccaccgtatgtatatatcccggatgcgcctgcatcaggcagccggtggctaccccaccgttgcgaataaagaaatcaatactcagttcatggcgtagttcgtcatacagcggcgtatagtcacgcgacggtgggcgtggtccttccggccagacgatgccctcttccgttaccgttggcggcacaaagtgagcgtcaggttgaggaaagaagagtttgctgtgatcgtcaaagccacgcgatgtaaaaccgtccagcgcctcgccgccgaggacaatgcgctgaaaaccggcgctgatgcgctcaacgcgttaccacagtcagttcacggaagcgcagatcattgcgaacgcgccagacccttgaattgatacgacttctagctcggtaccccgccacgatggcgagaatgccaatcgaaatccagaataacatgcccgcctggtgccagttgtgtttgatagccaacgccatcaacgcgccgtagcccagcatggtacgaaaccacgccagtgatgtgcgctccggctgcagtcctgggtcggcaatgcgtctggctttgcggctatccggcatacaacgccagtcccataacgatcaccgccacgaccatcaatattaagctaatgattaataagctgttggtgtagggcaggtcctctttcagacgcgtcgctttttcattgcgtaaccagcgcaagtagccatacatcgctaacccgccggaaaacagacacaacaacaacgccagcagttcgcgaatgacgggcgtggcgaaatctggcgcaagttgatcaagcccaacccccaacaaaagaaatcctagtgcagtacggatccacgccagaaaagtacgctcattagccagcgagaagcggtaatcaggcgcttctccgaggcgggaaattttcattgttgctcctttgcaatttcactaacgctctacctttagcggtttttttaagaatttcgtccgcccgtttcctgatatgcttttgccatccgctacaaggaggtcagatgggtatcatagctcaaaataaaatcagttcattgggcatgctgttcggtgccatcgctttaatgatggggattatccacttttcattcggccctttctccgcaccaccgccaacgtttgaaagcatcgtggcggacaaaacggctgaaattaaaagaggtcttctcgccggaataaaaggcgaaaaaattaccaccgtggagaaaaaagaggacgtagatgtcgataaaatcctcaatcaaagcggtatcgcactggccattgctgcgctactttgcgcatttattggcggtatgcgtaaggaaaatcgctggggcattcgcggcgcgctggtttttggcggcgggacgctggctttccataccttgctttttggtatcggcatcgggggcagcaatttggtggaattccttaactttttcttcctgaccgcgggttactgggttaagccaccctgataatggccggcgggtgaacaataagggggcattaatggcaaaaacttctggttttttctctccccctttaccccttgtgtcggccggtgtcatagtcgcgtacaactggcgaatagccatcttgtggacgtggacgaaacgcccccatccagcgcggccgtgcatctttacgccacggacgcagactccattggtaactgcggaacggatcgcgaattttgtccatgtaatccaataaggcgtcatgcattttgctgcgaacgtctgcaaaacggatatcatcgatcagggtatgcatttcatttgggtcattacggcgatcgtaaagtcatcactaacttttattctctgattgccaaaaatcatctttcacactggctcgaaacgctgcccgcgcagattgctaactggcagcgcgagcagcagcacgggttgtttaagcagtggtcaaatgcggtggagtttctacctgaaattaaaccgtatcgtcttgatttattgcatagcgttacggcagaaagcgaagagccactgagcgcagggcaaattaaacgcattgaaacgctgatgcgcaacctgatgccgtggcgcaaagggccgttctcactgtatggcgtcaacatcgataccgaatggcgttccgactggaaatgggatcgtgttctgccccatctttctgatttaaccggacgcaccattctggatgtcggctgcggcagcggttatcacatgtggcgcatgattggcgcaggcgcgcacctcgcggtggggatcgaccctacgcaactgtttctgtgccagtttgaagcggtgcgtaaactactgggtaatgatcagcgcgcgcatttgttaccgttagtattgaacaacttccggcactgaaagcctttgataccgtcttttcgatgggcgtgctttaccatcgccgttcaccgctggagcatctatggcagttgaaagatcaactggtcaatgaaggtgaactggtgctggaaacgctggttattgatggtgatgagaacacggtgctggtaccaggcgatcgttacgcgcaaatgcgtaatgtctatttcatcccttccgcgctggcgctgaaaaactggctgaagaagtgtggttttgtagatatccgcattgcggatgtgagcgttaccaccacagaagagcagcgacgcaccgaatggatggttaccgaatcgctggccgatttcctcgacccacatgatccggccattttccagatctggccatgcaccttcatgcacgcataccacgccttttttgatcccgtcagtcaccaccgcgcctgtcaaaatctgaccacgtttgttccagacacgcaccagatcgccattcgcaataccaaagcgtgcagcatcttcgtttcatttgcgcttcgtaccacgcattcgtgcgccatttcacattcgtctctagaggatcccccggcgattctgtttaagattgccgatcgaatggaacaaaacctcgagctgttagcgacagctggaaacctgggataacggcaaacccattcgcgaaaccagtgctgcggatgtaccgctggcgattgaccatttccgctatttcgcctcgtgtattcgggcgcaggaaggtgggatcagtgaagttgatagcgaaaccgtggcctatcatttccatgaaccgttaggcgtggtggggcagattatcccgtggaacttcccgctgctgatggcgagctggaaaatggctcccgcgctggcggcgggcaactgtgtggtgctgaaacccgcacgtcttaccccgctttctgtactgctgctaatggaaattgtcggtgatttactgccgccgggcgtggtgaacgtggtcaatggcgcaggtggggtaattggcgaatatctggcgacctcgaaacgcatcgccaaagtggcgtttaccggctcaacggaagtgggccaacaaattatgcaatacgcaacgcaaaacattattccggtgacgctggagttgggcggtaagtcgccaaatatcttctttgctgatgtgatggatgaagaagatgcctttttcgataaagcgctggaaggctttgcactgtttgcctttaaccagggcgaagtttgcacctgtccgagtcgtgctttagtgcaggaatctatctacgaacgctttatggaacgcgccatccgccgtgtcgaaagcattcgtagcggtaacccgctcgacagcgtgacgcaaatgggcgcgcaggtttctcacgggcaactggaaaccatcctcaactacattgatatcggtaaaaaagagggcgctgacgtgctcacaggcgggcggcgcaactgctggaaggtgaactga

SEQ ID NO: 139923 - DNA, 1788 bp, Homo sapiens; identical to SEQ ID NO: 138921

SEQ ID NO: 139924 - DNA, 3313 bp, Homo sapiens
atggccaaagatatcggccttgatcccgtgggaatgggctatgtgttctctgctttctcatgggcttatgttatcgggcagatccctggtggctggttgctggaccgttttggttcaaaacgcgtctacttctggtcgatctttatctggtcgatgtttaccttgctgcaaggcttcgtcgatatctttagtggattcggcattatcgttgccctgtattcggcgcttcctgtccagagtgagcgtgctaacgcgtatcttcaggagtacaacaatgagttctttaagtcaggctgcgagcagtgtggaaaaacgcacaaatgctcgttactggatagtggtgatgttgtttatcgtcacatccttcaactacggcgaccgcgctacgctctctatcgccggttcggaaatggccaaagatatcggccttgatcccgtgggaatgggctatgtgttctctgctttctcatgggcttatgttatcgggcagatccctggtggctggttgctggaccgttttggttcaaaacgcgtctacttctggtcgatctttatctggtcgatgtttaccttgctgcaaggcttcgtcgatatctttagtggattcggcattatcgttgccctgtttacgctgcgcttcctggtcgggcttgctgaagcgccatctttccccggcaacagtcgcattgttgcggcctggtttccggcgcaggaaaggggaacggcggtgtcgatttttaactccgctcaatacttcgcaacggtgatcttcgcgccgattatgggctggctgacgcatgaagtgggctggtcacacgtcttcttctttatgggcggtctggggattgtcatcagctttatctggttgaaagtcatccacgagccaaatcaacatccgggggtaaataagaaagagctggagtacatcgccgcgggtggtgcgctgatcaatatggatcagcaaaacaccaaagttaaagttgctcatcgaggcgatggaaagtcgctcgagtcgcccatgtcagtacccgttcaacatcctatgtatatcgatggacagtttgttacctggcgtggagacgcatggattgatgtggtaaaccctgctacagaggctgtcatttcccgcatacccgatggtcaggccgaggatgcccgtaaggcaatcgatgcagcagaacgtgcacaaccagaatgggaagcgttgcctgctattgaacgcgccagttggttgcgcaaaatctccgccgggatccgcgaacgcgccagtgaaatcagtgcgctgattgttgaagaagggggcaagatccagcagctggctgaagtcgaagtggcttttactgccgactatatcgattacatggcggagccaaacaacctggcgggcattgcgctggttaattcaacaaagcgttccggtgttatacgtcccgtcatcacgccactggaaaacagtaactgcatgcggttttccacaccggcactgctggcggcgctgtttgtttgcctgaaggcggcgaacgtgacgtccatacgtactgaaccgacctacacgctttatgcgacgttcgataacattggcggcctgaaagcgcgctctccggtcagtattggtggcgttgttgtgggtcgggtggcggatattacgctggacccgaaaacctatctgccgcgcgtaacgctggaaattgaacaacgttataaccacattccagataccagttcgctgagcattcgtacttccggcctgctgggggaacaatatctggcattaaacgtcggttttgaagacccggaactggggactgctatcctgaaggatggcgatacaattcaggacactaagtctgcgatggtgctggaagatctcattggtcagttcctttacggtagtaaaggcgatgacaataagaatagtggcgatgcgccagctgctgcgccagcaaaagcagagaacattcgtctgctgatcctcgatgtcgatggcgtactgtcagatggcctgatttatatgggcaataatggcgaagagctgaaagcgttcaatgttcgtgacggttatggcattcgttgtgcgctcacctctgatattgaagtcgctatcattaccgggcgaaaggctaaactggtagaagatcgttgtgccacattggggatcactcacttgtatcaggggcagtcaaacaaactgatcgcctttagcgatctgctggaaaaactggcgattgccccggaaaatgtggcttatgtcggcgatgatctcatcgactggccggtaatggaaaaagtgggtttaagcgtcgccgtggacgatgcgcatccactgttgggtaccgagatcgatgcgtatatcgaaaatgctgactatcagtataataaaaagcgtctgcgtgaaatcgaccgtcgcgtgcgctatctcactaaatgcctggaaaatctcaaaatcgtcgattactcccctcagcaggaaggcaaagtcttttttggcgcgtgggtggagattgaaaacgacgatggcgtgactcaccgtttccgtattgtcggctacgatgaaatttttggccgtaaagattacatctctatcgattccccgatggcccgcgcattgctgaaaaaagaagtcggcgatctggcggtggtgaatacccctgccggggaagcgagctggtatgttaatgctatcgagtacgtgaaacctcgcctgaatcaaacggttcgtctgctgcttgagcatgagatgggacaggtttggatcagcggcgaaatttctaatttcacgcaaccagcttccggtcactggtactttacactcaaagacgacaccgcccaggtacgctgcgcgatgttccgcaacagcaaccgccgggtgaccttccgcccacagcatgggcaacaagttttagttcgcgccaatattacgctctacgagccgcgcggcgactaccagataatcgttgagagtatgcagccggccggtgaagggctgctgcaacagaagtacgaacagctcaaagcgaagttgcaggctgaaggtttgttcgatcagcaatacaaaaaaccacttccctcccctgcgcattgcgttggtgtgatcacctcaaaaaccggtgctgcgctacatgatattttgcatgtgttaaaacgtcgcgatccttctctgccggtgatcatctaccctgccgccgttcagggcgatgacgcgccggggcaaattgttcgcgccattgaactggcgaatcagcgcaatgagtgcgacgtattgagaccatgcgtctggtgccgccgcgtacggtgccgaaggcgctgtcggtga

SEQ ID NO: 139925 - DNA, 3468 bp, Homo sapiens
atgttgtttatcgtcacatccttcaactacggcgaccgcgctacgctctctatcgccggttcggaaatggccaaagatatcggccttgatcccgtgggaatgggctatgtgttctctgcttctcatgggcatcagcggatcgcctggctgggagggcaaagttcctcattaacccgtgcagaacggttcatcccctttgggcgccctacctggtgcccctttaatcttcggcccttcggtcccggccatcagccggccgggctcatgttcgccggagtggccgaccttggatacttcgggctattcggccccgcgctgctgtttaccgcgtatgcaggttcggaagccgtttttgcgcacgtattcggtgacgcacttggcgacgctgggcttcttatgagcctgctgtcaccctttgacgtggtgatatggatgacggatggctggccgctgtatgaatcccgcctgaagggaaagctgcacgtaatcagcaagcgatatacgcagcgaattgagcggcataacctgaatctgaggcagcacctggcacggctgggacggaagtcgctgtcgttctcaaaatcggtggagcagcatgacaaattggagtcattaccgggccaaatcgataaatcgctcgatgaagcctcactcagcctgcgcgccggttccctgcgtaccattacgcacatcctgctgccgctgctgcgcccggcgatcctctcggcgctgatttacagctttgtgcgcgccattaccaccgtcagcgccattgtgttcctcgtcacgccggatacccgcgtagcgacggcttacatcctcaaccgcgtggaagatggcgaatacggtgtagcgattgcctacggttccattctgatcgtggtgatgctggcgattattttcatctttgactggctgatcggtgaatcacttctgtccagattcgagaagactgtcgacgatcacagtcagagcagactgccagcagaaggaagcattctgagtcaagatatctctggagttaagcttttttctctattgaccccagcacggggctatgttcctattcgggccccttgccctttcttatgcgcgtcgtaccggttcttttgcgtagcccggcagcaaggtcttgatgcggcgctgattgatgcgccgttagcagtcgatgcacttacgcctcttagcgagttgctctctcatgtcggacaggcaccctgttcggtgcccgtggtcgacgaggaccaacagtatgtcggcatcatttcgaaaggaatgctgctgcgcgctttagatcgtgaggggggcgtgcgcgttccggttgattatatcctcaacggtttccaccccttgctgctgggtatgcccgcaccgctggcgattatcgttttcgctctcatcgcctgcagatttccggggtcgaatggtcggataaggcgttcacgccgcatccgacatttgcacaagatgcctgatgcgacgctgtccgcgtcttatcaggcctacagtgaacagaaccgcctacagtgtacagaaccccagggcggatatggcgttcacgccgcatccgacaacagggacaaacgccacgataaaaaaatggcactgaaggttaaatacccgactaaatcagtcaagggcgagtttgaggtgaaggaagacatgaaactgacatctaaagggcgctatgccgtgaccgcaatgcttgacggtgcgctcaactctgaagcgggcccgcatttcgagctgttccctcatctgtcgattatcgaaaacctgaccctggcgcaggtgaaagtgcttaaacgcgataaagcgccggctcgtgaaaaagccctgaaactgctggagcgtgtcgggctttctgctcacgccaataagtttccggcgcagctttccggcggtcagcagcagcgtgtggcaatcgctcgcgcgttgtgtatggatcctattgcgatgctgtttgacgaaccgacatcggcgctggatccggagatgatcaacgaagtactggacgtgatggtggaactggcgaacgaaggaatgaccatgatggtggtgacccacgaaatgggctttgcccgtaaagtggcgaatcgggtgatctttatggacgaggaacaccaacaggagcacaatgcacggcaatctgtagatgcgaccaggcatgagacgcttcgcagtgagtatatcgccctgtgctctaaagacttcctcgaaaaaccgagtgaagggtcgatcgtggtcaatggccagacgatcaatctggtgcgcgacaaagacggtcaactcaaagtcgccgataaaaatcaactgcgcttactgcgcacacgcctgacgatggtattccagcacttcaatctctggagccatatgacggtgctggaaaacgtcatggaagcgccgattcaggtgttgggcctgagcaagcaggaagcgcgcgagcgggcggtgaagtatctggcaaaagtcgggatagacgaacgtgcgcaggggaaatatccggtgcatctttccggcggtcagcaacagcgtgtttctatcgcgcgggcgctggcgatggaaccggaagttttactgtttgatgaacctacctcggcgctcgatcctgaactgacctgggacgacgaaaatgtccacaaattgatggatttatccattaacaaaaactggatcgacaaagaagaatatccgcaatccgcagccatcgacctgcgttgcgtaaatatggttgccgatctgtggcatgcgcctgcgccgaaaaatggtcaggccgttggcaccaacaccattggttcttccgaggcctgtatgctcggcgggatggcgatgaaatggcgttggcgcaagcgtatggaagctgcaggcaaaccaacggataaaccaaacctggtgtgcggtccggtacaaatctgctggcataaattcgcccgctactgggatgtggagctgcgtgagatccctatgcgccccggtcagttgtttatggacccgaaacgcatgattgaagcctgtgacgaaaacaccatcggcgtggtgccgactttcggcgtgacctacactggtaactatgagttcccacaaccgctgcacgatgcgctggataaattccaggccgataccggtatcgacatcgacatgcacatcgacgctgccagcggtggcttcctggcaccgtcgtcgcccggatatcgctgggactttcgcttgcgcttgtgtggggatcgtccggcaacgctgctgctggaatccgcagatatcgacagcaaagatgatttaaaaagcctgctgctggtagacagtgcgctgcgcattacagctttaggtgacactgtcacaatccaggcactttccggcaacggcgaagccctcctggcactactggataacgccctgcctgcgggtgtggaaagtgaacaatcaccaaactgccgtgtgctgcgcttccccccttccactgctggatga

SEQ ID NO: 139926 - DNA, 3129 bp, Homo sapiens; identical to SEQ ID NO: 131826

SEQ ID NO: 139927 - DNA, 1835 bp, Homo sapiens
atgagttctttaagtcaggctgcgagcagtgtggaaaaacgcacaaatgctcgttactggatagtggtgatgttgtttatcgtcacatccttcaactacggcgaccgcgctacgctctctatcgccggttcggaaatggccaaacatatcggccttgatcccgtgggaatgggctatgtgttctctgctttctcatgggcttatgttatcgggcagatccctggcttcgtcgatatctttagtggattcggcattatcgttgccctgtttacgctgcgcttcctggtcgggcttgctgaagcgccatctttccccggacaaagtcgcatagttggggactggtttccggcgcaggacaggggaacgggagtgtcgatttttactccgttcatacttcgcaagggtgatcttcggccgatttgggtggttatcttgatggcaggtcagctgcatgcgctaatgtcgactctagaggataccccattctctaacaaagcgggaatgcgcttgcgcagatggattaacgcggcggtaatgcggttaaacccactggcttgcctagcgaccagatccaaccaggttaattggttactcctgacaggtaacatcagtgtgtacccagtgggcagcagcgaaccaacacgccggcggtcaacacccatcaacagcactccacactttaataaaacaatcctgcccatcaatgcacgatattctcccaccctaccgtccagtgacgggacccggtggacaacacgtatagacgataaacccacagttggccataaattcgcccgctactgggatgtggagctgcgtgagatccctattgcggcccgggtcagttgtttagggacccgaaacgcatgattgaaggctgtgccgaaaacccccttcggcgtgggtgccgactttcggcgtgacctacgctggtaactatgagttcccccaaccgctgcccgatgcgctgaataaattccaggccgatcccggtatcgacatcgacatgcacatcgacgctgccagcggtggcttcctggcaccgttcgtcgccccggatatcgtctgggacttccgcctgccgcgtgtgaaatcgatcagtgcttcaggccataaattcggtctggctccgctgggctgcggctgggttatctggcgtgacgaagaagcgctcccgcaggaactggtgttcaacgttgactacctgggtggtcaaattggtacttttgccatcaacttctcccgcccggcgggtcaggtaattgcacagtactatgaattcctgcgcctcggtcgtgaaggctataccaaatcaacccaacctgccagaggatctccacccgcaaataattgccaagcccagccagaaacgcctgatcgagcagtaatccatccaactgacgggtacgaaagcgcggcgacaataatcgttctttcaccacctacggcgtcagattcggatccagcacatcgggaccaacgcgttgtaaaaacggatgcgtggtcagttgttccggggtcaacatctgaatatccgaggcgctataaagcagaatggttttgtcagccgtttgcagttttacccgcaatactcgcgtggtctgcggctctttggcggtatcaaccacgcgccagacgccgtaaagctgattatggctgtagagcgttaaattctttgaaaaatgagttaacaacgccttaccacgcgtttccacatgggtaacgtgttgaccattagtggtgaatggttaagggtccacatgaaaggacattccgtatcagtcttgatgtcaccagtattcgttttcttgatgaagacgaaatgcaacgtctga

SEQ ID NO: 139928 - DNA, 2388 bp, Homo sapiens; identical to SEQ ID NO: 139634

SEQ ID NO: 139929 - DNA, 1770 bp, Homo sapiens; identical to SEQ ID NO: 138556

SEQ ID NO: 139930 - DNA, 2082 bp, Homo sapiens
atgaaactccaaaaaacaggtcactttaaaacgttcttccagagcttctaccagcccccagttttctacctgaatatgcggcatgtaatgaattttgccgctgtccgggtcaacaagccctggcaggatcaccgaaatcgcgatcagctcgcgcagtttgcgctggctcaccaatcgaaatggaaaattttcattgaagaagatttccgcgcccgcattgataaaatcaaggactggttaggagatggcgtcattgccgacttcgacgacaaacagatcgagcaagcgctggctgatgtcgacgtccccattgttggggttggcggctcgtatcaccttgcagaaagttacccacccgttcattacattgccaccgataactatgcgctggttgaaagcgcatttttgcatttaaaagagaaaggcgttaaccgctttgctttttatggtcttccggaatcaagcggcaaacgttgggccactgagcgcgaatatgcatttcgtcagcttgtcgccgaagaaaagtatcgcggagtggtttatcaggggttagaaaccgcgccagagaactggcaacacgcgcaaaatcggctggcagactggctacaaacgctaccaccgcaaaccgggattattgccgttactgacgcccgagcgcggcatattctgcaagtatgtgaacatctacatattcccgtaccggaaaaattatgcgtgattggcatcgataacgaagaactgacccgctatctgtcgcgtgtcgccctttcttcggtcgctcagggcgcgcggcaaatgggctatcaggcggcaaaactgttgcatcgattattagataaagaagaaatgccgctacagcgaattttggtcccaccagttcgcgtcattgaacggcgctcaacagattatcgctcgctgaccgatcccgccggtccgagcctactatttaacatcaaaaccaacatcaacaccagcgccagcgtcagccagaagatggcgaagatgcgcgcggttaagctgcctatcatgaagcagaaaccatcagatagccgcgaccacgcaagccataaaaaccgcttcggcgcggtgaatgagctgggcgtcttcgcgatgaccgaacaggggctgcgtgaagtcagcaacccttcggcaattttcttaagtcgcggcgatgaagtgacctccggtagctcagtgatggtggtatgggaaggaacgcgtccactgctggtggagattcaggcgctggtcgatcactcgatgatggcgaacccacgccgcgtggcagtggggctggaacaaaaccgtctggcaatcctgctggctgtgttgcaccgtcacggtggtctgcaaatggccgatcaggatgtgtttgtgaacgtggtcggcggcgtgaagaccgctgccgcggatctggtggtgtttggtgaagtcgggctggcaggggagatccgcccggtgcccagcggtcaggaacgaatctctgaagcggcgaaacacggttttcgccgggcgattgttccggcggctaacgtgccgaaaaaagcgccgaagggatggcctttcgacctcagccttaggggtcaactcacctgcccctatctggttactcagcagccgctgggtggtaaggcacagttcggtggtcagcgtttcggggagatggaagtgtgggcgctggaagcatacggcgcagcatacaccctgcaggaaatgctcaccgttaagtctgatgacgtgaacggtcgctttttgttcaaacgcttcatcaacgaatttttcacgcggcacggcggcaagtgcattcagcacctgctcatcctgaataccttgcgcacacctacaaccgctgccacatgtcggctggataaggcgttcacgccgcatccggcaatacaagtttactcagccagaaaaagctccagcagcgaatttaaaaacagcttgcccatgttgccggttatgctggcccacaatgcgcccatccgggaaggtcactttgccgtgtgcgccgcagccaataccgatgtagtcaccaaagcgccagtagttgagattgtgctggcactggggatcctctag

SEQ ID NO: 139931 - DNA, 1591 bp, Homo sapiens
atggaggatggggcaagagccgcaacagcgccgcggagttccaacgctgccggttccctggggtacgagcacagcctcaagcagcctcaagccctaggaagcccccagttcaaagcacagggcgcattggagcctgggcacgatacagttcacaccacggctgcgatgcgccccgcgctccggcgggcggagcgcaccatgccgcagctggactccggcgggggcggcgcgggcggcggcgacgacctcggcgcgccggacgagctggtggccttccaggatgaaggcgaggagcaggacgacaagagccgcgacagcgccgccggtcccgagcgcgacctggccgagctcaagtcgtcgctcgtgaacgagtccgagggcgcggccggcggcgcagggatcccggggcgcatttttgcattaacagagaaaggcgttaaccgctttgctttttatggtcttccggaatcaagcggcaaacgttgggccactgagcgcgaatatgcatttcgtcagcttgtcgccgaagaaaagtatcgcggagtggtttatcaggggttagaaaccgcgccagagaactggcaacacgcgcaaaatcggctggcagactggctacaaacgctaccaccgcaaaccgggattattgccgttactgacgcccgagcgcggcatattctgcaagtatgtgaacatctacatattcccgtaccggaaaaattatgcgtgattggcatcgataacgaagaactgacccgctatctgtcgcgtgtcgccctttcttcggtcgctcagggcgcgcggcaaatgggctatcaggcggcaaaactgttgcatcgattattagataaagaagaaatgccgctacagcgaattttggtcccaccagttcgcgtcattgaacggcgctcaacagattatcgctcgctgaccgatcccgccgttattcaggccatgcattacattcgtaatcacgcctgtaaagggattaaagtggatcaggtactggatgcggtcgggatctcgcgctccaatcttgagaagcgttttaaagaagaggtgggtgaaaccatccatgccatgattcatgccgagaagctggagaaagcgcgcagtctgctgatttcaaccaccttgtcgatcaatgagatatcgcaaatgtgcggttatccatcgctgcaatatttctactctgtttttaaaaaagcatatgacacgacgccaaaagaggtattcgcgattgtaaatagcgaggtcatgttgtaggcgatgatgaggaattgtcggggtcaacaatcagggtaaacgctgcgtgggtttttcggatgcggcgtgaacgccttatccgacctacccgccaggcatgataaaacgcaccaacaacgcttcaggctcgtagctcaactgcctgagacaaagtaaaaagccttatccgactgacaagtcggataaggctcaaggaaatgcaattacatatgcgccgcgattaaccgttggttatcctggtacattgcgaacaggtaggtgttataactcttccctttggtcgagtagcccttcagcttgggaatcatcgctgtggcagccactttct

SEQ ID NO: 139932 - DNA, 1110 bp, Homo sapiens
atgacctcgctgaaaaactccatgaaatgggatgaagaacgctttggcctggagtatgacctcgacatctatatgatcgtcgcggtggatttcttcaatatgggcgcaatggagaataaggggctgaatatctttaactccaaatatgtgctggcccgcaccgacaccgccaccgacaaagattacctcgatattgaacgcgttatcggccatgaatatttccataactggaccggtaaccgagtgacctgtcgcgactggttccagctcagcctgaaagaaggtttaaccgtcttccgcgatcaggagttcagctctgaccttggttcccgcgcagttaaccgcatcaataatgtacgcaccatgcgcggattgcagtttgcagaagacgccagcccgatggcgcacccgatccgcccggatatggtcattgagatgaacaacttctacaccctgaccgtttacgagaagggcgcggaagtgattggcatgaaccccccccttgtttggccaagaaaacttccaaaatgtaattctgacctgcgctctagaagatccaacccgcaaagtggttttgaaaccactatgccgaccaccgctatcactctgcaacaggcgaaagcgcgtgatgtgcagaatttttacttcttctgccagcacattacgcttatcccgacgttgcgcagtttgctggaacagccggataacggtatcgatgcgttcctcgcgccgggtcacgtcagtatggttatcggcaccgacgcctataattttatcgccagcgattttcatcgtccgctggtggttgctggattcgaaccccttgatctactacaaggcgtggtcatgctggtgcagcagaaaatagcggcccacagcaaggtagagaatcagtatcgtcgagtggtaccggatgccggtaacctgctggcgcaacaggcgattgccgatgtgttctgtgtcaacggcgacagcgaatggcgcggcttaggcgtgattgaatcttctggcgtgcacctgacgccggattatcaacgattcgatgccgaagcacatttccgcccggcaccgcagcaggtctgcgatgacccgcgcgcgcgttgtggtgag

SEQ ID NO: 139933 - DNA, 3396 bp, Homo sapiens
atgaacgacgcgcactttgtcaacaatctgacgttagcatcagaagtgggtgtttacgctcatataccacgtatacgccccggcaccggcgatatagttggcccctgccaaatcgcccgtggtctgggcattacccgcacgccacaaacgtttgtcgaacagattgtccacgccgccggtcagactgacattcttcgtcacatcccaggtcgcgctcaggccaacaatgctcatataagtgatgttattggtccacatcaccgtttcgctaaccgcgcctttatccccttctcccggcgaagaattttttcacgggtatcctgcttttctcccttttttttgcgcccccaaaacctgcccgtgcgaagtgatttgtttaaaaatcatatggttagagatatgaaacatactgtagaagtaatgatccccgaagcggagattaaagcgcgtatcgccgaactgggtcgtcagattactgagcgttacaaagacagcggcagcgatatggtgctggtgggtctgctgcgtggctcatttatgtttatggcggacctgtgccgtgaagttcaggtatctcatgaagtcgactttatgaccgcctccagctacggtagcggcatgtccaccacccgtgatgtgaaaatcctcaaagatctggatgaagatatccgtggcaaggacgtgctgattgttgaagatatcatcgactcggggaatacactgtcgaaagtgcgtgagatcttaagcctgcgcgaaccgaagtcgctggcgatttgtacgctgctggataaaccgtcccgtcgtgaagtgaacgtcccggtagaatttatcggtttctcgatcccggatgagtttgtggtgggttacggcattgattacgcacagcgttaccgtcatctgccgtatatcggcaaagtgattctgctggacgatttagtgggcaccgcgtggtgccacccctggttgtgtcttgttgcatgtcgagaactgtggtgtgccgctatgggagcaattcggccgcctattgggatgcgagatggagtggcgtctactggaattgactggagtgttgacaactgccgaatattgccgtgtccacttgagtggagctgcggtgaatctgcaagggatcttgggcggagaagcattggagtaacgggattaccttgtgaactggagacgagttgtagccgacatctaaaggcggacctgacgtcgtggtgtgtgggccggagaaacgcagacggcgtaccacaacaggaaaagatcgcaattgttcagcagagctttgaaccggggatgacggtctccctcgttgcccggcaacatggtgtagcagccagccagttatttctctggcgtaagcaataccaggaaggaagtcttactgctgtcgccgccggagaacaggttgttcctgcctctgaacttgctgccgccatgaagcagattaaagaactccagcgcctgctcggcaagaaaacgatggaaaatgaactcctcaaagaagccgttgaatatggacgggcaaaaaagtggatagcgcacgcgcccttattgcccggggatggggaacgaaccgatgactggatggatggccgccgcagtcgtcacactgatgatacggatgtgcttctccgtatacaccatgttatcggagagctgccaacgtatggttatcgtcgggtatgggcgctgcttcgcagacaggcagaacttgatggtatgcctgcgatcaatgccaaacgtgtttaccggatcatgcgccagaatgcgctgttgcttgagcgaaaacctgctgtaccgccatcgaaacgggcacatacaggcagagtggccgtgaaagaaagcaatcagcgatggtgctctgacgggttcgagttctgctgtgataacggagagagactgcgtgtcacgttcgcgctggactgctgtgatcgtgaggcactgcactgggcggtcactaccggcggcttcaacagtgaaacagtacaggacgtcatgctgggagcggtggaacgccgcttcggcaacgatcttccgtcgtctccagtggagtggctgacggataatggttcatgctaccgggctaatgaaacacgccagttcgcccggatgttgggacttgaaccgaagaacacggcggtgcggagtccggagagtaacggaatagcagagagcttcgtgaaaacgataaagcgtgactacatcagtatcatgcccaaccagacggcaagaaccttgcagaggcgttcgagcattataacgaatggcatccgcatagtgcgctgggttattggcgaacagtggatgcatgagggggcgatagccacaggaaccgtcattaatgataagggctggcaggtcgtcaagcccggtacagtggcaacggataccgttgttaataccggggcggaagggggaccggatgcagaaaacggtgataccgggcagtttgttcgcggggatgccgtacgcacaaccatcaataaaaacggaacttgctggctaatccagcgatccatctgtgccgttttgagcgagggtcgtagtggaagtaccgagcgtggccgtgcaaccgtaactagtatggtggacgagcaagttcgtgtctgtagaaagatccacgagcaacaagatttccatagattgaaagtccttgccgaagagatggcgctggcggtcaatcaggtgattcaggatgccgtcgggctgtgcgtggtacgtaacggccagatacaaccaatcgcggcgatatccagcgcggcgaaggtgcctgcccagccggtaaggccgaataccggcgtcccatcggcaatcattcccagacctaacttggcaaagctgtcaccaatcaggtacaaagccaacagcagacacaacaatcaacaattgcgggccaaagaccaggaaacccaacgcaaagagagaagccagatagatatcttcgttactggcatgttgatcacaccgagcgtgggaataatagggctgcgcgatgaggccacaggcaggcgacggtcccagtcagaagcagcccaaagaagtacgacaggcaccgttaaaaggttaaccgtaatcccgcttagaagtcgtctgaacggtattttcacggtgatcgagtcactatggatttgcagcgcccgatatgttccgctctcaaagcctgcaaggaaagctgccacgatcagtgcttgccgaagagatgtcattactgatgctggacagccgccgggtgatccaaagcattcagttgatgaaatcgctgggcggcgggtatcaggcaggtcccgtcgtcgagaaaaaataaaatgtctgccgcgtgatggctgtcacgcggtatttcgtttcgtcacgtcaaaactgacgacagcctgtttttcgtcagagttttga

SEQ ID NO: 139934 - DNA, 2616 bp, Homo sapiens
atgtggccggataaccgtatcgcccgtgacgcgcactatctttaccggtatgaccgtcacggcaggctgacagagaaaaccgacctcatcccggaaggggttatccgcacggatgatgagcggactcaccggtaccattacgacagtcagcaccggctggtgcactacacgcggacacaatatgaagagccgctggtcgaaagtcgctatctttacgacccgctgggccgcagggtggcaaaacgggtgtggcggcgtgaacgggacctgacgggctggatgtcgctgtcacggaaaccgcaagtgacctggtacggctgggacggcgaccggctgaccacgatacagaacgacaggagccgcatccagacgatttatcagccggggagcttcacgccactcatcagggtcgaaactgccaccgcagtccggcggcgaagacggtggcagtgggggattcccgccggcacggtgcagatgctcgaccggctggaaagtgaaatcctggctgaccgggtgagtgaggaaagccgccgctggctggcatcgtgcggcctgaccgtggagcagatgaaaaagaccagcatacatgcaagcatagtccgccacaagttactgaccgctgaacaagccctgaaattactgggtgagatgtttgtttatcacatgccatttaaccgcgcattggggatggaactggagcgttacgaaaaagagttcgcacagctggcctttaaaaatcagccaatgatggtgggcaactgggcgcaaagcattttgcacggcggggtcattgcgtcggcgctggatgtcgccgccggtctggtgtgcgtgggaagtaccttaacccgccacgaaaccatcagtgaagatgaactacgccagcggctatcgcggatggggaccattgatcttcgcgttgattatctgcgcccaggcaggggcgagcgttttactgctactagtagcctgttgcgtgcaggcaataaagtcgccgtcgcccgcgttgaattacacaatgaagaacagctttatattgccagtgccaccgccacctatatgtctaaatcaatgtttctcgccgttgcgacgatattaatatcgaaatcgtcgttgtcgaggttacgtcgccccagcacaatagtgtgcggaataccgatcagttccatatcagcaaacatcacgcccggacgctctttgcggtcatccagcagcacttcgaaaaccttgtgcacgcagttcgctgtacagtttctcagcaagctcttgtacgcggaaggatttgtgcatgttcatcggcagaatcgccacctggaacggcgcgatagcgtcaggccatacgatgcctcgttcgtcgtagttctgctcaatcgccgcagctaccacacgcgttaccccgataccgtagcaacccatcgtcaggatttggttacggccatcttcaccctgtacggaggctttcagtgcttcggagtacttggtacccagctggaagatgtgaccaacttcgataccacgtttgatcagcagcctaccctggccatccgggcttggatcgccagccaccacgttacggatatctgcaacttccggggtagcgacatcgcgatcccagttgatgccgaagtagtgtttaccatcgatgttagcaccagcagcgaaatcactcatcgccgcaacgtggatttgttccctgaccagcttaccgtgacccgttcacagaccttcaccgcttatgaacgcttgtcgacggccctgacggttgctcaggtttgcggcgtccagcggttatgtaactactattcggcgcgacttacgccgctccccgggcctgattccaccagggaaagtaatcatcggttggcacaaatcacgcaatatgcccgccaactggctagctcgccttctattatcgacaaccgatcgcgccagcatctgaatgacgtcggtcttactgcctgggactgtgtgatcattagccaaatcattggttttattggctttcaagcgcggacaattgcgacatttcaggcttatctcgggcatccggtacgctggttacccgggctggagatacaaaactacgccgacgcgtcactgtttgctgatgaatcattacgctggcgaagcagctatgaggtggaaaaactacctgaagagcacacaaaaagttcaactgcagaactttgccaactggccgaaatactctctctccaccctatttcactttcccttctcgaaaaggtgttaaacagcacacggggcaatacacagccggataatcagcttgcggcgttgttatgcgcgcgtataaatggcagtcctgcttgttttgccacctgtatggattcatcaaatgaatataaaaaaatcagcacccttatgcgcaagggcgaaaatgaaattaaccaatgggctgaccgtcattctgttgagcgcgctaccgttcaggcgatacaatggctgacccgagcacccgatcgctttagcgccgcccagttcagccctttactcgaacacgaaaaatcatcaacgcagattattaatctgctggtatggagcgggctgtgtggctggataaatcgcttaaaaatcgcgttgggtgagacatattaa

SEQ ID NO: 139935 - DNA, 3697 bp, Homo sapiens
atgagttctttaagtcaggctgcgagcagtgtggaaaaacgcacaaatgctcgttactggatagtggtgatgttgtttatcgtcacatccttcaactacggcgaccgcgctacgctctctatcgccggttcggaaatggccaaagatatcggccttgatcccgtgggaatgggctatgtgttctctgctttctcatgggcttatgttatcgggcagatccctggtggcttggtgctggaccgttttggttcaaaacgcgtctacttctggtcgatctttatctggtcgatgtttaccttgctgcaaggcttcgtcgatatctttagtggattcggcattatcgttccttctgtttacgctgcgcttcctggtcgggcttgctgaagcgccatctttccccggcaacagtcgcattgttgcggcctggtttccggccaggaaaggaacggggatcattaatgaaactaagcccttttggcgaataccgcgctggaagggcttggtgggtcaggcgatgcgctttgcacccagtgtgaagccgaaggtttccgccatattacgtattatctcgaccgcccggacgtgctggcgcgttttaccaccaaaattattgccgataaaatcaaatatcccttcctgctttccaatggtaaccgcgttgcgcaaggcgaactggaaaacggacgccattgggtacagtggcaggacccgttcccgaaaccgtgctacctgtttgcgctggtggcaggcgactttgatgtactgcgcgatacctttaccacgcgttctggtcgcgaagtagcactggagctgtacgtcgatcgcggtaaccttgatcgcgcgccgtgggcgatgacctcgctgaaaaactccatgaaatgggatgaagaacgctttggcctggagtatgacctcgacatctatatgatcgtcgcggtggatttcttcaatatgggcgcaatggagaataaggggctgaatatctttaactccaaatatgtgctgggccgcaacgacaccgccaccgacaaagattacctcgatattgaacgcgttatcggccatgaatatttccataactggaccggtaaccgagtgacctgtcgcgactggttccagctcagcctgaaagaaggtttaaccgtcttccgcgatcaggagttcagctctgaccttggttcccgcgcagttaaccgcatcaataatgtacgcaccatgcgcggattgcagtttgcagaagacgccagcccgatggcgcacccgatccgcccggatatggtcattgagatgaacaacttctacaccctgaccgtttacgagaagggcgcggaagtgattcgcatgatccacaccctgcttggcgaagaaaacttccagaaagggatgcagctttatttcgagcgtcatgatggtagtgcagcgacctgtgacgactttgtgcaggcgatggaagatgcgtcgaatgtcgatctctcccatttccgccgttggtacagccagtccggtacaccgattgtgaccgtcatagacgactactatccggaaaccgagcagtacaccctgaccatcagccagcgcacgccagccacgccggatcaggcagaaaaacagccgctgcatattccgtttgccatcgaactgtatgataacgaaggcaaagtgatcccgttgcagaaaggcggtcatccggtgaattccgtgctgaacgtcactcaggcggaacagacctttgtctttgataatgtctacttccagccggtgcctgcgctgctgtgcgaattctctgcgccagtgaaactggaatataagtggagcgggctgaccatcgactttaacgatcctgtcgcctgcttgcaaacctgccttgcttgccgccgagtttggctgcacattttccagtacaggttcaatttgcggcccacgaggacgaatccccagcgaagataccggatcttctttatcaggctcaaacgcccagtgacctatcgaattggctgctatttcgccaaccaccggacgtacgccaggcacaccaataataaaaaccagccagtaggcaaagatagcaaaaatgaaatttgcaaccggacctgcggcaataatcgccgctcgaatcgaactgcatcgtgttttctgacggcgctggagcaggacacgcagggcctggacggctggtggctctgctcgctgcatgggcgccagggcatcgtgcctgggaaccgcctcaagatcttggtgggcatgtatgataagaagccagcagggcctggccccggccctcccgccaccccggcccagcctcagcctggcctccatgccccagcgcctccggcctcccagtacacgcccatgctccccaacacctaccagccccagccagacagcgtctacctggtgcccactcccagcaaggctcagcaaggcctctaccaagtcccgggtcccagccctcagttccagtctcccccagccaagcagacatccaccttctcgaagcagacaccccatcacccgtttcccagcccggccacagatctgtaccatgtgcccccaggggcctggaggccctttctcaagatatttaccaggtgccccctttttgccgggatggggcatgacatctaccaggtccccccgtccatggacacacgcctcttggggagggcaccaaagccccccggcaaaaggaccttcaccgcttatgaacgcttgtcgacggccctgacggttgctcaggtttgcggcgtccagcggttatgtaactactattcggcgcgacttacgccgctccccgggcctgattccaccagggaaagtaatcatcggttggcacaaatcacgcaatatgcccgccaactggctagctcgccttctattatcgacaaccgatcgcgccagcatctgaatgacgtcggtcttactgcctgggactgtgtgatcattagccaaatcattggttttattggctttcaggcgcggacaattgcgacatttcaggcttatctcgggcatccggtacgctggttacccgggctggagatacaaaactacgccgacgcgtcactgtttgctgatgaatcattacgctggcgaagcagctatgaggctgcaacttaccgtgatagcaaatacaaagctggcttccacttctgcgggggctaccacatcagcgaggactgggtggtcaccgctgcccaccaggggtcaggccacccagacggcagcttggggaaacctgggaggtcccgtaccctcactgtgcagttcagcgtctttggtgttagcgtggtagttggcgacaatctcttccatcagcacatctttctgattgctggaaagcagaccttcaacgtagctcattttcagcggttcagcgggattgaacgttacaaccagtcagtactgaacgcggtgcgtgacgttgccgtcaacggcacggcgtctgcaaacgctcaacgacgagcgagaaatgcaggctgaacgcgtggaagccacgcgctttacccagcgcgctgccgaggccgcctatcagcgcggcttaaccagccgcttacaggccaccgaagcccggttgccagtgcttgccgaagagatgtcattactgatgctggacagccgccgggtgatccaaagcattcagttgatgaaatcgctgggcggcgggtatcaggcatgtcccgtcgtcgagaaaaaataa

SEQ ID NO: 139936 - DNA, 2253 bp, Homo sapiens; identical to SEQ ID NO: 118103

SEQ ID NO: 139937 - DNA, 3069 bp, Homo sapiens; identical to SEQ ID NO: 121218

SEQ ID NO: 139938 - DNA, 1980 bp, Homo sapiens
  misc_feature (1)...(1980): n = a,t,c or g
ctaaaagactccgttgctcatgactatgatgtcatagttattgacagcgcgcctaacctgggtatcggcacgattaatgtcgtatgtgctgctgatgtgctgattgttcccacgcctgctgagttgtttgactacacctccgcactgcagtttttcgatatgcttcgtgatctgctcaagaacgttgatcttaaagggttcgagcctgatgtacgtattttgcttaccaaatacagcaatagtaatggctctcagtccccgtggatggaggagcaaattcgggatgcctgtggactctaaaggacccccctggcttttcaagttccttaagaatggcctcaattttctcttacactcagttggaacacgagacctgtccaggttaagcaccattttatcgcccttatacaatactgtcgctccaggagcaaactgatgtcgtgagcttaaactagttcttgatgcagatgacgttttaagcacagaagttaaaagagtgataacttcttcagcttcaaatatcaccccagcttttttctgctcatgaaggttagatgcctgctgcttaagtaattcctctttatctgtaaaggctttttgaagtgcatcacctgaccgggcagatagttcaccggggtgagaaaaaagagcaacaactgatttaggcaatttggcggtgttgatacagcgggtaataatcttacgtgaaatattttccgcatcagccagcgcagaaatatttccagcaaattcattcttgcatcggcttgcataacgctgaccacgttcataagcacttgtttggggcgatatcgttacccaatgtttgataaaccaaggaaaagattcatagcctttttcatcgccggcatcctcttcagggcgataaaaaaccacttccttccccgcgaaactcttcaatgcctgccgtatatccttactggcttccgcagaggtcaatccgaatatttcagcatatttagcaacatggatctcgcagataccgtcatgttcctgtagggtgccatcagattttctgatctggtcaacgaacagatacagcatacgtttttgatcccgggagagactatatgccgcctcagtgaggtcgtttgactggacgattcgcgggctattcttacgtttcttgtgattgataaccgctgtttccgcatgacagatccatgtgaagtgtgacaagtttttagattgcacagttttaagcacagaagttaaaagagtgataacttcttcagcttcaaatatcaccccagcttttttctgctcatgaaggttagatgcctgctgcttaagtaattcctctttatctgtaaaggctttttgaagtgcatcacctgaccgggcagatagttcaccggggtgagaaaaaagagcaacaactgatttaggcaatttggcggtgttgatacagcgggtaataatcttacgtgaaatattttccgcatcagccagcgcagaaatatttccagcaaattcattctgcaatcggcttgcataacgctgaccacgttcataagcacttgttgggcgataatcgttacccaatctggataatgcagccatctgctcatcatccagctcgccaaccagaacacgataatcactttcggtaagtgcagcagctntacgacggcgactcccatcggcaatttctatgacaccagatactcttcgaccgaacgccggtgtctgttgaccagtcagtagaaaagaaaggatgagatcatccagtgcgtcctcagtaagcagctcctggtcacgttcattacctttatgggcagcaaccccgatcaccggtggaaatacgtcttcagcacgtcgcaatcgcgtaccaaacacatcacgcatatgattaatttgttcaattgtataaccaacacgttgctcaacccgtcctcgaatttccatatccgggtgcggggggcggcctgctttctcggcatctctgatagccttcat

SEQ ID NO: 139939 - DNA, 4289 bp, Homo sapiens; identical to SEQ ID NO: 135998
  misc_feature (1)...(4289): n = a,t,c or g

SEQ ID NO: 139940 - DNA, 2224 bp, Homo sapiens
ggattttgccgatttcggaaccaccatcaaacaggattttcgcctgctggggcaaaccagcgtggaccgcttgctgcaactctctcagggccaggcggtgaagggcaatcagctgttgcccgtctcactgccccagcacactatccctgacgttttcatctggatgctcagcaacaacaggagagtggcctatgcccgcatcgcctccaaagacctcctctattcccctgtcgccgggcagatgggcaaacactgcggcaagatcaaaactcacttcctcaaaatccctaaacagcagcaaaacgaaaaataccaagtgcctcaattcgatcaatcaacgattaaaaatattgagtctgcaaaaggacttgatgtgtggaacagctggccgctgcaaaacgctgacggaacagtagctgaatacaacggctatcacgttgtgtttgctcttgcgggaagcccgaaagacgctgatgacacatcaatctacatgttttatcaaaaggattttcgcctgctggggcaaaccagcgtggaccgcttgctgcaactctctcagggccaggcggtgaagggcaatcagctgttgcccgtctcactggtgaaaagaaaaaccaccctggcgcccaatacgcaaaccgcctctccccgcgcgttggccgattcattaatgcagctggcacgacaggtttcccgactggaaagcgggcaggattttgccgatttcggaaccaccatcaaacaggattttcgcctgctggggcaaaccagcgtggaccgcttgctgcaactctctcagggccaggcggtgaagggcaatcagctgttgcccgtctcactggtgaaaagaaaaaccaccctggcgcccaatacgcaaaccgcctctccccgcgcgttggccgattcattaatgcagctggcacgacaggtttcccgactggaaagcgggcagaaaaggttcggacgcccaccggttcggatcctggaaattccaactgcaaagagtgtccggtttcggcaacctttacttggggcgggaaaatccgttttatattccgctgactattcgggtaaccattacggcaaacaaagcctgccatcagggcaggtaaatgggtcaaattctgatgacacactcaaaatcaacggagtggaagatcacaaaacgattttggacggagacggaaaaacatatcagaacgttcagcagtttatcgatgaaggcaattatacatccggcgacaaccatacgctgagagaccctcactacgttgaagacaaaggccataaataccttgtattcgaagccaacacgggaacagaaaacggataccaaggcgaagaatctttatttaacaaagcgtactacggcggcggcacgaacttcttccgtaaagaaagccagaagcttcagcagagcgctaaaaaacgcgatgctgagttagcgaacggcgccctcggtatcatagagttaaataatgattacacattgaaaaaagtaatgaagccgctgatcacttcaaacacgatcagaaaatctgatggcaccctacaggaacatgacggtatctgcgagatccatgttgctaaatatgctgaaatattcggattgacctctgcggaagccagtaaggatatacggcaggcattgaagagtttcgcggggaaggaagtggttttttatcgccctgaagaggatgccggcgatgaaaaaggctatgaatcttttccttggtttatcaaacgtgcgcacagtccatccagagggctttacagtgtacatatcaacccatatctcattcccttctttatcgggttacagaaccggtttacgcagtttcggcttagtgaaacaaaagaaatcaccaatccgtatgccatgcgtttatacgaatccctgtgtcagtatcgtaagccggatggctcaggcatcgtctctctgaaaatcgactggatcatagagcgttaccagctgcctcaaagttaccagcgtatgcctgacttccgccgccgcttcctgcaggtctgtgttaatgagatcaacagcagaactccaatgcgcctctcatacaggatgggggtgagaggcaaagttatatttattaaccagtgcagaacaactagtaaggaaaatgaaaaacggattccaaatttaccctgtgtagcctttggatacccagtggtagcatcgcaattttccagaagtactttcatcgaattgtaa

SEQ ID NO: 139941 - DNA, 2640 bp, Homo sapiens
  misc_feature (1)...(2640): n = a,t,c or g
atggaaattcgaggacgggttgagcaacgtgttggttatacaattgaacaaattaatcatatgcgtgatgtgtttggtacgcgattgcgacgtgctgaagacgtatttccaccggtgatcggggttgctgcccataaaggtggcgtttacaaaacctcagtttctgttcatcttgctcaggatctggctctgaaggggctacgtgttttgctcgtggaaggtaacgacccccagggaacagcctcaatgtatcacggatgggtaccagatcttcatattcatgcagaagacactctcctgcctttctatcttggggaaaaggacgatgtcacttatgcaataaagcccacttgctggccggggcttgacattattccttcctgtctggctctgcaccgtattgaaactgagttaatgggcaaatttgatgaaggtaaactgcccaccgatccacacctgatgctccgactggccattgaaactgttgctcatgactatgatgtcatagttattgacagcgcgcctaacctgggtatcggcacgattaatgtcgtatgtgctgctgatgtgctgattgttcccacgcctgctgagttgtttgactacccctccgcactgcagttttttcatatgctttgtgatcttgtcaagaacgttgatcttaaagggttcgagcctggagaattggccccgctctatggctgctggggcctgcgcactggaatcgccgtggcctgcgcaccccaccatgccagtttgaacctccatggcctcaaccagattcggaatgtcaaaaagcagagtgtctatttgatgaatttgaggaaatcgggaactttgggccacccaggctctgtagatgagaccacctatgaaagactagcggaggaatcactggactctttagcagagttttttgaagaccttgcagacaagccatacacgtttgaggactatgatgtttcctttgggagtggtgtcttaactggtaaactgggtagagatctagcaacctacgtgatcaacaagcagacaccaaacaagcaaatctggttatcttctccatccagtggactcaagcgttatgactggactgagaaaaactgggtgtactcccacgattgcgtgtccctccatgatgtgctcgctgcagagctcactaaagccttaaaaaccaaactggacttgtcttccttggcctattctggaaaagagcttgatgcccagcccggctattatatgctacatgcacagtatatgcttcgtccaccactatcttcacccatgcagcatcgggccccggagaccggccccacctcccgaaactcggtactaaatgcggtcactccgcctgcgccgaccaccccccctagcccattgttcgactctagaggatcccccagacggaaaacatatcagaacgttcagcagtttatcgatgaaggcaattatacatccggcgacaaccatacgctgagagaccctcactacgttgaagacaaaggccataaataccttgtattcgaagccaacacgggaacagaaaacggataccaaggcgaagaatctttatttaacaaagcgtactacggcggcggcacgaacttcttccgtaaagaaagccagaagcttcagcagagcgctaaaaaacgcgatgctgagttagcgaacggcgccctcggtatcatagagttaaataatgattacacattgaaaaaagtaatgaagccgctgatcacttcaaacacggtaactgatgaaatcgagcgcgcgaatgttttcaaaatgaacggcaaatggtacttgttcactgattcacgcggttcaaaaatgacgatcgatgnaggatccccggnaaaaatccgtttattctacactgactattccggtaaacattacggcaaacaaagcctgacaacagcgcaggtaaatgtgtcaaaatctgatgacacactcaaaatcaacggagtggaagatcacaaaacgatttttgacggagacggaaaaacatatcagaacgttcagcagtttatcgatgaaggcaattatacatccggcgacaaccatacgctgagagaccctcactacgttgaagacaaaggccataaataccttgtattcgaagccaacacgggaacagaaaacggataccaaggcgaagaatctttatttaacaaagcgtactacggcggcggcacgaacttcttccgtaaagaaagccagaagcttcagcagagcgctaaaaaacgcgatgctgagttagcgaacggcgccctcggtatcatagagttaaataatgattacacattgaaaaaagtaatgaagccgctgatcacttcaaacacggctgccgccaaccaggagagcagccatgtgcagcagcaggcccttgctctggagcagcagttcttggagcgcacccaggcgctagaagcccagatagtggccctggagagaatgcgggcagctgaccagaccaccgcaaagcaagggatgtgcacacaggtgcatctgaccaacaccagccgccacgctggtagaccgtcaaaatgtcagttctgcagtactcggagacaaaggcatagactatcagatcctaaacaggatttaggaaacagacgattttcccctccaccttga

SEQ ID NO: 139942 - DNA, 3501 bp, Homo sapiens
tcagcggaagataagccacaggagaattcccgaaccggtcaattggcagatgtgcacccccagcactgtggtggaattcggtagtgtgatgtctccagctttgttcttctggcttaagtttgacttggcgatgcaggctcttttttggttccatatgaactttaaagtagttttttccaattctgtgaagaaagtcattggtagcttgatggggatggcattgaatctgtaaattaccttgggctgtatggccattttcacgatattgattcttcctacccatgagcatggaatgttcttccatttgtttgtatcctcttttatttccttgagcagtggtttgtagttctccttgaagaggtccttcatatcccttgtaagttggattcctaggtattttattctctttgaagcaattgtgaatgggagttcactcatgatttggctctctgtttgtctgttgttggtgtataagaatgcttgtgatttttgtacattgattttgtatcctgagactttgctgaagttgcttatcagcttaaggagattttgggctgagacaatggggttttctacatacacaatcatgtcgtctgcaaacagggacaatttgacttcctcttttcctaattgaataccctttatttccttctcctgcctaattgccctggccagaacttccaacagtgaaatattttccgcatcagccagcgcagaaatatttccagcaaattcattctgcaatcggcttgcataacgctgaccacgttcataagcacttgttgggcgataatcgttacccaatctggataatgcagccatctgctcatcatccagctcgccaaccagaacacgataatcactttcggtaagtgcagcagctttacgacggcgactcccatcggcaatttctatgacaccagatactcttcgaccgaacgccggtgtctgttgaccagtcagtagaaaagaagggatgagatcatccagtgcgtcctcagtaagcagctcctggtcacgttcattacctgaccatacccgagaggtcttctcagcactatcacccccggagcaagggcaagtaatgggatacccgcgagccattactcctacgcgcgcaattaacgaatccaccatcggggcagctggtgtcgataacgaagtatcttcaaccggttgagtattgagcgtatgtttgggaataacaggcgcacgcttcattaatctatctcccagccgtgggttaatcagacgatcgacaattttctttgccagaagggttccaaataggaagaggcattctccaggcaccagttgaagagcgttgttcattggcctgccaccattaaaacatgttacatccgtagggaaggtgtgactaagactgggcagctgaagcagttgcttgttttccccaaaacagggaggaggaggggaagtgtaatgggttctagggggggccttgccaacattcttctttacttccccccccggttcacttatgggtatggtggaattcgcactccactcatgctgaatcgccagcggcatcagcaccttgtcgccttgcgtataatatttgcccatggtgaaaacgggggcgaagaagttgtccatattggccacgtttaaatcaaaactggtgaaactcacccagggattggctgagacgaaaaacatattctcaataaaccctttagggaaataggccaggttttcaccgtaacacgccacatcttgcgaatatatgtgtagaaactgccggaaatcgtcgtggtattcactccagagcgatgaaaacgtttcagtttgctcatggaaaacggtgtaacaagggtgaacactatcccatatcaccagctcaccgtctttcattgccatacggaactccggatgagcattcatcaggcgggcaagaatgtgaataaaggccggataaaacttgtgcttatttttctttacggtctttaaaaaggccgtaatatccagctgaacggtttgggaagcgcaaggggtcagggagttccctttccgagtcaaagaaaggggtgacggacggcacctggaaaatcgtgtcactcccacctgaatactgcacttttccgaccggcttaaaaaacggcgcaccacgagattatatcccgcacctggctggaagggtcctacgcccacggagtctcgctgattgctagcacagcagtctgagatcaaagccccgccctgccactcatcgcagtactgttgtaattcattaagcattctgccgacatggaagccatcacaaacggcatgatgaacctgaatcgccagcggcatcagcaccttgtcgccttgcgtataatatttgcccatggtgaaaacgggggcgaagaagttgtccatattggccacgtttaaatcaaaactggtgaaactcacccagggattggctgagacgaaaaacatattctcaataaaccctttagggaaataggccaggttttcaccgtaacacgccacatcttgcgaatatatgtgtagaaactgccggaaatcgtcgtggtattcactccagagcgatgaaaacgtttcagtttgctcatggaaaacggtgtaacacgggtgaacactatcccatatcaccagctcaccgtctttcattgccatacggaactccggatgagcattcatcaggcgggcaagaatgtgaataaaggccggataaaacttgtgcttatttttctttacggtctttaaacaggccgtaatatccagctgaacggtcattttcacccatgctgaacagttgctgagctggtgtggtgggtctgggacacttttggaaaatttatgaaaattcccaggcgccccgccctgccactcatcgcagtactgttgtaattcattaagcattctgccgacatggaagccatcacaaacggcatgatgaacctgaatcgccagcggcatcagcaccttgtcgccttgcgtataatatttgcccatggtgaaaacgggggcgaagaagttgtccatattggccacgtttaaatcaaaactggtgaaactcacccagggattggctgagacgaaaaacatattctcaataaaccctttagggaaataggccaggttttcaccgtaacacgccacatcttgcgaatatatgtgtagaaactgccggaaatcgtcgtggtattcactccagagcgatgaaaacgtttcagtttgctcatggaaaacggtgtaacaagggtgaacactatcccatatcaccagctcaccgtctttcattgccatacggaactccggatgagcattcatcaggcgggcaagaatgtgaataaaggccggataaaacttgtgcttatttttctttacggtctttaaacaggccgtaatatccagctgaacggtctggttataggtacattgagcaactgactgaaatgcctcaaaatgttctttacgatgccattgggatatatcaacggtggtatatgcagtgattttcttctccat

SEQ ID NO: 139943 - DNA, 2928 bp, Homo sapiens
atggggctggcactggatctggactccggactgctgggtaccctcatgcctctctgcctgagatgccacaggacccagaccaaacatgccgctgcatgccagggccagcatcctagggtccaggctgaggatgtcaccttcctctaccacccctgtgcccatccctggctgaagctccagcttgccctcctggcctatgcttgtatggctaacccttccctcacccctgacttcagcctcacgcaggatcgggcactggctctgagctttgctctgcggagctggcggtctccctggcacagagaggtagaaggccagccggtcagtgagctcatattggcactcaaccagcctttccgccagctcatggtgccccgcctgcctgtgaggagggggtatggctcagacctgcagcagcagccctcacccacacccccacccacccacactgcacccttcagccgaccctcacctggcatagtcaatgggtgtgcggccattaacatcaggggagccaggtctaaagaactccaaataaaaaagcagtttcaggatacctgcaaaatccaaaccagacagtacaaagcattaagaaatcacctgctggagactacaccaaagagtgagcacaaagctgttctgaaacggctcaaggaggaacagacccggaaattagctatcttggctgagcagtatgatcacagcattaatgaaatgctctccacacaagccgcctccttggagctgctaggtgtcccaggggcagccagggtgcagcttgtgggtggggaggtgcgctcacgcaatgcgtattcactgcacactctgctcctcttagcaactacactcgagcgtgcggacaggcaacctggagacatgtctgcgcctgctctccctgggttcttcgctagccaacacaacagcctagaggatccccctccacatcaaggaaatcctcagccctgggagtggcttccccagaaacagcagccccaagcctccgagagtcagtcggagaaaaggacacactcaggcgccctggacagggatgcccgtccgacctacaaggaacgcctcgtaaaccggggtcacaccgacaaatctgaagcgggtttgccaggggagtgtacccgtcttccccagcctgtgccacccggttcacaaggatttcaatttccgaccttaaaattcgctccaacgatctcatccaaacgctgcaaacagcggcataacaaactatggagatctcattcagatagtgacctctcagaccaccacgaacccatctgcaaacctgggctagaactcaacaagaaggatatcaccacctcagcagaccagattgctgaggtgaagaccatggagagtcacccacccatacctcctgtctttgtggaacatatggtcccacaagatgcaaatcagaaaggcctgtgtaccaaagaaagaatgatctgcttggagtttacttctagggaatttcatgctggacagattgaggatgaattaaacttaaatgacatcaatggatgctcatcagggtcgactctagaggatccccagtttaatgatgacagcccggaagcgaggaaaataacccggcgctggagaataggtgaagcagcggatttagttggggtttcttctcaggctatcagagatgccgagaaagcagggcgactaccgcacccggatatggaaattcgaggacgggttgagcaacgtgttggttatacaattgaacaaattaatcatatgcgtgatgtgtttggtacgcgattgcgacgtgctgaagacgtatttccaccggtgatcggggttgctgcccataaaggtggcgtttacaaaacctcagtttctgttcatcttgctcaggatctggctctgaaggggctacgtgttttgctcgtggaaggtaacgacccccagggaacagcctcaatgtatcacggatgggtaccagatcttcatattcatgcagaagacactctcctgcctttctatcttggggaaaaggacgatgtcacttatgcaataaagcccacttgctggccggggcttgacattattccttcctgtctggctctgcaccgtattgaaactgagttaatgggcaaatttgatgaaggtaaactgcccaccgatccacacctgatgctccgactggccattgaaactgttgctcatgactatgatgtcatagttattgacagcgcgcctaacctggaggatccccgcgtaggagtaatggctcgcggtaatgccattactttgcctgtatgtggtcgggatgtgaagtttactcttgaagtgctccggggtgatagtgttgagaagacctctcgggtatggtcaggtaatgaacgtgaccaggagctgcttactgaggacgcactggatgatctcatcccttcttttctactgactggtcaacagacaccggcgttcggtcgaagagtatctggtgtcatagaaattgccgatgggagtcgccgtcgtaaagctgctgcacttaccgaaagtgattatcgtgttctggttggcgagctggatgatgagcagatggctgcattatccagattgggtaacgattatcgcccaacaagtgcttatgaacgtggtcagcgttatgcaagccgattgcagaatgaatttgctggaaatatttctgcgctggctgatgcggaaaatatttcacgtaagattattacccgctgtatcaacaccgccaaattgcctaaatcagttgttgctcttttttctcaccccggtgaactatctgcccggtcaggtgatgcacttcaaaaagcctttacagataaagaggaattacttaagcagcaggcatctaaccttcatgagcagaaaaaagctggggtgatatttgaagctgaagaagttatcactcttttaacttctgtgctttaa

SEQ ID NO: 139944 - DNA, 2112 bp, Homo sapiens; identical to SEQ ID NO: 118107
  misc_feature (1)...(2112): n = a,t,c or g

SEQ ID NO: 139945 - DNA, 3345 bp, Homo sapiens; identical to SEQ ID NO: 119304
  misc_feature (1)...(3345): n = a,t,c or g

SEQ ID NO: 139946 - DNA, 2076 bp, Homo sapiens
ttaaagtaattcctctttatcggtaaaggctttttgaagggcatcacctgaccgggccagatagttcaacgggggtgagaaaaaaagagcaacacctgatttaggcaatttggcggtgttgatacagcgggtaataatcttacgtgaaatattttccgcatcagccagcgcagaaatatttccagcaaattcattctgcaatcggcttgcataacgctgaccacgttcataagcacttgttgggcgataatcgttacccaatctggataatgcagccatctgctcatcatccagctcgccaaccagaacacgataatcactttcggtaagtgcagcagctttacgacggcgactcccatcggcaatttctatgacaccagatactcttcgaccgaacgccggtgtgacattaatcgtgccgatacccaggttaggcgcgctgtcaataactatgacatcatagtcatgagcaacagtttcaatggccagtcggagcatcaggtgtggatcggtgggcagtttaccttcatcaaatttgcccattaactcagtttcaatacggtgcagagccagacaggaaggaataatgtcaagccccggccagcaagtgggctttattgcataagtgacatcgtccttttccccaagatagaaaggcaggagagtgtcttctgcatgaatatgaagatctggtacccatccgtgatacattgaggctgttccctgggggtcgttaccttccacgagcaaaacacgtagccccttcagagccagatcctgcaggaagcggcggcggaagtcaggcatacgctggtaactttgaggcagctggtaacgctctatgatccagtcgattttcagagagacgatgcctgagccatccggcttacgatactgacacagggattcgtataaacgcatggcatacggattggtgatttcttttgtttcactaagccgaaactgcgtaaaccggttctgatgctccgactggccattgaaactgttgctcatgactatgatgtcatagttattgacagcgcgcctaacctgggtatcggcacgattaatgtcgtatgtgctgctgatgtgctgattgttcccacgcctgctgagttgtttgactacacctccgcactgcagtttttcgatatgcttcgtgatctgctcaagaacgttgatcttaaagggttcgagcctgatgtacgtattttgcttaccaaatacagcaaggggagtttctcgaagttgccgcagggtggtcaaagtgttgattgggacccaggtccccacttcatcaaatttgcccattaactcagtttcaatacggtgcagagccagacaggaaggaataatgtcaagccccggccagcaagtgggctttattgcataagtgacatcgtccttttccccaagatagaaaggcaggagagtgtcttctgcatgaatatgaagatctggtacccatccgtgatacattgaggctgttccctgggggtcgttaccttccacgagcaaaacacgtagccccttcagagccagatcctgagcaagatgaacagaaactgaggttttgtaaacgccacctttatgggcagcaaccccgatcaccggtggaaatacgtcttcagcacgtcgcaatcgcgtaccaaacacatcacgcatatgattaatttgttcaattgtataaccaacacgttgctcaacccgtcctcgaatttccatatccgggtgcggtagtcgccctgctttctcggcatctctgatagcgacattaatcgtgccgatacccaggttaggcgcgctgtcaataactatgacatcatagtcatgagcaacagtttcaatggccagtcggagcatcaggtgtggatcggtgggcagtttaccttcatcaaatttgcccattaactcagtttcaatacggtgcagagccagacaggaaggaataatgtcaagccccggccagcaagtgggctttattgcataagtgacatcgtccttttccccaagatagaaaggcaggagagtgtcttctgcatgaatatgaagatctggtacccatccgtgatacat

SEQ ID NO: 139947 - DNA, 2313 bp, Homo sapiens
  misc_feature (1)...(2313): n = a,t,c or g
tcagaccgacgatacgagtgggaccgtggtcccagtctgattatcagaccgacgatacgagtgggaccgtggtcccagactaataatcagaccgacgatacgagtgggaccgtggtcccagatcatggcctttgtcttaacgtagtgagggtctctcagcgtatggttgtcgccggatgtataattgccttcatcgataaactgctgaacgttctgatatgtttttccgtctccgtcaaaaatcgttttgtgatcttccactccgttgattttgagtgtgtcatcagattttgacacatttacctgcgctgttgtcaggctttgtttgccgtaatgtttaccggaatagtcagtgtagaataaacggatttttccgtcagatgtaaaggttgcagaaccggaccattcttgcgtctgatctttcaggatcggatcgttggcgtcgaacttatcgctgtctttaaagacacggcccgcgtttttccagctgtcgattgagttgtcgccgaccttttgataaaacatgtagattgatgtgtcatcagcgtctttcgggcttcccgcaagagcaaacacaacgtgatagccgttgtattcagctactgttccgtcagcgttttgcagcggccagctgtcccacacatcaagtccttttgcagactcaatatttttaatcgttgattgatcgaattgaggcacttggtatttttcgttttgctgctgtttnaggatctgcagcatatcatggcgtgtaatatgagagacgccgtacgtttctttgtatgcttttttggtattttctttcgcgaaggcttgattcgctcctcctgccagaagtgcagtcgtaaaagtcagaacgcctttcgtgcatgcatccaggtctactgtagnagatcccctcatggcctttgtcttcacgtagtgagggtctctcagcgtatggttgtcgccgggtgtataattgccttcatcgataaactgctgaacgttctgatatgtttttccgtctccgtcaaaaatcgttttgtgatcttccactccgttgattttgagtgtgtcatcagattttgacacatttacctgcgctgttgtcaggctttgtttgccgtaatgtttaccggaatagtcagtgtagaataaacggatttttccgtcagatgtaaaggttgcagaaccggaccattcttgcgtctgatctttcaggatcggatcgttggcgtcgaacttatcgctgtctttaaagacacggcccgcgtttttccagctgtcgattgagttgtcgccgaccttttgataaaacatgtagattgatgtgtcatcagcgtctttcgggcttcccgcaagagcaaacacaacgtgatagccgttgtattcagctactgttccgtcagcgttttgcagcggccagctgtcccacacatcaagtccttttgcagactcaatatttttaatcgttgattgatcgaattgaggcacttggtatttttcgttttgctgctgtttagggatctgcagcatatcatggcgtgtaatatgagagacgccgtacgtttctttgtatgctttttggttattttctttcgcgaaggcttgagtcgctcctcgtatatgagtgtaggcagttaaaaacagccagatcacatcttgaatggttttctgtttagaattttcttccactagatactctaaatcatcattctcaagttcaaacttccacaaatcatcgatcgtcatttttgaaccgcgtgaatcagtgaacaagtaccatttgccgttcattttgaaaacattcgcgcgctcgatttcatcagttaccgtgtttgaagtgatcagcggcttcattacttttttcaatgtgtaatcattatttaactctatgataccgagggcgccgttcgctaactcagcatcgcgttttttagcgctctgctgaagcttctggctttctttacggaagaagttcgtgccgccgccgtagtacgctttgttaaataaagattcttcgccttggtatccgttttctgttcccgtgttggcttcgaatacaaggtatttatggcctttgtcttcaacgtagtgagggtctctcancgtatggttgtcgccggatgtataattgccttcatcgataaactgctgaacgttctgatatgtttttccgtctccgtcaaaaatcgttttgtgatcttccactccgttgattttgagtgtgtcatcagattttgacacatttacctgcgctgttgtcaggctttgtttgccgtaatgtttaccggaatagtcagtgtaaaataacggaattttccgagccat

SEQ ID NO: 139948 - DNA, 3810 bp, Homo sapiens
atgactgagtacaagatccaccagcgctggttcgccaagttgaagcgcaaggctgcggcaaagctgcgcgagatcgagcagagctggaagcacgagaaggcggtgcctggggaggtcgacactctgcgcaagctcagccccgaccgcttccagcgaaagcggcgattgagcggggctcaagcgccgggcccctcggtccctaccagggagcctgagggtgggaccctggcggcttggcaggagggagagactgagactgctcagcactcaggtttgggcctgatcaacagttttgcttctggagaagtgaccaccaacggggaggctgcccccgagaatggagaggacggagagcatggcttgctgacatacatctgtgacgccatggagctggggcctcagagagccctcaaagaggagagtggggccaagaagaaaaagaaagatggggagtgggattttcccgatttcggaaccaccatcaaacaggattttcgcctgctggggcaaaccagcgtggaccgcttgctgcaactctctcagggccaggcggtgaagggcaatcagctgttgcccgtctcactggtgaaaagaaaaaccaccctggcgcccaatacgcaaaccgcctctccccgcgcgttggccgattcattaatgcagctggcacgacaggtttcccgactggaaagcgggcacccttgccagcatccagccatgggggatatgaaaaccccagattttgatgaccttctggctgcctttgacatcccagaccccaccagccttgatgccaaggaggccatccagacacccaggacgcctcatgctcccaagcacagccgcccccagaggggaagtgtggaccaggcggaaggagaaacatgccgagggccacagtcaccaggcccagtcgaggccaagcaggaggccagcccgttccagtgccccaaggaggagcggccagggggagtgccgtgtatggatcagggtggctgtcctctagctggcctgagccaggaggtacccacgatgccttctcttcctggaactgggctgacagctagcccaaaggcggggccgtgtagcaccccgacttctcagcacgggagcacagccaccttcctgccctctgaggatcaggtcctgatgagttctgccccaacactgcacctggggctggggacccccactcagagtcacccaccagaaaccatggccaccagcagtgagggggcctgcgcccaggcaccagatgtggaggggcggaccccaggtccccggagctgtgaccctggcctcatagattccctgaagaactacctgcttctgctgctgaagctgtccagcacagagacaagtggagcagggggagagtcccaggtgggggcagccaccggaggtctggtgccctcagccactctgacacccactgtggaagtggctggaaggagacatgaacatgaacatcaaaaaaattgtaaaacaagccacagttctgacttttacgactgcattctggcaggaggagcgactcaagccttcgcgaaagaaaataaccaaaaagcatacaaagaaacgtacggcgtctctcatattacacgccatgatatgctgcagatccctaaacagcagcaaaacgaaaaataccaagtgcctcaattcgatcaatcaacgattaaaaatattgagtctgcaaaaggacttgatgtgtgggacagctggccgctgcaaaacgctgacggaacagtagctgaatacaacggctatcacgttgtgtttgctcttgcgggaagcccgaaagacgctgatgacacatcaatctacatgttttatcaaaaggtcggcgacaactcaatcgacagctggaaaaacgcgggccgtgtctttaaagacagcgataagttcgacgccaacgatccgatcctgaaagatcagacgcaagaatggtccggttctgcaaccttcacatctgacggaaaaatccgtttattctacactgactattccggtaaacattacggcaaacaaagcctgacaacagcgcaggtaaatgtgtcaaaatctgatgacacactcaaaatcaacggagtggaagatcacaaaactatttttgacggagacggaaaaacatatcagaacgttcagcagtttatcgatgaaggcaattatacgggggatcctctagaggcggaaacagcggttatcaatcacaagaaacgtaaaaatagcccgcgaatcgtccagtcaaacgacctcactgaggcggcatatagtctctcccgggatcaaaaacgtatgctgtatctgttcgttgaccagatcagaaaatctgatggcaccctacaggaacatgacggtatctgcgagatccatgttgctaaatatgctgaaatattcggattgacctctgcggaagccagtaaggatatacggcaggcattgaagagtttcgcggggaaggaagtggttttttatcgccctgaagaggatgccggcgatgaaaaaggctatgaatcttttccttggtttatcaaacgtgcgcacagtccatccagagggctttacagtgtacatatcaacccatatctcattcccttctttatcgggttacagaaccggtttacgcagtttcggcttagtgaaacaaaagaaatcaccaatccgtatgccatgcgtttatacgaatccctgtgtcagtatcgtaagccggatggctcaggcatcgtctctctgaaaatcgactggatcatagagcgttaccagctgcctcaaagttaccagcgtacgcctgacttccgccgccgcttcctgcaggtctgtgttaatgagatcaacggggcggttataggaatcccttgtgtcagtattcgaaagccggatggctcaggcatcgtctctattaaaatcgcctggatcatagagcgttaccagccgccccaaagttaccagcgtatgcctgacttccgccgccgcttcctgcagagtaggcctgcatgcatgcacgactggctctgtgcagaggccctggcatggagcatacagacagcatcttaccttgtgacgatgcaggtgaacctgacgtcgctgtcctcggacacagaccgggacttgagcgtggtctcaaatagcggctgggtctcctctggctccttagtgagattcaacaccattaagacatcatcaggggaaatcaaacggactgtcccaaggatcctgccagatcctgatgatccaaggagcgccattgcagaggcccccagcgagatgccagggcatgaggtgcctgtggaagagcactttcctgaggcaggcacaaattcagggagcccccagggggccaggaaaggggacgagagcatgacaaaggccagtgactcgtcatctcccagctgcagttctgggccccgggtcccaaagggggctgccccaggctcacagacaggcaagaagcaacagagcacagcactgcaggcatccaccctggcccctgccaacctcctgcccaaagccgtgcacttggccaacctgaacctcgtcccccacagtgttgctgcatcagtgacagccaagtcttcagtgcaaagacggagccagccacagcttacacaaatgtcggtgcccctggtccaccaggtgaaaaaggctgccccactgattgtagaggtcttcaacaaggtccttcacagctccaaccccgtgcccctctatgcgccaaatctcagcccgcctgcggacagcaggatccacgtgccggccagtgggtactgctgcctggagtgtggagacgcatttgcctcacccagagcctga

SEQ ID NO: 139949 - DNA, 2357 bp, Homo sapiens; identical to SEQ ID NO: 119306

SEQ ID NO: 139950 - DNA, 2616 bp, Homo sapiens
  misc_feature (1)...(2616): n = a,t,c or g
atgcgtgggcaggttggggccccaggaaaggccagcagacagggggccactcagataggacaggccttatcccctgggcaagacggccatgctctgtccaggtctaacactacccaaaagctaaagccagctaaaggagcttggcaagccttggaggatgagcctccctggccatactccactacaacccttcctgaaccaaattctttgggctccatacaggctggcatccttcccctgccaccttcccaaccaactcttcctgctagcttaagtgtccatgggatcgtgggttgtgcaccagaattccagagggattttgccgatttcggaaccaccatcaaacaggattttcgcctgctggggcaaaccagcgtggaccgcttgctgcaactctctcagggccaggcgggattttgccgatttcggaaccaccatcaaacaggattttcgcctgctggggcaaaccagcgtggaccgcttgctgcaactctctcagggccaggcggtgaagggcaatcagctgttgcccgtctcactggtgaaaagaaaaaccaccctggcgcccaatacgcaaaccgcctctccccgcgcgttggccgattcattaatgccagctggcacgacaggtttcccgactggaaagcgggcagtgagcgcaacgcaattaatgaattcaagagagcagaaaaaataacagaagtgatcatcaagcctctgctcatgtcacatccaatgacattccatcaggcaatcaatgatgcagccaagcccatattgggaacagccaagcctgttcccaatatgaacagggctgggaaatatacaccacaaaatctagagaaagggccctgtatagaattcagattagttagaggcctagaagcaaagaaggatggtcatagcctgtccagaagaaaatcacctttgtcttacatgacaactgcttcggggaaagctattatagtttccttagccaattcaggattaattcactctgaaaagcagagaggtcacttccacttggactcttgttccaaactggaacaacactcaaccctatctcgggctattcttttgatttataagggattttgccgatttcggaaccaccatcaaacaggattttcgcctgctggggcaaaccagcgtggaccgcttgctgcaactctctcagggccaggcggtgaagggcaatcagctgttgcccgtctcactggtgaaaagaaaaaccaccctggcgcccaatacgcaaaccgcctctccccgcgcgttggccgattcattaatgcagctggcacgacaggtttcccgactggaaagcgggcaaaccggtttacgcagtttcggcttagtgaaacaaaagaaatcaccaatccgtatgccatgcgtttatacgaatccctgtgtcagtatcgtaagccggatggctcaggcatcgtctctctgaaaatcgactggatcatagagcgttaccagctgcctcaaagttaccagcgtatgcctgacttccgccgccgcttcctgcagggattttgccgatttcggaaccaccatcaaacaggattttcgcctgctggggcaaaccagcgtggaccgcttgctgcaactctctcagggccaggcggtgaagggcaatcagctgttgcccgtctcactggtgaaaagaaaaaccaccctggcgcccaatacgcaaaccgcctctccccgcgcgttggccgattcattaatgcagctggcacgacaggtttcccgactggaaagcgggcagtgagcgcaacgccaattaatgcctccgggcctgtgatatggttagctgtgtccccaccaaatctcaacttgaattgtatcttccagaatgcccacgtgttgtgggagggacccatggggaggggttacggtgttttgctcgtggaaggtaacgacccccagggaacagcctcaatgtatcacggatgggtaccagatcttcatattcatgcagaagacactctcctgcctttctatcttggggaaaaggacgatgtcacttatgcaataaagcccacttgctggccggggcttgacattattccttcctgtctggctctgcaccgtattgaaactgagttaatgggcaaatttgatgaaggtaaactgcccaccgatccacacctgatgctccgactggccattgaaactgttgctcatgactatgatgtcatagttattgacagcgcgcctaacctgggtatcggcacgattaatgtcgtatgtgctgctgatgtgctgattgttcccacgcctgctgagttgtttgactacacctccgcactgcagtttttcgatatgcttcgtgatctgctcaagaacgttgatcttaaagggttcgagcctgatgtacgtattttgcttaccaaatacagcaatagtaatggctctcagtccccgtggatggaggagcaaattcgggatgcctggggaagcatggttctaaaaaatgttgtacgtgaaacggatgaagttggtaaaggtcagatccggatgagaactgtttttgaacaggccattgatcaacgctcttcaactggtgcctggagaaatgctctttctatttgggaacggggttttctntag

SEQ ID NO: 139951 - DNA, 2499 bp, Homo sapiens; identical to SEQ ID NO: 118112

SEQ ID NO: 139952 - DNA, 3198 bp, Homo sapiens; identical to SEQ ID NO: 124768
  misc_feature (1)...(3198): n = a,t,c or g

SEQ ID NO: 139953 - DNA, 5277 bp, Homo sapiens
gttctttttagaacagtggctatgatggttccaaactatgcgcttatagcagaaatctccctctactcttacggatttttgaatgcaagacctctgtctgtgaaaatagtaatgacctataggctttgctcagagcagctctcatcgcaatttcattacgactatggaatgcgagcagtaaaagccgttttagtggctgctggcaatctaaaactaaaatacccaaatgaaaatgaagatatactttgtgacaatctaaaaacttgtcacacttcacatggatctgtcatggcggaaacagcggttatcaatcacaagaaacgtaaaaatagcccgcgaatcgtccagtcaaacgacctcactgaggcggcatatagtctctcccgggatcaaaaacgtatgctgtatctgttcgttgaccagatcagaaaatctgatggcaccctacaggaacatgacggtatctgcgagatccatgttgctaaatatgctgaaatattcggattgacctctgcggaagccagtaaggatatacggcaggcattgaagagtttcgcggggaaggaagtggttttttatcgccctgaagaggatgccggcgatgaaaaaggctatgaatcttttccttggtttatcaaacgtgcgcacagtccatccagagggctttacagtgtacatatcaacccatatctcattcccttctttatcgggttacagaaccggtttacgcagtttcggcttagtgaaacaaaagaaatcaccaatccgtatgccatgcgtttatacgaatccctgtgtcagtatcgaaagccggatggcttaagcatcgtctctctggaaaatcgactggatcatagagcggtaccagctgcctcaaagttaccagcgtatgccctgacttccgccgccgcttcctgcaggatgttcagaatgaaactcatggaaacacttaaccagtgcataaacgctggtcatgaaatgacgaaggctatcgccattgcacagtttaatgatgacagcccggaagcgaggaaaataacccggcgctggagaataggtgaagcagcggatttagttggggtttcttctcaggctatcagagatgccgagaaagcagggcgactaccgcacccggatatggaaattcgaggacgggttgagcaacgtgttggttatacaattgaacaaattaatcatatgcgtgatgtgtttggtacgcgattgcgacgtgctgaagacgtatttccaccggtgatcggggttgctgcccataaaggtggcgtttacaaaacctcagtttctgttcatcttgctcaggatctggctctgaaggggctacgtgttttgctcgtggaaggtaacgacccccagggaacagcctcaatgtatcacggatgggtaccagatcttcatattcatgcagaagacactctcctgcctttctatcttggggaaaaggacgatgtcacttatgcaataaagcccacttgctggccggggcttgacattattccttcctgtctggctctgcaccgtattgaaactgagttaatgggcaaatttgatgaaggtaaactgcccaccgatccacacctgatgctccgactggccattgaaactgttgctcatgactatgatgtcatagttattgacagcgcgcctaacctgggtatcggcacgattaatgtcgtatgtgctgctgatgtgctgattgttcccacgcctgctgagttgtttgactacacctccgcactgcagtttttcgatatgcttcgtgatctgctcaagaacgttgatcttaaagggttcgagcctgatgccaccgaaacgagcgatcagggtcggcaaagctgtggagatgaaatgggcaacaccttccacactgcgagtaaagctcgcaatccgggtggaggcctccacgtcctagcgcagtccagtcccgggcgcagggaggagagctggtcagccaagattccaagacaggtgtccacctcctccaacgaagcggaacacgccaccaggttcatgtggaggctcccaggcgcccgcgccgcgcttcgggtgatccggacggcggtggagaagctgagccgggctgaagcggggagccagacagcggcgggagcgatggagcgcgctgtagtgcgctgcgtaccttcggaacccaagctgagcctgtcattcgctttggctgatggtagccacaagaacatgcagcgcgaccagagcgagccgctgggtcgagtcctcagccgcatcgctaccaatgccctaaagggtcacgctaaggcggccgccgccaagaagagcaggaagagccggccgaatgctagcggcggtgcggcctgttcagggccggggcctgagccggctgtgttctgcgagcccgtggtgaagctgtactaccgggaagaggcagtggctgaggacgtgctcaacgtggatgcctggcaagacggcgcggtgctgcagatcggcgatgttaagtacaaggtggagcgcaacccgcccgccttcaccgaactgcagttgccgcgctacatcatggccgggttccctgtgtgccccaaactcagcctcgaatttggggatcccgccagctcccttttccgctggtataaggaagccaagcccggagcggcggagcccgaggtcggtgtcccctcgtcattgtctccctcctcaccttcttcttcttggactgagactgatgtggaggagcgtgtctacaccccgtccaatgccgacatcgggctaaggctcaagcttcactgcaccccaggcgatgggcagcgctttgggcacagccgggagttggaaagtgtgtgtgtggtagaggctgggcctggcacctgcacttttgaccaccggcatctctacacgaagaaggtgactgaggacgctctcatccgcactgtctcttacaacatcctggcagacacgtacgcgcagactgagttctcgcgaacggttctgtacccatactgtgccccctacgccctggagctcgactaccgccagaaccttatccagaaggaactcaccggctacaacgccgatgtcatctgtttcaggagcttggtacccgccctagaggccttcgggctcgagggggtgtttcgaatcaagcagcacgaaggcctggccactttctaccgaaagtctaagttcagccttcttagccagcatgacatttcattctacgaagccctcgagtccgacccacttcacaaagaactgctggagaaactagttttgtacccatcagcgcaggagaaggtgctccagagatcttctgttcttcagcatataaacagaaccaaagacaaaaaccatatgattatctcaatagatgcggaaaaggcctttgacaaaattcaacagtgcttcatgctaaaaactctcaataaattaggtattgatgggacgtatctcaaaataataagagctatctatgacaaacccacagccaatatcatactgaatgggcaaaaactggaagcattccctttgaaaactggcacaagacagggatgccctctttcaccactcctattcaacaaagtgttagaagttctggccagggcaatcaggcaggagaaggaaataaagggtattcagttaggaaaagaggaagtcaaattgtccctgtttgcagatgacatgattgtatatctagaaaaccccattgtctcagcccaaaatctccttaagctgataggtaacttcagcaaagtctcagaatacaaaatcaatgtgcaaaaatcacaagcattcttatacaccaataacagacaaacagagagccaaatcacgagtgaactcccattcacaattgcttcaaagagaataaaacacctaggaatccaacttacaagggacatgaaggacctcttcaaggagaactacaaaccactgctcaacaaaataaaagaggatacaaacaaatggaagaacattccatgctcatgggtaggaagaatcaatatcgtgaaaatggccatactgcccaaggtaatttatagattcaatgccatccccatcaagctaccaatgactttcttcacagaattggaaaaaactactttgaagttcatatggaaccaaaaaagagcctgcattgccaagtcaattctaagccaaaagaacaaagctggaggcatcacgctacctgacttcaaactgtactacaaggctacagtaaccaaaacagcatggtactggtaccaaaacagagatatagaccaatggaacagaacagaggcctcagaaataatgccgcatatctacaaccatctgatctttgacaaacctgagaaaaacaagcaatggggaaaggattccctatttaataaatggtgctgggaaaactggctagccatatgtagcaagctgaaactggatcccttccttacacctcatacaaaaactaattcaagatggattaaagacttaaatgttagacctaaaaccataaaaaccctagaagaaaacctaggcaataccattcaggacataggcatgggcaaggacttcaagcctaaaacaccaaaagcaatggcaacaaaagccaaaattgacaaatgggatctaattaaactaaagagcttctgcacagcaaaagaaactaccatcagagtgaacaggcaacctacagaatgggagaaaatttttgcaatctacccatctgacaaagggctagtatccagaatctacaatgaactcaaacaaatttacaagaaaaaaacaaacaaccccatcaaaaagtgggcaaaggacatgaacagacacttctcaaaagaagacatttttgcagccaaaagacacatgaaaaaatgctcatcatcactaatcatcaaagaaatgcaaatcaaaaccacaatgagataccatctcacaccagttagaatggcgatcattaaaaagtcaggaaacaacagtcaggcaccgtgtatgaaatctaacaatgcgctcatcgtcatcctcggcaccgtcaccctggatgctgtaggcataggcttggttatgccggtactgccgggcctcttgcgggatatcgtccattccgacagcatcgccagtcactatggcgtgctgctagcgctatatgcgttgatgcaatttctatgcgcacccgttctcggagcactgtccgaccgctttggccgccgcccagtcctgctcgcttcgctacttggagccactatcgactacgcgatcatggcgaccacacccgtcctgtggatctacccactagtcaattcaccatcttgttga

SEQ ID NO: 139954 - DNA, 1980 bp, Homo sapiens
  misc_feature (1)...(1980): n = a,t,c or g
atggcggaaacagcggttatcaatcacaagaaacgtaaaaatagcccgcgaatcgtccagtcaaacgacctcactgaggcggcatatagtctctcccgggatcaaaaacgtatgctgtatctgttcgttgaccagatcagaaaatctgatggcaccctacaggaacatgacggtatctgcgagatccatgttgctaaatatgctgaaatattcggattgacctctgcggaagccagtaaggatatacggcaggcattgaagagtttcgcggggaaggaagtggttttttatcgccctgaagaggatgccggcgatgaaaaaggctatgaatcttttccttggtttatcaaacgtgcgcacagtccatccagagggctttacagtgtacatatcaacccatatctcattcccttctttatcgggttacagaaccgggttacgcagtttcgggttagtgaaacaaaagaaatcaccaatccgtatgccatgcgtttatacgaatccctgtgtcagtatcgtaagccggatggctcaggcatcgtctctctgaaaatcgactggatcatagagcgttaccagctgcctcanagttaccagcgtatgcctgacttccgccgccgcttcctgcaggtctgtgttaatgagatcaacagcagaactccaatgcgcctctcatacattgagaaaaagaaaggccgccagacgactcatatcgatgttcagattgaaactgatggaaaactcaaccagtgcataaacgctggtcatgaaatgacgaaggctatcgccattgcacagtttaatgatgacagcccggaagcgaggaaaataacccggcgctggagaataggtgaagcagcggatttagttggggtttcttctcaggctatcagagatgccgagaaagcagggcgactaccgcacccggatatggaaattcgaggacgggttgagcaacgtgttggttatacaattgaacaaattaatcatatgcgtgatgtgtttggtacgcgattgcgacgtgctgaagacgtatttccaccggtgatcggggttgctgcccataaaggtggcgtttacaaaacctcagtttctgttcatcttgctcaggatctggctctgaaggggctacgtgttttgctcgtggaaggtaacgacccccagggaacagcctcaatgtatcacggatgggtaccagatcttcatattcatgcagaagacactctcctgcctttctatcttggggaaaaggacgatgtcacttatgcaataaagcccacttgctggccggggcttgacattattccttcctgtctggctctgcaccgtattgaaactgagttaatgggcaaatttgatgaaggtaaactgcccaccgatccacacctgatgctccgactggccattgaaactgttgctcatgactatgatgtcatagttattgacagcgcgcctaacctgggtatcggcacgattaatgtcgtatgtgctgctgatgtgctgattgttcccacgcctgctgagttgtttgactacacctccgcactgcagtttttcgatatgcttcgtgatctgctcaagaacgttgatcttaaagggttcgagcctgatgtatttattcgcgataagctcatggagcggcgtaaccgtcgcacaggaaggacagagaaagcgcggatctgggaagtgacggacagaacggtcaggacctggattggggaggcggttgccgccgctgctgctgacggtgtgacgttctctgttccggtcacaccacatacgttccgccattcctatgcgatgcacatgctgtatgccggtataccgctgaaagttctgcaaagcctgatgggacataagtccatcagttcaacggaagtctacacgaaggtttttgcgctggatgtggctgcccggcaccgggtgcagtttgcgatgccggagtctgatgcggttgcgatgctgaaacaattatcctga

SEQ ID NO: 139955 - DNA, 2472 bp, Homo sapiens
atgaaactcatggaaacacttaaccagtgcataaacgctggtcatgaaatgacgaaggctatcgccattgcacagtttaatgatgacagcccggaagcgaggaaaataacccggcgctggagaataggtgaagcagcggatttagttggggtttcttctcaggctatcagagatgccgagaaagcagggcgactaccgcacccggatatggaaattcgaggacgggttgagcaacgtgttggttatacaattgaacaaattaatcatatgcgtgatgtgtttggtacgcgattgcgacgtgctgaagacgtatttccaccggtgatcggggttgctgcccataaaggtggcgtttacaaaacctcagtttctgttcatcttgctcaggatctggctctgaaggggctacgtgttttgctcgtggaaggtaacgacccccagggaacagcctcaatgtatcacggatgggtaccagatcttcatattcatgcagaagacactctcctgcctttctatcttggggaaaaggacgatgtcacttatgcaataaagcccacttgctggccggggcttgacattattccttcctgtctggctctgcaccgtattgaaactgagttaatgggcaaatttgatgaaggtaaactgcccaccgatccacacctgatgctccgactggccattgaaactgttgctcatgactatgatgtcatagttattgacagcgcgcctaacctgggtatcggcacgattaatgtcgtatgtgctgctgatgtgctgattgttcccacgcctgctgagttgtttgactacacctccgcactgcagtttttcgatatgcttcgtgatctgctcaagaacgttgatcttaaagggttcgagcctgattcaggaccctcagctgcaggtttgttggtgtttgctggaggtccactccaggccctgtgtgcctgggtatcagcagtggaggctgcagaacagtggatattgtcaattcgggaggatcgaaacggcagatcgcaaaaaacagtacatacagaaggagacatgaacatgaacatcaaaaaaattgtaaaacaagccacagttctgacttttacgactgcacttctggcaggaggagcgactcaagccttcgcgaaagaaaataaccaaaaagcatacaaagaaacgtacggcgtctctcatattacacgccatgatatgctgcagatccctaaacagcagcaaaacgaaaaataccaagtgcctcaattcgatcaatcaacgattaaaaatattgagtctgcaaaaggacttgatgtgtgggacagctggccgctgcaaaacgctgacggaacagtagctgaatacaacggctatcacgttgtgtttgctcttgcgggaagcccgaaagacgctgatgacacatcaatctacatgttttatcaaaaggtcggcgacaactcaatcgacagctggaaaaacgcgggccgtgtctttaaagacagcgataagttcgacgccaacgatccgatcctgaaagatcagacgcaagaatggtccggttctgcaacctttacatctgacggaaaaatccgtttattctacactgactattccggtaaacattacggcaaacaaagcctgacaacagcgcaggtaaatgtgtcaaaatctgatgacacactcaaaatcaacggagtggaagatcacaaaacgatttttgacggagacggaaaaacatatcagaacgttcagcagtttatcgatgaaggcaattatacatccggcgacaaccatacgctgagagaccctcactacgttgaagacaaaggccataaataccttgtattcgaagccaacacgggaacagaaaacggataccaaggcgaagaatctttatttaacaaagcgtactacggcggcggcacgaacttcttccgtaaagaaagccagaagcttcagcagagcgctaaaaaacgcgatgctgagttagcgaacggcgccctcggtatcatagagttaaataatgattacacattgaaaaaagtaatgaagccgctgatcacttcaaacacggtaactgatgaaatcgagcgcgcgaatgttttcaaaatgaacggcaaatggtacttgttcactgattcacgcggttcaaaaatgacgatcgatggtattaactcaaacgatatttacatgcttggttatgtatcaaactctttaaccggcccttacaagccgctgaacaaaacagggcttgtgctgcaaatgggtcttgatccaaacgatgtgacattcacttactctcacttcgcagtgccgcaagccaaaggcaacaatgtggttatcacaagctacatgacaaacagaggcttcttcgaggataaaaaggcaacatttgcgccaagcttcttaatgaacatcaaaggcaataaaacatccgttgtcaaaaacagcatcctggagcaaggacagctgacagtcaactaa

SEQ ID NO: 139956 - DNA, 1923 bp, Homo sapiens
  misc_feature (1)...(1923): n = a,t,c or g
atgggggaaagggaagccagagaggaagaagaatcagactgcagccaggcaggcctcagcagcggcttggagagcatcccagtgtatcagcacccacctcacctggattttgccgatttcggaaccaccatcaaacaggattttcgcctgctggggcaaaccagcgtggaccgcttgctgcaactctctcagggccaggcggtgaagggcaatcagctgttgcccgtctcactggtgaaaagaaaaaccaccctggcgcccaatacgcaaaccgcctctccccgcgcgttggccgattcattaatgcagctggcacgacaggtttcccgactggaaagcgggcaggattttgccgatttcggaaccaccatcaaacaggattttcgcctgctggggcaaaccagcgtggaccgcttgctgcaactctctcagggccaggcggtgaagggcaatcagctgttgcccgtctcactggtgaaaagaaaaaccaccctggcgcccaatacgcaaaccgcctctccccgcgcgttggccgattcattaatgcagctggcacgacaggtttcccgactggaaagcgggcaggattttgccgatttcggaaccaccatcaaacaggattttcgcctgctggggcaaaccagcgtggaccgcttgctgcaactctctcagggccaggcggtgaagggcaatcagctgttgcccgtctcactggaaacagctatgaccatgattacgaattcgagctcggtacccacagttgaagatgccagaattgctgtgaccatcgtggccataattaaacgtttcatacttacctcattctttaacagttttagaagacgcctgccatcatattgggatctggctctgaaggggctacgtgttttgctcgtggaaggtaacgacccccagggaacagcctcaatgtatcacggatgggtaccagatcttcatattcatgcagaagacactctcctgcctttctatcttggggaaaaggacgatgtcacttatgcaataaagcccacttgctggccggggcttgacattattccttcctgtctggctctgcaccgtattgaaactgagttaatgggcaaatttgatgaaggtaaactgcccaccgatccacacctgatgctccgactggccattgaaactgttgctcatgactatgatgtcatagttattgacagcgcgcctaacctgggtatcggcacgattaatgtcgtatgtgctgctgatgtgctgattgttcccacgcctgctgagttgtttgactacacctccgcactgcagtttttcgatatgcttcgtgatctgctcaagaacgttgatcttaaagggttcgagcctgataggcccttttcctgctcttctttctggggaaaaaggaggatgttcacttatgcaataaagcccccctggctggccgggggcttgacattattcccttctggtcgggtctggcccggtattgaaactgagttaatgggcaaatttgatgaaggtaactgccccaccgatccacacctgatgctccgactggccattgaaactgttgctcatgactatgatgtcatagttattgacagcgcgcctaacctgggtatcggcacgattaatgtcgtatgtgctgctgatgtgctgattgttcccacgcctgctgagttgtttgactacacctccgcactgcagtttttcgatatgcttcgtgatctgctcaagaacgttgatcttaaagggttcgagcctgatgtacgtattttgcttaccaaatacagcaatagtaatggctctcagtccccgtggatggaggagcaaattcgggatgcctggggaagcatggttctaaaaaatgttgtacgtgaaacggatgaagttggtaaaggtcagatccggatgagaactgtnttttga

SEQ ID NO: 139957 - DNA, 2262 bp, Homo sapiens; identical to SEQ ID NO: 119030

SEQ ID NO: 139958 - DNA, 1962 bp, Homo sapiens; identical to SEQ ID NO: 118114

SEQ ID NO: 139959 - DNA, 2421 bp, Homo sapiens; identical to SEQ ID NO: 119313

SEQ ID NO: 139960 - DNA, 1919 bp, Homo sapiens; identical to SEQ ID NO: 118398

SEQ ID NO: 139961 - DNA, 2169 bp, Homo sapiens; identical to SEQ ID NO: 118116
  misc_feature (1)...(2169): n = a,t,c or g

SEQ ID NO: 139962 - DNA, 5100 bp, Homo sapiens
atgcaacttgtatggaagctgacgcacacaacagaagctcagccttgcctttctgaactgatcagaaaatctgatggcaccctacaggaacatgacggtatctgcgagatccatgttgctaaatatgctgaaatattcggattgacctctgcggaagccagtaaggatatacggcaggcattgaagagtttcgcggggaaggaagtggttttttatcgccctgaagaggatgccggcgatgaaaaaggctatgaatcttttccttggtttatcaaacgtgcgcacagtccatccagagggctttacagtgtacatatcaacccatatctcattcccttctttatcgggttacagaaccggtttacgcagtttcggcttagtgaaacaaaagaaatcaccaatccgtatgccatgcgtttatacgaatccctgtgtcagtatcgtaagccggatggctcaggcatcgtctctctgaaaatcgactggatcatagagcgttaccagctgcctcaaagttaccagcgtatgcctgacttccgccgccgcttcctgcaggtctgtgttaatgagatcaacagcagaactccaatgcgcctctcatacattgagaaaaagaaaggccgccagacgactcatatcgtattttccttccgcgatatcacttccatgacgacaggaagtaccttgtactttggcagcctgaaagagtgcttgctgagtgtgctaaaagctcaatttatgttgctttttcctttttgcattgcttcagtgcaagctgtattttatgaaggttcggtggcattttccaaagtagaaaggattttgccgatttcggaaccccccatcaaacaggattttcgcctgttgggccaaaccagcgtggaccgcttgctgcaactctctcagggccaggcggtgaagggcaatcagctgttgcccgtctcactggtgaaaagaaaaaccaccctggcgcccaatacgcaaaccgcctctccccgcgcgttggccgattcattaatgcagctggcacgacaggtttcccgactggaaagcgggcaggattttgccgatttcggaaccaccatcaaacaggattttcgcctgctggggcaaaccagcgtggaccgcttgctgcaactctctcagggccaggcggtgaagggcaatcagctgttgcccgtctcactgaccgttcagctggatattacggcctttttaaagaccgtaaagaaaaataagcacaagttttatccggcctttattcacattcttgcccgcctgatgaatgctcatccggagttccgtatggcaatgaaagacggtgagctggtgatatgggatagtgttcacccttgttacaccgttttccatgagcaaactgaaacgttttcatcgctctggagtgaataccacgacgatttccggcagtttctacacatatattcgcaagatgtggcgtgttacggtgaaaacctggcctatttccctaaagggtttattgagaatatgtttttcgtctcagccaatccctgggtgagtttcaccagttttgatttaaacgtggccaatatggacaacttcttcgcccccgttttcaccatgggcaaatattatacgcaaggcgacaaggtgctgatgccgctggcgattcaggttcatcatgccgtttgtgatggcttccatgtcggcagaatgcttaatgaattacaacagtactgcgatgagtggcagggcggggcggattttgccgatttcggaaccaccatcaaacaggattttcgcctgctggggcaaaccagcgtggaccgcttgctgcaactctctcagggccaggcggtgaagggcaatcagctgttgcccgtctcactggccgttccagtacttccagaggaagacatgaacatgaacatcaaaaaaaattgtaaaacaagccccagttctgacttttacgactgcactctggcaggaggagcgattcaagccttcgcgaaagaaaataaccacaaagcatacaaagaaacgtacggcgtctctcatattacacgccatgatatgctgcagatccctaaacagcagcaaaacgaaaaataccaagtgcctcaattcgatcaatcaacgattaaaaatattgagtctgcaaaaggacttgatgtgtgggacagctggccgctgcaaaacgctgacggaacagtagctgaatacaacggctatcacgttgtgtttgctcttgcgggaagcccgaaagacgctgatgacacatcaatctacatgttttatcaaaaggtcggcgacaactcaatcgacagctggaaaaacgcgggccgtgtctttaaagacagcgataagttcgacgccaacgatccgatcctgaaagatcagacgcaagaatggtccggttctgcaacctttacatctgacggaaaaatccgtttattctacactgactattccggtaaacattacggcaaacaaagcctgacaacagcgcaggtaaatgtgtcaaaatctgatgacacactcaaaatcaacggagtggaagatcacaaaacgatttttgacggagacggaaaaacatatcagaacgttcagcagtttatcgatgaaggcaatgaggggattttgccgatttcggaaccacccatcaaacaggattttcgcctgctggggcaaaccagcgtggaccgcttgctgcaactctctcagggccaggcggtgaagggcaatcagctgttgcccgtctcactggtgaaaagaaaaaccaccctggcgcccaatacgcaaaccgcctctccccgcgcgttggccgattcattaatgcagctggcacgacaggtttcccgactggaaagcgggcaggattttgccgatttcggaaccaccatcaaacaggattttcgcctgctggggcaaaccagcgtggaccgcttgctgcaactctctcagggccaggcggtgaagggcaatcagctgttgcccgtctcactggtgaaaagaaaaaccaccctggcgcccaatacgcaaaccgcctctccccgcgcgttggccgattcattaatgcagctggcacgacaggtttcccgactggaaagcgggcaggattttgccgatttcggaaccaccatcaaacaggattttcgcctgctggggcaaaccagcgtggaccgcttgctgcaactctctcagggccaggcggtgaagggcaatcagctgttgcccgtctcactgaaaccttatgcttgtcaaattccaggatgtaccaaacgctacacagacccaagttccctaagaaagcatgtgaaggcacattcttccaaagagcaacaagcaaggaaaaaggatcacaactcctcgccagcaagggaacacaactggacggcaaatgagtttgatgaattgacagaagtaggcttcagaagggattttgccgatttcggaaccaccatcaaacaggattttcgcctgctggggcaaaccagcgtggaccgcttgctgcaactctctcagggccaggcggtgaagggcaatcagctgttgcccgtctcactggtgaaaagaaaaaccaccctggcgcccaatacgcaaaccgcctctccccgcgcgttggccgattcattaatgcagctggcacgacaggtttcccgactggaaagcgggcaggattttgccgatttcggaaccaccatcaaacaggattttcgcctgctggggcaaaccagcgtggaccgcttgctgcaactctctcagggccaggcggtgaagggcaatcagctgttgcccgtctcactggtgaaaagaaaaaccaccctggcgcccaatacgcaaaccgcctctccccgcgcgttggccgattcattaatgcagctggcacgacaggtttcccgactggaaagcgggcaggattttgccgatttcggaaccaccatcaaacaggattttcgcctgctggggcaaaccagcgtggaccgcttgctgcaactctctcagggccaggcggtgaagggcaatcagctgttgcccgtctcactggtgaaaagaaaaaccaccctggcgcccaatacgcaaaccgcctctccccgcgcgttggccgattcattaatgcagctggcacgacaggtttcccgactggaaagcgggcaggattttgccgatttcggaaccaccatcaaacaggattttcgcctgctggggcaaaccagcgtggaccgcttgctgcaactctctcagggccaggcggtgaagggcaatcagctgttgcccgtctcactggtgaaaagaaaaaccaccctggcgcccaatacgcaaaccgcctctccccgcgcgttggccgattcattaatgcagctggcacgacaggtttcccgactggaaagcgggcaggattttgccgatttcggaaccaccatcaaacaggattttcgcctgctggggcaaaccagcgtggaccgcttgctgcaactctctcagggccaggcggtgaagggcaatcagctgttgcccgtctcactggtgaaaagaaaaaccaccctggcgcccaatacgcaaaccgcctctccccgcgcgttggccgattcattaatgcagctggcacgacaggtttcccgactggaaagcgggcaggattttgccgatttcggaaccaccatcaaacaggattttcgcctgctggggcaaaccagcgtggaccgcttgctgcaactctctcagggccaggcggtgaagggcaatcagctgttgcccgtctcactggtgaaaagaaaaaccaccctggcgcccaatacgcaaaccgcctctccccgcgcgttggccgattcattaatgcagctggcacgacaggtttcccgactggaaagcgggcaggattttgccgatttcggaaccaccatcaaacaggattttcgcctgctggggcaaaccagcgtggaccgcttgctgcaactctctcagggccaggcggtgaagggcaatcagctgttgcccgtctcactggtgaaaagaaaaaccaccctggcgcccaatacgcaaaccgcctctccccgcgcgttggccgattcattaatgcagctggcacgacaggtttcccgactggaaagcgggcagtga

SEQ ID NO: 139963 - DNA, 2305 bp, Homo sapiens
  misc_feature (1)...(2305): n = a,t,c or g
agttagagctgaagaagctggcaacctggaaaaagctaacgcacacaaaggaaaaaaaaaaaagagagaagaaggggtagaagaaggaggaggaggagaaggaagaggaagagagaaaggaagaagaggagaagaagaggagctattctcctatgccactgccctggtgacggggcacatggccgaagggagcgcagcgtccgggccagggaccaagccccgcggcgtccggcccgcgcccttcgccgaccgggcgccccctgaccgtcaccacgaaagcagcgcaggagacaaagcccgggactcgggttcagagtccccggcgcagcgcaaagcccgcgccttcccgccagcccgccgccgcgctccgccgggcagccgagggctccgcacgccgcgcctctggcccgcgctgccccggccgcagccgccgggaacatcctccgcctcctcccgctcctcccctcgcgctctgcgcccgccgccgccggcaccgccgacctccccgcgccgctggcgccggccagcgcagaaatatttccagcaaattcattctgcaatcggcttgcataacgctgaccacgttcataagcacttgttgggcgataatcgttacccaatctggataatgcagccatctgctcatcatccagctcgccaaccagaacacgataatcactttcggaaggagcgactcaaggccttcgcgaaagaaaaatacccacataagcatacaaagaaacggtcgggcgtttttcatattacacgccatgatatgctgcagatccctaaacagcagcaaaacgaaaaataccaagtgcctcaattcgatcaatcaacgattaaaaatattgagtctgcaaaagnacttgatgtgtgggacagctggccgctgcaaaacgctgacggaacagtagctgaatacaacggctatcacgttgtgtttgctcttgcgggaagcccgaaagacgctgatgacacatcaatctacatgttttatcaaaaggtcggcgacaactcaatcgacagctggaaaaacgcgggccgtgtctttaaagacagcgataagttcgacgccaacgatccgatcctgaaagatcagacgcaagaatggtccggttctgcaacctttacatctgacggaaaaatccgtttattctacactgactattccggtaaacattacggcaaacaaagcctgacaacagcgcaggtaaatgtgtcaaaatctgatgacacactcaaaatcaacggagtggaagatcacaaaacgatttttgacggagacggaaaaacatatcagaacgttcagcagtttatcgatgaaggcaattatacatccggcgacaaccatacgctgagagaccctcactacgttgaagacaaaggccataaataccggggtcctttagagtccccatcgacgcatcaagccgagtttaaccctacttcttgtgtttcgtccttgggcacccttcaaggctttcccgcccccgcttggctcgctctcgcgcaccctgtgcaccctttgaaacacaagagcgggggaagcaaccggttaagcgctgctatttggggcataaaaaggaagccggccagagtttgccctggcacaggcatccatgcctccagccaaattcaaggtgagtggaggacagagtgtgctgtagggcccaaggccaaggccaaggccacggcagggtggaggcgtgggaacaatcagcacatcagcagcacatacgacattaatcgtgccgatacccaggttaggcgcgctgtcaataactatgacatcatagtcatgagcaacagtttcaatggccagtcggagcatcagacctatgagtccatagttattgacagcgcgcctaacctgggtatcggcacgattaatgtcgtatgtgctgctgatgtgctgattgttcccacgcctgctgagttgtttgactacacctccgcactgcagtttttcgatatgcttcgtgatctgctcaagaacgttgatcttaaagggttcgagcctgatgtacgtattttgcttaccaaatacagcaatagtaatggctctcagtccccgtggatggaggagcaaattcgggatgcctggggaagcatggttctaaaaaatgttgtacgtgaaacggatgaagttggtaaaggtcagatccggatgagaactgtttttgaacaggccattgatcaacgctcttcaactggtgcctggagaaatgctctttctatttgggaacctgtctgcaatgaaattttcgatcgtctgattaaaccacgctgggagattagataa

SEQ ID NO: 139964 - DNA, 2106 bp, Homo sapiens
atgaacatgaacatcaaaaaaattgtaaaacaagccacagttctgacttttacgactgcacttctggcaggaggagcgactcaagccttcgcgaaagaaaataaccaaaaagcatacaaagaaacgtacggcgtctctcatattacacgccatgatatgctgcagatccctaaacagcagcaaaacgaaaaataccaagtgcctcaattcgatcaatcaacgattaaaaatattgagtctgcaaaaggacttgatgtgtgggacagctggccgctgcaaaacgctgacggaacagtagctgaatacaacggctatcacgttgtgtttgctcttgcgggaagcccgaaagacgctcatgacacatcaatctacatgttttatcaaaagatccgtatggcaatgaaagacggtgagctggtgatatcggatagtgttcacccttgttacacggttttccatgagcgaactgaaacgttttcatcgctctggagtgcatccctcgacgatttgcggcagtttctacacatatattcgcaagatgtggcgtgttgcggtgaaaacctggcgtatttccataaagggtttattgagaatatgttcgtggtctcagccaatccctggaccgttcagctggatattacggcctttttaaagaccgtaaagaaaaataagcacaagttttatccggcctttattcacattcttgcccgcctgatgaatgctcatccggagttccgtatggcaatgaaagacgggtttattgagaatatgtttttcgtctcagccaatccctgggtgagtttcaccagttttgatttaaacgtggccaatatggacaacttcttcgcccccgttttcaccatgggcaaatattatacgcaaggcgacaaggtgttgatgccgctggcgactcaggaacatgacggtatctgcgagatccatgttgctaaatatgctgaaatattcggattgacctctgcggaagccagtaaggatatacggcaggcattgaagagtttcgcggggaaggaagtggttttttatcgccctgaagaggatgccggcgatgaaaaaggctatgaatcttttccttggtttatcaaacgtgcgcacagtccatccagagggctttacagtgtacatatcaacccatatctcattcccttctttatcgggttacagaaccggtttacgcagtttcggcttagtgaaacaaaagaaatcaccaatccgtatgccatgcgtttatacgaatccctgtgtcagtatcgtaagccggatggctcaggcatcgtctctctgacaatcgactggatcatagagcgttaccagctgcctcaaagttaccagcgtatgcctgacttccgccgccgcttcctgcaggtctgtgttaatgagatcaacagcagaactccaatgcgcctctcatacattgagaaaaagaaagtccgccagacgactcatatcgctttgcagaactttcagcggtataccggcatacagcatgtgcatcgcataggaatggcggaacatgcccttctggttggcgagctggatgatgagcagatggctgcattatccagattgggtaacgattatcgcccaacaagtgcttatgaacgtggtcagcgttatgcaagccgattgcagaatgaatttgctggaaatatttctgcgctggctgatgcggaaaatatttcacgtaagattattacccgctgtatcaacaccgccaaattgcctaaatcagttgttgctcttttttctcaccccggtgaactatctgcccggtcaggtgatgcacttcaaaaagcctttacagataaagaggaattacttaagcagcaggcatctaaccttcatgagcagaaaaaagctggggtgatatttgaagctgaagaagttatcactcttttaacttctgtgcttaaaacgtcatctgcatcaagaactagtttaagctcacgacatcagtttgctcctggagcgacagtattgtataagggcgataaaatggtgcttaacctggacaggtctcgtgttccaactgagtgtatagagaaaattgaggccattcttaaggaacttgaaaagccagcaccctga

SEQ ID NO: 139965 - DNA, 2127 bp, Homo sapiens
atgaacatgaacatcaaaaaaattgtaaaacaagccacagttctgacttttacgactgcacttctggcaggaggagcgactcaagccttcgcgaaagaaaataaccaaaaagcaaacaaagaaacgtacggcgtctctcatattacacgccatgatatgctgcagatccctaaacagcagcaaaacgaaaaataccaagtgcctcaattcgatcaatcaacgattaaaaatattgagtctgcaaaaggacttgatgtgtgggacagctggccgctgcaaaacgctgacggaacagtagctgaatacaacggctatcacgttgtgtttgctcttgcgggaagcccgaaagacgctgatgacacatcaatctacatgtttttcaaaaggggggcgatctttagagtccacaaacacgctgtcaacccgatgtcacctaaatgtcgacggccaggcggccgccaggcctacccactagtcaattgggaggatcgaaacggcagatcgcaaaaaacagtacatacagaaggagacatgaacatgaacatcaaaaaaattgtaaaacaagccacagttctgacttttacgactgcacttctggcaggaggagcgactcaagccttcgcgaaagaaaataaccaaaaagcatacaaagaaacatccctaaacagcagcaaaacgaaaaataccaagtgcctcaattcgatcaatcaacgattaaaaatattgagtctgcaaaaggacattgatgtgtgggacagctggccgctgcaaaacgctgacggaacagtagctgaatacaacggctatcacgttgtgtctgctcttgcgggaagcccgaaagacgctgatgacacatcaatctacatgttttatcaaaaggtcggcgacaactcaatcgacagctggaaaaacgcgggccgtgtctttaaagacagcgataagttcgacgccaacgatccgatcctgaaagatcagacgcaagaatggtccggttctgcaacctttacatctgacggaaggcgttctttagagtccaccaccacggctgcaagaccgatttggcggaaagacgttgggggggatcagacgcaagaatggtccggttctgcaccctttacatctgacggaaaaatccgtttattttacactgactattccggtaaacattacggcaaacaaagcctgacaacagcgcaggtaaatgtgtcaaaatctgatgacacactcaaaatcaacggagtggaagatcacaaaacgatttttgacggagacggaaaaacatatcagaacgttcagcagtttatcgatgaaggcaattatacatccggcgacaaccatacgctgagagaccctcactacgttgaagacaaaggccataaataccttgtattcgaagccaacacgggaacagaaaacggataccaaggcgaagaatctttatttaacaaagcgtactacggcggcggcacgaacttcttccgtaaagaaagccagaagcttcagcagagcgctaaaaaacgcgatgctgagttagcgaacggcgccctcggtatcatagagttaaataatgattacacattgaaaaaagtaatgaagccgctgatcacttcaaacacggtaactgatgaaatcgagcgcgcgaatgttttcaaaatgaacggcaaatggtacttgttcactgattcacgcggttcaaaaatgacgatcgatggtattaactcaaacgatatttacatgcttggttatgtatcaaactctttaaccggcccttacaagccgctgaacacaacagggcttgtgctgcaaatgggtcttgatccaaacgatgtgacatgggcgtctttagagccccacgaaagctttcaatgggttcgtggtctggctagctcaggagtgaagctgcagacctctgtggtgttacagctcataaaggcaatgtggacccaaagagtgagcagcagcaaggtttattgcaaagagcaaatgaacaatgcttccacaatgtcgaaaagaacctcagctggttgccactgctggcaagggcagcctgcttttattctcttatctggccccacccacatcctgctgattggtccattttacagagagctgattggtccgttttga

SEQ ID NO: 139966 - DNA, 3990 bp, Homo sapiens
atgattttgaaaccgaaagatggaaatatagaagaagttaatagtttaagaaagcaaagagcaggttcttcatcttcaaaaatgaacagtttgggattttgccgatttcggaaccaccatcaaacaggattttcgcctgctggggcaaaccagcgtggaccgcttgctgcaactctctcagggccaggcggtgaagggcaatcagctgttgcccgtctcactggtgaaaagaaaaaccaccctggcgcccaatacgcaaaccgcctctccccgcgcgttggccgattcattaatgcagctggcacgacaggtttcccgactggaaagcgggcagtgagcgcaacgcaattaatggattttgccgatttcggaaccaccatcaaacaggattttcgcctgctggggcaaaccagcgtggaccgcttgctgcaactctctcagggccaggcgtggaagattcccaaaacgatttttgacggagacggaaaaacatatcagaacgttcagcagtttatcgatgaaggcaattatacatccggcgacacccatacgctgagagaccctcactacgttgaagacaaaggccataaataccttgtattcgaagccaacacgggaacagaaaacggataccaaggcgaagaatctttatttaacaaagcgtactacggcggcggcacgaacttcttccgtaaagaaagccagaagcttcagcagagcgctaaaaaacgcgatgctgagttagcgaacggcgccctcggtatcatagagttaaataatgattacacattgaaaaaagtaatgaagccgctgatcacttcaaacacggtaactgatgaaatcgagcgcgcgaatgttttcaaaatgaacggcaaatggtacttgttcactgattcacgcggttcaaaaatgacgatcgatgatacttcgttatcgacaccagctgccccgatggtggattcgttaattgcgcgcgtaggagtaatggctcgcggtaatgccattactttgcctgtatgtggtcgggatgtgaagtttactcttgaagtgctccggggtgatagtgttgagaagacctctcgggtatggtcaggtaatgaacgtgaccaggagctgcttactgaggacgcactggatgatctcatcccttcttttctactgactggtcaacagacaccggcgttcggtcgaagagtatctggtgtcatagaaattgccgatgggagtcgccgtcgtaaagctgctgcacttaccgaaagtgattatcgtgttctggttaggaaacttttctttcttgttcattgttcagaacttagtactatcctagttggcaatataccagccatggtacctaatctccttatactccctttacattgttatgatattgttcacccaaagcgtagtgaagtaatatctccttcataccggatattatatcaccatgagaaagaagatgttggttgtcttatagatgttaacattttagacttgaacggcttgcagccagttctacagagccaatccatttcattggtacaacagtctgaattctcattggaagttacacagtaccaagagagagaacctgtattagtaagagcttcgccatcctgttctgtggatgtaacagaacgggcaggaagctctttacaatctcctttgctttctgctgatcttaccacagctcagacaccttcagaatttttagccttgactgaagattctgtgtctgaaatggatgcattttctaaaagtggaagcatggcatcccactgtgacaactttggccacaatgattctacctctcagatgtccctcaattctgctgctgttacaaagacaacaacagaacttacgggaactgttccctgtgcaattatgtctcctgggaaatataggttagagggtcaatgtagcactgaatctaattcattaccggaaacctctgctgctaatcagaaggaagtgttattacaaattgctgaactacctgctacaagtgtgagccactcagagagtaacctaccagcagatagtgaaagagaagaaaatatagggttacaaaatgctgcctgcagctggggaaggggtgacacaagcacccctgtggtcacccccactgggactatgctgggtcagacccgaagccagaatagcactgggtcttttccaaggcctgctatagccactacctatctctatgtttgctcaaggtccagggctctacaatcagcagaactggaaaaaactactttaaagttcatatggagccaaaaaagagcctgcatcgtcaagtcaatcctaagccaaaagaacaaagctggaggcatcacactacctgacttcaaactatactacaaggctacagtaaccaaaacagcatgggattttgccgatttcggaaccaccatcaaacaggattttcgcctgctggggcaaaccagcgtggaccgcttgctgcaactctctcagggccaggcggtgaagggcaatcagctgttgcccgtctcactggtgaaaagaaaaaccaccctggcgcccaatacgcaaaccgcctctccccgcgcgttggccgattcattaatgcagctggcacgacaggtttcccgactggaaagcgggcaggcgataaaaaaccattcccttccccggaaaactcttcaatgcctgccgtatatcctcactggcttccgcagaggtcaatccgaatatttcagcatacttagcaacaaggctctagcagataccgtcatgttcctggattttgccgatttcggaaccaccatcaaacaggattttcgcctgctggggcaaaccagcgtggaccgcttgctgcaactctctcagggccaggcggtgaagggcaatcagctgttgcccgtctcactggtgaaaagaaaaaccaccctggcgcccaatacgcaaaccgcctctccccgcgcgttggccgattcattaatgcagctggcacgacaggtttcccgactggaaagcgggcaatccccacaatcaggactgaaacatgcattctcccagctgctgtgttttgactactatctgctctcaactaaatccctcttcacgacttggcctcagctctcagcccttactgccttgtccactgtgggtcacaaccccttctccgagcagtctgcactccttgatcaatatggagatcagacgcaagaatggtccggttctgcaacctttacatctgacggaaaaatccgtttattctacactgactattccggtaaacattacggcaaacaaagcctgacaacagcgcaggtaaatgtgtcaaaatctgatgacacactcaaaatcaacggagtggaagatcacaaaacgatttttgacggagacggaaaaacatatcagaacgttcagcagtttatcgatgaaggcaattatacatccggcgacaaccatacgctgagagaccctcactacgttgaagacaaaggccataaataccttgtattcgaagccaacacgggaacagaaaacggataccaaggcgaagaatctttatttaacaaagcgtactacggcggcggcacgaacttcttccgtaaagaaagccagaagcttcagcagagcgctaaaaaacgcgatgctgagttagcgaacggcgccctcggtatcatagagttaaataatgattacacattgaaaaaagtaatgaagccgctgatcacttcaaacacggtaactgatgaaatcgagcgcgcgaatgttttcaaaatgaacggcaaatggtacttgttcactgattcacgcggttcaaaaatgacgatcgatggtattaactcaaacgatatttacatgcttggttatgtatcaaactctttaacgtgttatcctctaccgtcacccgggattctgcacgcagtccttttttttattatacatgtggtagatccaaccaatggaatattatccagcaataaaaggaataaagtactgaaacaggctacaacatga

SEQ ID NO: 139967 - DNA, 2238 bp, Homo sapiens
  misc_feature (1)...(2238): n = a,t,c or g
atgtccggttctgcaacctttacatctgacggaaaaatccgtttattctacactgactattccggtaaacattacggcaaacaaagcctgacaacagcgcaggtaaatgtgtcaaaatctgatgacacactcaaaatcaacggagtggaagatcacaaaacgatttttgacggagacggaaaaacatatcagaacgttcagcagtttatcgatgaaggcaattatacatccggcgacaaccatacgctgagagacccntactacgttgaagacaaaggccataaataccttgtattcgaagccaacacgggaacagaaaacggataccaaggcgaagaatctttatttaacaaagcgtactacggcggcggcacgaacttcttccgtaaagaaagccagaagcttcagcagagcgctaaaaaacgcgatgctgagttagcgaacggcgccctcggtatcatagagttaaataatgattacacattgaaaaaagtaatgaagccgctgatcacttcaaacacggtaactgatgaaatcgagcgcgcgaatgttttcaaaatgaacggcaaatggtacttgttcactgattcacgcggttcaaaaatgacgatcgatggtattaactcaaacgatatttacatgcttggttatgtatcaaactctttaaccggcccttacaagccgctgaacaaaacaggggatcctctagagtcgacctgcaggcatgcaagcttggtgggattttgccgatttcggaaccaccatcaaacaggattttcgcctgctggggcaaaccagcgtggaccgcttgctgcaactctctcagggccaggcggtgaagggcaatcagctgttgcccgtctcactggtgaaaagaaaaaccaccctggcgcccaatacgcaaaccgcctctccccgcgcgttggccgattcattaatgcagctggcacgacaggtttcccgactggaaagcgggcagtgagcgcaacgcaattaatggattttgccgatttcggaaccaccatcaaacaggattttcgcctgctggggcaaaccagcgtggaccgcttgctgcaactctctcagggccaggcggtgaagggcaatcagctgttgcccgtctcactggtgaaaagaaaaaccaccctggcgcccaatacgcaaaccgcctctccccgcgcgttggccgattcattaatgcagctggcacgacaggtttcccgactggaaagcgggcagatttttgccgatttcgcaaccaccatcaaacagatttttcgcctgctggggcaaaccagcgtggaccgcttgctgcaactctctcagggccaggcggaaacagctatgaccatgattacgaattcgagctcggtacccccatcggatggccaacgaagcgtgcgtcgatgccgtgcttggcatagatcgggggttccatcgggaacaggcacagcaccaggcccagaccgaggggctcacgtaatgcacggtcggcacgccgcgctgcttcagccagcgttcgatgcccaggttgaagtcgggcgcgtcgatgccgatgaacacgtccggctgccattccagtgcacgctggcgaaacgcggaacgcagtttcagcaggcgtggcagacgtttcagcagtttatcgatgaaggcaattatacatccggcgacaaccatacgctgagagaccctcactacgttgaagacaaaggccataaataccttgtattcgaagccaacacgggaacagaaaacggataccaaggcgaagaatctttatttaacaaagcgtactacggcggcggcacgaacttcttccgtaaagaaagccagaagcttcagcagagcgctaaaaaacgcgatgctgagttagcgaacggcgccctcggtatcatagagttaaataatgattacacattgaaaaaagtaatgaagccgctgatcacttcaaacacggtaactgatgaaatcgagcgcgcgaatgttttcaaaatgaacggcaaatggtacttgttcactgattcacgcggttcaaaaatgacgatcgatggtattaactcaaacgatatttacatgcttggttatgtatcaaactctttaaccggcccttacaagccgctgaacaaaacagggcttgtgctgcaaatgggtcttgatccaaacgatgtgacattcacttactctcacttcgcagtgccgcaaccaaaggcaacaatgtggttatcacaagctacatga

SEQ ID NO: 139968 - DNA, 1953 bp, Homo sapiens
atgaacatgaacatcaaaaaaattgtaaaacaagccacagttctgacttttacgactgcacttctggcaggaggagcgactcaagccttcgcgaaagaaaataaccaaaaagcatacaaagaaacgtacggcgtctctcatattacacgccatgatatgctgcagatccctaaacagcagcaaaacgaaaaataccaagtgcctcaattcgatcaatcaacgattaaaaatattgagtctgcaaaaggacttgatgtgtgggacagctggccgctgcaaaacgctgacggaacagtagctgaatacaacggctatcacgttgtgtttgctcttgcgggaagcccgaaagacgctgatgacacatcaatctacatgttttatcaaaaggtcggcgacaactcaatcgacagctggaaaaacgcgggccgtgtctttaaagacagcgataagttcgacgccaacgatccgatcctgaaagatcagacgcaagaatggtccggttctgcaacctttacatctgacggaaaaatccgtttattctacacgggatccctaaacagcagcaaaacggaaaaataccaagtgcctcatatcgatcaatcaacgattaaaaatattgagtctgcaaaaggacttgatgtgtgggacagctggccgctgcaaaacgctgacggaacagtagctgaatacaacggctatcacgttgtgtttgctcttgcgggaagcccgaaagacgctgatgacacatcaatctacatgttttatcaaaaggtcggcgacaactcaatcgacagctggaaaaacgcgggccgtgtctttaaagacagcgataagttcgacgccaacgatccgatcctgaaagatcagacgcaagaatggtccggttctgcaacctttacatctgacggaaaaatccgtttattctacactgactattccggtaaacattacggcaaacaaagcctgacaacagcgcaggtaaatgtgtcaaaatctgatgacacactcaaaatcaacggagtggaagatcacaaaacgatttttgacggagacggaaaaacatatcagaacgttcagcagtttatcgatgaaggcaattatacatccggcgacaaccatacgctgagagaccctcactacgttgaagacaaaggccataaataccttgattcgaagccaacacgggaacagaagagcacccccaaccgcaaggagcggcccaggactcagagcttcaccagcgccttcgccgaacggcgcgagtgcatccccaacgtacccgccgacaccaaactctccaaaatcaagaccctgcgcctggccaccagctacatcgcctacctcatggacctgctggccaaggacgaccagaatggcgaggcggaggccttcaaggcagagatcaagaagaccgacgtgaaagaggagaagaggaagaaggagctggcaagtaaatgcctggatttggagcaattaggagcctcagtggaacccacgggaaacctgagaactaagataaccaaggagaagcctaggcacacagggccacctgaagtcgtagtccctggctgctgccctcacagatcgagagcctacaaatccgacaaatatgcccacactttgacagtaaccgcctcccagcacgccccaccaccgccaacacacatggaggggtttgaacttttccaccttccggacctctgcagtccgtcgcaggacgcccaaaccacaggccggacacagatgaagccagaccacagcccccgccccagccaccgcgtgccgcaagccaaaggcaacaatgtggttatcacaagctacatgacaaacagaggcttcttcgaggataaaaaggcaacatttgcgccaagcttcttaatgaacatcaaaggcaataaaacatccgttgtcaaaaacagcatcctggagcaaggacagctgacagtcaactaa

SEQ ID NO: 139969 - DNA, 2451 bp, Homo sapiens; identical to SEQ ID NO: 118121

SEQ ID NO: 139970 - DNA, 2952 bp, Homo sapiens
  misc_feature (1)...(2952): n = a,t,c or g
atggtctctcaggtcacttgctcaggggaaactaagcaccatgccaggaggacacccaagcattcccatggaaagatccacatggaaaggaaccaaggtgcctcaacctgtattcagcaccagtttgccagccatgaaagacaagtgttccaaaaggctttggggaaacttaaacccaacacgccatttgccgcgacgtcttcaatgggtttggaaacagaggaacaggagcccagcatcatcgggaagctgaaggtcgctggcatgctggcagtaggcaaagaagtcaacctggtcctactgctcaaaaacctgagcagggatacgaagacagtgacagtgaacatgacagcctggaccatcatctacaacggcacgcttgtacatgaagtgtggaaggactctgccacaatgtccctggaccctgaggaaggagaccataaccatgatgctcccatttccggcagctacacatctccagccggagggaatttccatgtctggaatgagagctggtttgcccggcaggacctaggcccctcttacaatggctggcaggttctggatgccaccccccaggaggagagtgaaggtacgctcaattgggtgggtgtgttccggtgcggcccagcctcagtcaccgccatccgcgagggtgatgtgcacctggctcacgatggccccttcgtgttttgcggggctctgaccaggaaagaacagtgttccaaaaggctttggggaaaactaaacccacacgccatttgccgcgacgtcttcaatgggtttggaaacagaggaacaggagcccacatcatcgggaagctgaaagtcgctggcatgctgcactttatctgttcgggcaatacgatgcccattgtacttgttgactggtctgatattcgtgagcaaaaacgacttatggtattgcgagcttcagtcgcactacacggtcgttctgttactctttatgagaaagcgttcccgctttcagagcaatgttcaaagaaagctcatgaccaatttctagccgaccttgcgagcattctaccgagtaacaccacaccgctcattgtcagtgatgctggctttaaagtgccatggtataaatccgttgagaagctgggttggtactggttaagtcgacgaatgcagattgaagaagcctttcgagacttgaaaagtcctgccttcggactaggccttcggccttggccgaccgagcgctcaaagcggtttgtttcctgctggttaatcggcctgagccttcacttacatgttgggcttgcggcgttcttggtcagaaacaagnagaaacccccgattaaaaatattgagtctgcaaaaggacttgatgtgtgggacagctggccgctgcaaaacgctgacggaacagtagctgaatacaacggctatcacgttgtgtttgctcttgcgggaagcccgaaagacgctgatgacacatcaatctacatgttttatcaaaaggtcggcgacaactcaatcgacagctggaaaaacgcgggccgtgtctttaaagacagcgataagttcgacgccaacgatccgatcctgaaagatcagacgcaagaatggtccggttctgcaacctttacatctgacggaaaaatccgtttattctacactgactattccggtaaacattacggcaaacaaagcctgacaacagcgcaggtaaatgtgtcaaaatctgatgacacactcaaaatcaacggagtggaagatcacaaaacgatttttgacggagacggaaaaacatatcagaacgttcagcagtttatcgatgaaggcaattatacatccggcgacaaccatacgctgagagaccctcactacgttgaagacaaaggccataaataccttgtattcgaagccaacacgggaacagaaaacggataccaaggcgaagaatctttatttaacaaagcgtactacggcggcggcacgaacttcttccnagaatccccagctctaggagtccagagtatcaactggcagaaggccttcaaccgacaagcgcatcacacagacaagttctccagccaggagctcatcttgcggagaggccaaaacttccaggtcttaatgatcatgaacaaaggccttggctctaacgaaagactggagttcattgtctccacagggccttacccctcagagtcggccatgacgaaggctgtgtttccactctccaatggcagtagtggtggctggagtgcggtgcttcangccagcaatggcaatactctgactatcagcatctccagtcctgccagcgcacccataggacgtcaggcaccgtgtatgaaatctaacaatgcgctcatcgtcatcctcggcaccgtcaccctggatgctgtaggcataggcttggttatgccggtactgccgggcctcttgcgggatatcgtccattccgacagcatcgccagtcactatggcgtgctgctagcgctatatgcgttgatgcaatttctatgcgcacccgttctcggagcactgtccgaccgctttggccgccgcccagtcctgctcgcttcgctacttggagccactatcgactacgcgatcatggcgaccacacccgtcctgtggatctacccactaaaccggtttacgcagtttcggcttagtgaaacaaaagaaatcaccaatccgtatgccatgcgtttatacgaatccctgtgtcagtatcgtaagccggatggctcaggcatcgtctctctgaaaatcgactggatcatagagcgttaccagctgcctcaaagttaccagcgtatgcctgacttccgccgccgcttcctgcaggtctgtgttaatgagatcaacagcagaactccaatgcgcctctcatacattgagaaaaagaaaggccgccagacgactcatatcgtattttccttccgcgatatcacttccatgacgacaggatag

SEQ ID NO: 139971 - DNA, 2233 bp, Homo sapiens
  misc_feature (1)...(2233): n = a,t,c or g
ggattttgccgatttcggaaccaccatcaaacaggattttcgcctgctggggcaaaccagcgtggaccgcttgctgcaactctctcagggccaggcggtgaagggcaatcagctgttgcccgtctcactggtgaaaagaaaaaccaccctggcgcccaatacgcaaaccgcctctccccgcgcgttggccgattcattaatgcagctggcacgacaggtttcccgactggaaagcgggcaccggaaagacgctgatgacacatcaatctacatgttttatcaaaaggtcggcgacaactcaatcgacagctggaaaaacgcgggccgtgtctttaaagacagcgataagttcgacgccaacgatccgatcctgaaagatcagacgcaagaatggtccggttctgcaacctttacatctgacggaaaaatccgtttattctacactgactattccggtaaacattacggcaaacaaagcctgacaacagcgcaggtaaatgtgtcaaaatctgatgacacactcaaaatcaacggagtggaagatcacaaaacgatttttgacggagacggaaaaacatatcagaacgttcagcagtttatcgatgaaggcaattatacatccggcgacaaccatacgctgagagaccctcactacgttgaagacaaaggccataaataccttgtattcgaagccaacacgggaacagaaaacggataccaaggcgaagaatctttatttaacaaagcgtactacggcggcggcacgaacttcttccgtaaagaaagccagaagcttcagcagagcgctaaaaaacgcgatgctgagttagcgaacggcgccctcggtatcatagagttaaataatgattacacattgaaaaaagtaatgaagccgctgatcacttcaaacgcggtcggcgacaactcaatcgacagctggaaaaacgcgggccgtgtctttaaagacagcgataagttcgacgccaacgatccgatcctgaaagatcagacgcaagaatggtccggttctgcaacctttacatctgacggaaaaatccgtttattctacactgactattccggtaaacattacggcaaacaaagcctgacaacagcgcaggtaaatgtgtcaaaatctgatgacacactcaaaatcaacggagtggaagatcacaaaacgatttttgacggagacggaaaaacatatcagaacgttcagcagtttatcgatgaaggcaattatacatccggcgacaaccatacgctgagagaccctcactacgttgaagacaaaggccataaataccttgtattcgaagccaacacgggaacagaaaaaaaataccaaggcgaagaatctttatttaacaaagcgtactacggcggcggcacgaacttcttccgtaaagaaagccagaagcttcagcagagcgctaaaaaacgcgatgctgagttagcgaacggcgccctcggtgtgatctccattcctttgtacatccctcacacgctgttcgaatgggattttggaaaggaaatctgtgtattttggctcactactgactatctgttatgtacagcatctgtatataacattgtcctcatcagctatgatcgatacctgtcagtctcaaatgctatcctaaacagcagcaaagcgaaaaataccaagtgcctcaattcgatcaatcaacgattaaaaatattgagtctgcaaaaggacttgatgtgtggaacagctggccgctgcaaaccgctgacggaaccagtagctgaatacancggctatcacgttgtgtttgctcttgcgggaagcccgaaagacgctgatgacacatcaatctacatgttttatcaaaaggtcggcgacaactcaatcgacagctggaaaaacgcgggccgtgtctttaaagacagcgataagttcgacgccaacgatccgatcctgaaagatcagacgcaagaatggtccggttctgcaacctttacatctgacggaaaaatccgtttattctacactgactattccggtaaacattacggcaaacaaagcctgacaacagcgcaggtaaatgtgtcacaaaatagaaacacactcaaaatcaacggagtggaagatcacaaaacgatttttgacggagacggaaaaacatatcagaacgttcagcagtttatcgatgaaggcaattatacatccggcgacaaccatacgctgagagaccctcactacgtttag

SEQ ID NO: 139972 - DNA, 2823 bp, Homo sapiens
  misc_feature (1)...(2823): n = a,t,c or g
atgacgaaggctatcgccattgcacagtttaatgatgacagcccggaagcgaggaaaataacccggcgctggagaataggtgaagcagcggatttagttggggtttcttctcaggctatcagagatgccgagaaagcagggcgactaccgcacccggatatggaaattcgaggacgggttgagcaacgtgttggttatacaattgaacaaattaatcatatgcgtgatgtgtttggtacgcgattgcgacgtgctgaagacgtatttccaccggtgatcggggttgctgcccataaaggtggcgtttacaaaacctcagtttctgttcatcttgctcaggatctggctctgaaggggctacgtgttttgctcgtggaaggtaacgacccccagggaacagcctcaatgtatcacggatgggtaccagatcttcatattcatgcagaagacactctcctgcctttctatcttggggaaaaggacgatgtcacttatgcaataaagcccacttgctggccggggcttgacattattccttcctgtctggctctgcaccgtattgaaactgagttaatgggcaaatttgatgaagaatttgagagtgaggttcttctcacatcgtggctcaggacccagctgagagaggctcatttgtgtatgattcatgatcacacagcaagggaagaacagacaccggcgttcggtcgaagagtatctggtgtcatagaaattgccgatgggagtcgccgtcgtaaagctgctgcacttaccgaaagtgattatcgtgttctggttggcgagctggatgatgagcagatggctgcattatccagattgggtaacgattatcgcccaacaagtgcttatgaacgtggtcagcgttatgcaagccgattgcagaatgaatttgctggaaatatttctgcgctggctgatgcggaaaatatttcacgtaagattattacccgctgtatcaacaccgccaaattgcctaaatcagttgttgctcttttttctcaccccggtgaactatctgcccggtcaggtgatgcacttcaaaaagcctttacagataaagaggaattacttaagcagcaggcatctaaccttcatgagcagaaaaaagctggggtgatatttgaagctgaagaagttatcactcttttaacttctgtgcttaaaacgtcatctgcatcaagaactagtttaagctcacgacatcagtttgctcctggagcgacagtattgtataagggcgataaaatggtgcttaacctggacagaagtaggactaatgaatcctatgttaagaatgaggaaactgtggctttgggaaggtgtcagatgaaaaaggcagatcggnaatgtgacaatctaaaaacttgtcacacttcacatggatctgtcatggcggaaacagcggttatcaatcacaagaaacgtaaaaatagcccgcgaatcgtccagtcaaacgacctcactgaggcggcatatagtctctcccgggatcaaaaacgtatgctgtatctgttcgttgaccagatcagaaaatctgatggcaccctacaggaacatgacggtatctgcgagatccatgttgctaaatatgctgaaatattcggattgacctctgcggaagccagtaaggatatacggcaggcattgaagagtttcgcggggaaggaagtggttttttatcgccctgaagaggatgccggcgatgaaaaaggctatgaatcttttccttggtttatcaaacgtgcgcacagtccatccagagggctttacagtgtacatatcaacccatatctcattcccttctttatcgggttacagaaccggtttacgcagtttcggcttagtgaaacaaaagaaatcaccaatccgtatgccatgcaatccccctacactgactattccggtaaacattacggcaaacaaagcctgacaacagcgcaggtaaatgtgtcaaaatctgatgacacactcaaaatcaacggagtggaagatcacaaaacgatttttgacggagacggaaaaacatatcagaacgttcagcagtttatcgatgaaggcaattatacatccggcgacaaccatacgctgagagaccctcactacgttgaagacaaaggccataaataccttgtattcgaagccaacacgggaacagaaaacggataccaaggcgaagaatctttatttaacaaagcgtactacggcggcggcacgaacttcttccgtaaagaaagccagaagcttcagcagagcgctaaaaaacgcgatgctgagttagcgaacggcgccctcggtatcatagagttaaataatgattacacattgaaaaaagtaatgaagccgctgatcacttcaaacacggtaactgatgaaatcgagcgcgcgaatgttttcaaaatgaacggcaaatggtacttgttcactgattcacgcggttcaaaaatgacgatcgatgcgggtatcagtcacaagaaacgaaaaaatagcccgcgaatcgtccagtcaaacgacctcactgaggcggcatatagtctctcccgggatcaaaaacgtatgctgtatctgttcgttgaccagatcagaaaatctgatggcaccctacaggaacatgacggtatctgcgagatccatgttgctaaatatgctgaaatattcggnaatacctctgcggaagccagtaaggatatacggcaggcattgaagagtttcgcggggaaggaagtggttttttatcgccctgaagaggatgccggcgatgaaaaaggctatgaatcttttccttggtttatcaaacgtctgtgttaa

SEQ ID NO: 139973 - DNA, 1938 bp, Homo sapiens
atgggtttgctcttggggaaagcccgaaaaaacggtgaagacacatcgatttacatgtttaagcaaaaggtaaatgtgtcaaaatctgatgacacactcaaaatcaacggagtggaagatcacaaaacgatttttgacggagacggaaaaacatatcagaacgttcagcagtttatcgatgaaggcaattatacatccggcgacaaccatacgctgagagaccctcactacgttgaagacaaaggccataaataccttgtattcgaagccaacacgggaacagaaaacggataccaaggcgaagaatctttatttaacaaagcgtactacggcggcggcacgaacttcttccgtaaagaaagccagaagcttcagcagagcgctaaaaaacgcgatgctgagttagcgaacggcgccctcggatgctgcatcataccctgtattcatggattggtgcagagacttatagaaacagctctcaccaaaacctttaattctcccccaccttactcagataaactcctacttttagaaaaccaagcagaacagcagagtcaagacatgttaaagagtttgaagaggaagaattatgaaaatcaagagggggaagtagtaggaaacattgagttcctcttcaaagatccattgtcctctattttcaaagcctatcttccttgcctccttgcccctagttatggatgcagcagactgaagaaattcagacatcccgcaacctgcgattatcgcaaggtcaaggcaaagtccggtaatggggattcttctagagtccgcaaagacgagggaggagcgactcaagccttcgcgaaagaaaataaccaaaaagcatacaaagaaacgtacggcgtctctcatattacacgccatgatatgctgcagatccctaaacagcagcaaaacgaaaaataccaagtgcctcaattcgatcaatcaacgattaaaaatattgagtctgcaaaaggacttgatgtgtgggacagctggccgctgcaaaacgctgacggaacagtagctgaatacaacggctatcacgttgtgtttgctcttgcgggaagcccgaaagacgctgatgacacatcaatctacatgttttatcaaaaggtcggcgacaactcaatcgacagctggaaaaacgcgggccgtgtctttaaagacagcgataagttcgacgccaacgatccgatcctgaaagatcagacgcaagaatgtattgacagcgcgcctaacctgggtatcggcacgattaatgtcgtatgtgctgctgatgtgctgattgttcccacgcctgctgagttgtttgactacacctccgcactgcagtttttcgatatgcttcgtgatctgctcaagaacgttgatcttaaagggttcgagcctgatgtacgtattttgcttaccaaatacagcaatagtaatggctctcagtccccgtggatggaggagcaaattcgggatgcctggggaagcatggttctaaaaaatgttgtacgtgaaacggatgaagttggtaaagctgccccgatggtggattcgttaattgcgcgcgtaggagtaatggctcgcggtaatgccattactttgcctgtatgtggtcgggatgtgaagtttactcttgaagtgctccggggtgatagtgttgagaagacctctcgggaactgaaccggagccaagagatcggcgtgaagcccttgtcctgcggctcggcccagatctggcagcacggcaccagcctcatgaactacctgcgcatgggtaaggaaatgggccctacccggtgtgagaataaatctggacactcagcaatgtgggcagaaaggatcctcacatactgcagcaaccaggtaactctgtgcacagaccaagacagccactactgccccagatccttcccttactcacgttgttcctcctccttatga

SEQ ID NO: 139974 - DNA, 2262 bp, Homo sapiens
  misc_feature (1)...(2262): n = a,t,c or g
atgaaatctaacaatgcgctcatcgtcatcctcggcaccgtcaccctggatgctgtaggcataggcttggttatgccggtactgccgggcctcttgcgggatatcgtccattccgacagcatcgccagtcactatggcgtgctgctagcgctatatgcgttgatgcaatttctatgcgcacccgttctcggagcactgtccgaccgctttggccgccgcccagtcctgctcgcttcgctacttggagccactatcgactacgcgatcatggcgaccacacccgtcctgtggatctacccactaaacgtggactccaacgtcaaagggcgaaaaaccgtctatcagggcgatggcccactacgtgaaccatcacccaaatcaagttttttggggtcgaggtgccgtaaagcactaaatcggaaccctaaaggagcccccgatttagagcttgacggggaaagccggcgaacgttgcgagaaaggaagggaagaaagcgaaaggagcgggcgctagggcgctggcaagnccagcaacacagaaatccacagaaaggaaaacaatggagctacaagagtaccttcaagtttaaatctgagagtgatattcatttggcagaacatcataaacaggtgttatatgatgggaaacttgcaagtagcattgcctttacatataatgctaaggccactgatgctcagctctgcctggaatcatcaccaaaagagaatgcatcaatttttgtgcattccccacatgctctaatgcttcagatcttgacagaacaagtatgtactcaggtcgtacacaaaccacatccagagccagattctacagtgaaaattcagaatccaagtgagcaaatggcagttctttactgtattgtgctggttggtggagaatttgacttggagatgaactttattatccaggatgctgagagtataacatgtatgacagagcttttggagcactgtgatgtaacatgtcaagcagaaatatggagcatgtttacagccattctacgaaaaagtgttcggaatttacagactagcacagaagttgggctaattgaacaatgtgacaatctaaaaacttgtcacacttcacatggatctgtcatggcggaaacagcggttatcaatcacaagaaacgtaaaaatagcccgcgaatcgtccagtcaaacgacctcactgaggcggcatatagtctctcccgggatcaaaaacgtatgctgtatctgttcgttgaccagatcagaaaatctgatggcaccctacaggaacatgacggtatctgcgagatccatgttgctaaatatgctgaaatattcggattgacctctgcggaagccagtaaggatatacggcaggcattgaagagtttcgcggggaaggaagtggttttttatcgccctgaagaggatgccggcgatgaaaaaggctatgaatcttttccttggtttatcaaacgtgcgcacagtccatccagagggctttacagtgtacatatcaacccatatctcattcccttctttatcgggttacagaaccggtttacgcagtttcggcttagtgaaacaaaagaaatcaccaatccgtatgccatgcgtttatacgaatccctgtgtcagtatcgtaagccggatggctcaggcatcgtctctctgaaatcgactggatctagagcgttccagctgcctcaaagtaccagcttaatgggcaaatttgatgaaggtaaactgcccaccgatccacacctgatgctccgactggccattgaaactgttgctcatgactatgatgtcatagttattgacagcgcgcctaacctgggtatcggcacgattaatgtcgtatgtgctgctgatgtgctgattgttcccacgcctgctgagttgtttgactacacctccgcactgcagtttttcgatatgcttcgtgatctgctcaagaacgttgatcttaaagggttcgagcctgatgtacgtattttgcttaccaaatacagcaatagtaatggctctcagtccccgtggatggaggagcaaattcgggatgcctggggaagcatggttctaaaaaatgttgtacgtgaaacggatgaagttggtaaaggtcagatccggatgagaactgtttttgaacaggccattgatcaacgctcttcaactggtgcctggagaaatgctctttctatttgggaacctgtctgcaatgaaattttcgatcgtctgattaaaccacgctgggagattagataa

SEQ ID NO: 139975 - DNA, 2103 bp, Homo sapiens
atgctgtatctgttcgttgaccagatcagaaaatctgatggcaccctacaggaacatgacggtatctgcgagatccatgttgctaaatatgctgaaatattcggattgacctctgcggaagccagtaaggatatacggcaggcattgaagagtttcgcggggaaggaagtggttttttatcgccctgaagaggatgccggcgatgaaaaaggctatgaatcttttccttggtttatcaaacgtgcgcacagtccatccagagggctttacagtgtacatatcaacccatatctcattcccttctttatcgggttacagaaccggtttacgcagtttcggcttagtgaaacaaaagaaatcaccaatccgtatgccatgcgtttatacgaatccctgtgtcagtatcgtaagccggatggctcaggcatcgtctctctgaaaatcgactggatcatagagcgttaccagctgcctcaaagttaccagcgtatgcctgacttccgccgccgctttctggcagtctgtgttaatgagatcaacagcagaactccaatgcgcctctcatacattgagaaaaagaaggccggcagaccactcatatcgacccccataagcacaagttttatccggcctttattacattcttgcccgcctgatgaatgctcatccggagttccgtatggcaatgaaagacgtgaataccacgacgatttccggcagtttctacacatatattcgcaagatgtggcgtgttacggtgaaaacctggcctatttccctaaagggtttattgagaatatgtttttcgtctcagccaatccctgggtgagtttcaccagttttgatttaaacgtggccaatatggacaacttcttcgcccccgttttcaccatgggcaaatattatacgcaaggcgacaaggtgctgatgccgctggcgattcaggacgatgtcacttatgcaataaagcccacttgctggccggggcttgacattattccttcctgtctggctctgcaccgtattgaaactgagttaatgggcaaatttgatgaaggtaaactgcccaccgatccacacctgatgctccgactggccattgaaactgttgctcatgactatgatgtcatagttattgacagcgcgcctaacctgggtatcggcacgattaatgtcgtatgtgctgctgatgtgctgattgttcccacgcctgctgagttgtttgactacacctccgcactgcagtttttcgatatgcttcgtgatctgctcaagaacgttgatcttaaagggttcgagcctgatgtacgtattttgcttaccaaatacagcaatagtaatggctctcagtccccgtggatggaggagcaaattcgggatgcctggggaagcatggttctaaaaaatgttgtacgtgaaacggatgaagttggtaaaggtcagatccggatgagaactgtttttgaacagccattgatcaacgctcttcaactgatcagaaaatctgatggcaccctacaggaacatgacggtatctgcgagatccatgttgctaaatatgctgaaatattcggattgacctctgcggaagccagtaaggatatacggcaggcattgaagagtttcgcggggaaggaagtggttttttatcgccctgaagaggatgccggcgatgaaaaaggctatgaatcttttccttggtttatcaaacgtgcgcacagtccatccagagggctttacagtgtacatatcaacccatatctcattcccttctttatcgggttacagaaccggtttacgcagtttcggcttagtgaaacaaaagaaatcaccaatccgtatgccatgcgtttatacgaatccctgtgtcagtatcgtaagccggatggctcaggcatcgtctctctgaaaatcgactggatcatagagcgttaccagctgcctcaaagttaccagcgtatgcctgacttccgccgccgcttcctgcaggtctgtgttaatgagatcaacagcagaactccaatgcgcctctcatacattgagaaaaagaaggccgccagacgactcatatcgtattttccttccgcgatatcacttccatga

SEQ ID NO: 139976 - DNA, 8849 bp, Homo sapiens
tcaacaagatggtgaattgactagtgggtagatccacaggacgggtgtggtcgccatgatcgcgtagtcgatagtggctccaagtagcgaagcgagcaggactgggcggcggccaaagcggtcggacagtgctccgagaacgggtgcgcatagaaattgcatcaacgcatatagcgctagcagcacgccatagtgactggcgatgctgtcggaatggacgatatcccgcaagaggcccggcagtaccggcataaccaagcctatgcctacagcatccagggtgacggtgccgaggatgacgatgagcgcattgttagatttcatacacggtgcctgactgtccaggttaagcaccattttatcgcccttatacaatactgtcgctccaggagcaaactgatgtcgtgagcttaaactagttcttgatgcagatgacgttttaagcacagaagttaaaagagtgataacttcttcagcttcaaatatcaccccagcttttttctgctcatgaaggttagatgcctgctgcttaagtaattcctctttatctgtaaaggctttttgaagtgcatcacctgaccgggcagatagttcaccggggtgagaaaaaagagcaacaactgatttaggcaatttggcggtgttgatacagcgggtaataatcttacgtgaaatattttccgcatcagccagcgcagaaatatttccagcaaattcattctgcaatcggcttgcataacgctgaccacgttcataagcacttgttgggcgataatcgttacccaatctggataatgcagccatctgctcatcatccagctcgccaaccagaacacgataatcactttcggtaagtgcagcagctttacgacggcgactcccatcggcaatttctatgacaccagatactcttcgaccgaacgccggtgtctgttgaccagtcagtagaaaagaagggatgagatcatccagtgcgtcctcagtaagcagctcctggtcacgttcattacctgaccatacccgagaggtcttctcaacactatcaccccggagcacttcaagagtaaacttcacatcccgaccacatacaggcaaagtaatggcattaccgcgagccattactcctacgcgcgcaattaacgaatccaccatcggggcagctggtgtcgataacgaagtatcagttgaagagcgttgatcaatggcctgttcaaaaacagttctcatccggatctgacttttaccaacttcatccgtttcacgtacaacattttttagaaccatgcttccccaggcatcccgaatttgctcctccatccacggggactgagagccattactattgctgtatttggtaagcaaaatacgtacatcaggctcgaaccctttaagatcaacgttcttgagcagatcacgaagcatatcgaaaaactgcagtgcggaggtgtagtcaaacaactcagcaggcgtgggaacaatcagcacatcagcagcacatacgacattaatcgtgccgatacccaggttaggcgcgctgtcaataactatgacatcatagtcatgagcaacagtttcaatggccagtcggagcatcaggtgtggatcggtgggcagtttaccttcatcaaatttgcccattaactcagtttcaatacggtgcagagccagacaggaaggaataatgtcaagccccggccagcaagtgggctttattgcataagtgacatcgtccttttccccaagatagaaaggcaggagagtgtcttctgcatgaatatgaagatctggtacccatccgtgatacattgaggctgttccctgggggtcgttaccttccacgagcaaaacacgtagccccttcagagccagatccaacaatgcgagtgggaccatggtcccagtgttataatcagactggcgataagagtgggtctgtggtcccagtctgaagatcagaccgacgaggcgagtgggaccgtggtcgcagtctgaggaggaggtgggtagaccagatgcccggaagaagcccttccaccagctgtactgtacattggtttctccagacaggaggagtttttgtgcaattgtcaaatgccaggaattgtaagataaatatttatagagaggggatctcctagagtagaactgcgaggtcagcaacgccacggccgttctgtccgtcacttcccagatccgcgctttctctgtccttcctgtgcgacggttacgccgctccatgagcttatcgcgaataaatacctgcaaggaagtgtggaagtcataagaggctgagtcgctgaccttccccttgaagtccagacttgctcttcgaccgaacgccggtgtctgttgaccagtcagtagaaaagaagggatgagatcatccagtgcgtcctcagtaagcagctcctggtcacgttcattacctgaccatacccgagaggtcttctcaacactatcaccccggagcacttcaagagtaaacttcacatcccgaccacatacaggcaaagtaatggcattaccgcgagccattactcctacgcgcgcaattaacgaatccaccatcggggcagctggtgtcgataacgaagtatctttaccaacttcatccgtttcacgtacaacattttttagaaccatgcttccccaggcatcccgaatttgctcctccatccacggggactgagagccattactattgctgtatttggtaagcaaaatacgtacatcaggctcgaaccctttaagatcaacgttcttgagcagatcacgaagcatatcgaaaaactgcagtgcggaggtgtagtcaaacaactcagcaggcgtgggaacaatcagcacatcagcagcacatacgacattaatcgtgccgatacccaggttaggcgcgctgtcaataactatgacatcatagtcatgagcaacagtttcaatggccagtcggagcatcaggtgtggatcggtgggcagtttaccttcatcaaatttgcccattaactcagtttcaatacggtgcagagccagacaggaaggaataatgtcaagccccggccagcaagtgggctttattgcataagtgacatcgtccttttccccaagatagaaaggcaggagagtgtcttctgcatgaatatgaagatctggtacccatccgtgatacattgaggctgttccctgggggtcgttaccttccacgagcaaaacacgtagccccttcagagccagatcctgagcaagatgaacagaaactgaggttttgtaaacgccacctttatgggcagcaaccccgatcaccggtggaaatacgtcttcagcacgtcgcaatcgcgtaccaaacacatcacgcatatgattaatttgttcaattgtataaccaacacgttgctcaacccgtcctcgaatttccatatccgggtgcggtagtcgccctgctttctcggcatctctgatagcgatatgagtcgtctggcggcctttctttttctcaatgtatgagaggcgcattggagttctgctgttgatctcattaacacagacctgcaggaagcggcggcggaagtcaggcatacgctggtaactttgaggcagctggtaacgctctatgatccagtcgattttcagagagacgatgcctgagccatccggcttacgatactgacacagggattcgtataaacgcatggcatacggattggtgatttcttttgtttcactaagccgaaactgcgtaaaccggttctgtaacccgataaagaagggaatgagatatgggttgatatgtacactgtaaagccctctggatggactgtgcgcacgtttgataaaccaaggaaaagattcatagcctttttcatcgccggcatcctcttcagggcgataaaaaaccacttccttccccgagaaactcttcaatgcatgctgtatatccatactggcttccgcagaggtcaatccgaatatttcagcatatttagcaacatggatctcgcagataccgtcatgttcctgtagggtgccatcagattttctgatctggtcaacgaacagatacagcatacgtttttgatcccgggagagactatatgccgcctcagtgaggtcgtttgactggacgattcgcgggctatttttacgtttcatgtgattgataaccgctgtttccgccatgacagatccatgtgaagtgtgacaagtttttagattgtcacactgcaggaagcggcggcggaagtcaggcatacgctggtaactttgaggcagctggtaacgctctatgatccagtcgattttcagagagacgatgcctgagccatccggcttacgatactgacacagggattcgtataaacgcatggcatacggattggtgatttcttttgtttcactaagccgaaagaattcgagctcggtacccatccggatctgacctttaccaacttcatccgtttcacgtacaacattttttagaaccatgcttccccaggcatcccgaatttgctcctccatccacggggactgagagccattactattgctgtatttggtaagcaaaatacgtacatcaggctcgaaccctttaagatcaacgttcttgagcagatcacgaagcatatcgaaaaactgaatcgccagcggcatcagcaccttgtcgccttgcgtataatatttgcccatggtgaaaacgggggcgaagaagttgtccatattggccacgtttaaatcaaaactggtgaaactcacccagggattggctgagacgaaaaacatattctcaataaaccctttagggaaataggccaggttttcaccgtaacacgccacatcttgcgaatatatgtgtagaaactgccggaaatcgtcgtggtattcactccagagcgatgaaaacgtttcagtttgctcatggaaaacggtgtaacaagggtgaacactatcccatatcaccagctcaccgtctttcattgccatacggaactccggatgagcattcatcaggcgggcaagaatgtgaataaaggccggataaaacttgtgcttattttctttacggtaccattctggataatgcagccattggctcatcatccagctcgccaaccagacccgataatcacttccgtaagtgcagcagtttacgacggcgactcccatcggcatttttatgacaccagatatcttcgaccgaaccccggtgtctttaccaacttcatccgtttcacgtacaacattttttagaaccatgcttccccaggcatcccgaatttgctcctccatccacggggactgagagccattactattgctgtatttggtaagcaaaatacgtacatcaggctcgaaccctttaagatcaacgttcttgagcagatcacgaagcatatcgaaaaactgaatcgccagcggcatcagcaccttgtcgccttgcgtataatatttgcccatggtgaaaacgggggcgaagaagttgtccatattggccacgtttaaatcaaaactggtgaaactcacccagggattggctgagacgaaaaacatattctcaataaacccgtctttcattgccatacggaactccggatgagcattcatcaggcgggcaagaatgtgaataaaggccggataaaacttgtgcttatttttctttacggtctttaaaaaggccgtaatatccagctgaacggtcccagcttttttctgctcatgaaggttagatgcctgctgcttaagtaattcctctttatctgtaaaggctttttgaagtgcatcacctgaccgggcagatagttcaccggggtgagaaaaaagagcaacaactgatttaggcaatttggcggtgttgatacagcgggtaataatcttacgtgaaatattttccgcatcagccagcgcagaaatatttccagcaaattcattctgcaatcggcttgcataacgctgaccacgttcataagcacttgttgggcgataatcgttacccaatctggataatgcagccatctgctcatcatccagctcgccaaccagaacacgataatcactttcggtaagtgcagcagctttacgacggcgactcccatcggcaatttctatgacaccagatactcttcgaccgaacgccggtgtctgttgaccagtcagtagaaaagaagggatgagatcatccagtgcgtcctcagtaagcagctcctggtcacgttcattacctgaccatacccgagaggtcttctcaacactatcaccccggagcacttcaagagtaaacttcacatcccgaccacatacaggcaaagtaatggcattaccgcgagccattactcctggattggggaggcggttgccgccgctgctgctgacggtgtgacgttctctgttccggtcacaccacatacgttccgccattcctatgcgatgcacatgctgtatgccggtataccgctgaaagttctgcaaagccagtgagacgggcaacagctgtttgcccttcaccgcctggccctgagagagttgcagcaagcggtccacgctggtttgccccagcaggcgaaaatcctgtttgatggttggtccgaaatcggcaaaatccctgtccaggttaagcaccattttatcgcccttatacaatactgtcgctccaggagcaaactgatgtcgtgagcttaaactagttcttgatgcagatgacgttttaagcacagaagttaaaagagtgataacttcttcagcttcaaatatcaccccagcttttttctgctcatgaaggttagatgcctgctgcttaagtaattcctctttatctgtaaaggctttttgaagtgcatcacctgaccgggcagatagttcaccggggtgagaaaaaagagcaacaactgatttaggcaatttggcggtgttgatacagcgggtaataatcttacgtgaaatattttccgcatcagccagcgcagaaatatttccagcaaattcattctgcaatcggcttgcataacgctgaccacgttcataagcacttgttgggcgataatcgttacccaatctggataatgcagccatctgctcatcatccagctcgccaaccagaacacgataatcacccccggtaagtgcagcagctccctgttttggtacagcttccacttgcagcactgctcacagatgccgattcgctcacattggaaaggtcctattccaactccaagatccttcttttctgaaaagcctgccctgcttctctttggccagcctgttttgactggcggctggggctcccctaaactgacgtaaaggctgaaaaccggcccgcgtgaatagtgaacagtccatttgccgttcattttgaaaacattcgcgcgctcgatttcatcagttaccgtgtttgaagtgatcagcggcttcattacttttttcaatgtgtaatcattatttaactctatgataccgagggcgccgttcgctaactcagcatcgcgttttttagcgctctgctgaagcttctggctttctttacggaagaagttcgtgccgccgccgtagtacgctttgttaaataaagattcttcgccttggtatccgttttctgttcccgtgttggcttcgaataccaggtatttatggcctttgtcttcaacgtagtgagggtctctcagcgtctggttgtcgccggatgtctgattgccttcgtcggtggactgctgagcgttgtgatgtgttgttccgcgtccgtcgagaggctgtttgcggatcttgcgcttcgttgattttgcgggggtgatgtgttcgctggccgctttagcgggcctggggttttgggctaagggatgaaaacggtcttctgtggaggatccacgacgagaatcgcttgaatcgggtgtggtcgccatgatcgcgtagtcgatagtggctccaagtagcgaagcgagcaggactgggcggcggccaaagcggtcggacagtgctccgagaacgggtgcgcatagaaattgcatcaacgcatatagcgctagcagcacgccatagtgactggcgatgctgtcggaatggacgatatcccgcaagaggcccggcagtaccggcataaccaagcctatgcctacagcatccagggtgacggtgccgaggatgacgatgagcgcattgttagatttcatacacggtgcctgacgtcgacagcgacacacttgcatcggatgcagcccggttaacgtgccggcacggcctgggtaaccaggtattttgtccacataaccgtgcgcaaaatgttgtggataagcaggacacagcagcaatccacagcaggcatacaaccgcacaccgaagttacttcgttttccgctcactggctttgctctcactcggccgctttgctgttcctgataccttgcgtggctattattgttatatggcccctccgtcaatccttgggtgcgccgtcgcatgcttttatcgggtcggccgtgggcggtgacgttattctgctcgtataccaccgactgctggtccggtgcccagtacgttgtgttggctccacttagccgctgttttggccagaaggtctgctttggtatccaagtcatgagaatgaacggttgagcaatggaaagccctaaatgctgtctgtatttgggaataatgatttgtatttcattcctgggtgttgtaatttcaccggtgctggtcagtgcatacggggtaaaacagggggctcccatttccccaggcctataaggcctgtcaggggagtgcttcgaggtgagtgttacagctcttaaggcggctcgtctggagttgttcgttcctcccggtgggctcctggtcccgctgacttcaggagtggagccgcagatcttcat

SEQ ID NO: 139977 - DNA, 16091 bp, Homo sapiens
atgcccacaaattcttgggcatttcggcagtccttctccatccaccggaaggttcctgaagatggagagactcgggaggaaacgcttctgcaggagtcagcatcgaaggaggcttactatctggggaagatcttggagatgcagaacgagctgaaacagagccgggctgtggtcagtaatgtacaggcagcttacgagaggctcaccgcagtcgtgcaggatctgaaggaggcccacaatttctggacttttttacgaattgcaacttctggcaaggaagaagcgaactcaagcctttcgcgaaaagaaaataaccaaaaagcatacaaagaaacgtacggcgtctctcatattacacgccatgatatgctgcagatccctaaacagcagcaaaacgaaaaataccaagtgcctcaattcgatcaatcaacgattaaaaatattgagtctgcaaaaggacttgatgtgtgggacagctggccgctgcaaaacgctgacggaacagtagctgaatacaacggctatcacgttgtgtttgctcttgcgggaagcccgaaagacgctgatgacacatcaatctacatgttttatcaaaaggtcggcgacaactcaatcgacagctggaaaaacgcgggccgtgtctttaaagacagcgataagttcgacgccaacgatccgatcctgaaagatcagacgcaagaatggtccggttctgcaacctttacatctgacggaaaaatccgtttattctacactgactattccggtaaacattacggcaaacaaagcctgacaacagcgcaggtaaatgtgtcaaaatctgatgacacactcaaaatcaacggagtggaagatcacaaaacgatttttgacggagacggaaaaacatatcagaacgttcagcagtttatcgatgaaggcaattatacatccggcgacaaccatacgctgagagaccctcactacgttgaagacaaaggccataaataccttgtattcgaagccaacacgggaacagaaaacggataccaaggcgaagaaactttggctatcagagatgccgagaaagcagggcgactaccgcacccggatatggaaattcgaggacgggttgagcaacgtgttggttatacaattgaacaaattaatcatatgcgtgatgtgtttggtacgcgattgcgacgtgctgaagacgtatttccaccggtgatcggggttgctgcccataaaggtggcgtttacaaaacctcagtttctgttcatcttgctcaggatctggctctgaaggggctacgtgttttgctcgtggaaggtaacgacccccagggaacagcctcaatgtatcacggatgggtaccagatcttcatattcatgcagaagacactctcctgcctttctatcttggggaaaaggacgatgtcacttatgcaataaagcccacttgctggccggggcttgacattattccttcctgtctggctctgcaccgtattgaaactgagttaatgggcaaatttgatgaaggtaaactgcccaccgatccacacctgatgctccgactggccattgaaactgttgctcatgactatgatgtcatagttattgacagcgcgcctaacctgggtatcggcacgattaatgtcgtatgtgctgctgatgtgctgattgttcccacgcctgctgagttgtttgactacacctccgcactgcagtttttcgatatgcttcgtgatctgctcaagaacgttgatcttaaagggttcgagcctgatgctgaaacaagccagggagctctgggcacactggcaaatgtagtgacctcccttgccaacctaagtgaatctttgaacaacggtgacacttcagaaatccagccagaggaccagtctgcaagtgagataactcgggcatttgataccttagctaaagcacttaataccacagacagctcctcttctccaagcttggcagatgggatagacaccagtggaggagggagcatccacgtcatcagcagagaccagtcgacacccatcattgaggttgaaggccccctcctttcagacacacacgtcacatttaagtcaattcggaaggatcggaaccggcagatcgcaaaaaaccagtacatacagaggaagccatgaacatgaccatcaaaaaaattgtaaaacaagccacagttctgactttaacgactgcacttctggcagaaggagcgactcaagctttcgcgaaagaaaataaccaaaaagcatacaaagaaacgtacggcgtctctcatattacacgccatgatatgctgcagatccctaaacagcagcaaaacgaaaaataccaagtgcctcaattcgatcaatcaacgattaaaaatattgagtctgcaaaaggacttgatgtgtgggacagctggccgctgcaaaacgctgacggaacagtagctgaatacaacggctatcacgttgtgtttgctcttgcgggaagcccgaaagacgctgatgacacatcaatctacatgttttatcaaaaggtcggcgacaactcaatcgacagctggaaaaacgcgggccgtgtctttaaagacagcgataagttcgacgccaacgatccgatcctgaaagatcagacgcaagaatggtccggttctgcaacctttacatctgacggaaaaatccgtttattctacactgactattccggtaaacattacggcaaacaaagcctgacaacagcgcaggtaaatgtgtcaaaatctgatgacacactcaaaaatcaacggagtggaggatcacaaaccgatcttggacggaggcggaaaaacatatcagaacgttcagcagtttatcgagaaaggcaattatacatccggcgacaaccatacgctgagagaccctcactacgttgaagacaaaggccataaatacctggtattcgaagccaacacgggaacagaaaacggataccaaggcgaagaatctttatttaacaaagcgtactacggcggcggcacgaaccttcttccgtaaagaaagccagaagcttcagcagagcgctaaaaaacgcgatgctgagttagcgaacggcgccctcggtatcatagagttaaataatgattacacattgaaaaaagtaatgaagccgctgatcacttcaaacacggtaactgatgaaatcgagcgcgcgaatgttttcaaaatgaacggcaaatggtacttgttcactgattcacgcggttcaaaaatgacgatcgatggtattaactcaaacgatatttacatgcttggttatgtatcaaactctttaaccggcccttacaagccgctgaacaaaacagggcttgtgctgcaaatgggtcttgatccaaccgatgtgacattcacttactctcacttcgcagtgccgcaagccaaaggggggtcctttagagtccccaaacagggatttagtctgacgtgttttctttttaatatgctgtttcgtacccgttgtcttctaaccaacataggagagacctccattcagattccgattcacacggcaacgcttttgtccaggaccccatgcttggttgtcaggaggcttacttctgaacagatggcagattctgcgtcccaagggcgcttccccccattcggcaaatataaggctggaaaccccatgcgcgtttgttccatcaaaaattggccaccagatgccatagcgcatccccattattttctcatatttgaaatacgcaatagtaaggttctcagtcccgtgggaggaggagcaaattcggaaggccgggacaagcatggttctaaaaattgttgtcgtgaaacggatgaagttgatacttcgttatcgacaccagctgccccgatggtggattcgttaattgcgcgcgtaggagtaatggctcgcggtaatgccattactttgcctgtatgtggtcgggatgtgaagtttactcttgaagtgctccggggtgatagtgttgagaagacctctcgggtatggtcaggtaatgaacgtgaccaggagctgcttactgaggacgcactggatgatctcatcccttcttttctactgactggtcaacagacaccggcgttcggtcgaagagtatctggtgtcatagaaattgccgatgggagtcgccgtcgtaaagctgctgcacttaccgaaagtgattatcgtgttctggttggcgagctggatgatgagcagatggctgcattatccagattgggtaacgattatcgcccaacaagtgcttatgaacgtggtcagcgttatgcaagccgattgcagaatgaatttgctggaaatattctgcgctggctgatgcggaaaatatttcacagctcgtgcagcacgggcctgcgtcagaattatccacgccctctccttgtccacctaccgggcggcggcctggtgcagcccacaggcccagctgcggactccttgcgcgcgttagttgctacacatacggaacactcgcgcccatcgttccgcggcgggggaacggggtgtgacaatctaaaaacttgtcacacttcacatggatctgtcatggcggaaacagcggttatcaatcacaagaaacgtaaaaatagcccgcgaatcgtccagtcaaacgacctcactgaggcggcatatagtctctcccgggatcaaaaacgtatgctgtatctgttcgttgaccagatcagaaaatctgatggcaccctacaggaacatgacggtatctgcgagatccatgttgctaaatatgctgaaatattcggattgacctctgcggaagccagtaaggatatacggcaggcattgaagagtttcgcggggaaggaagtggttttttatcgccctgaagaggatgccggcgatgaaaaaggctatgaatcttttccttggtttatcaaacgtgcgcacagtccatccagagggctttacagtgtacatatcaacccatatctcattcccttctttatcgggttacagaaccggtttacgcagtttcggcttagtgaaacaaaagaaatcaccaatccgtatgccatgcgtttatacgaatccctgtgtcagtatcgtaagccggatggctcaggcatcgtctctctgaaaatcgactggatcatagagcgttaccagctgcctcaaagttaccagcgtatgcctgacttccgccgccgcttcctgcaggtctgtgttaatgagatcaacagcagaactccaatgcgcctctcatacattgagaaaaagaaaggccgccagacgactcatatcgatctggctctgaaggggctacgtgttttgctcgtggaaggtaacgacccccagggaacagcctcaatgtatcacggatgggtaccagatcttcatattcatgcagaagacactctcctgcctttctatcttggggaaaaggacgatgtcacttatgcaataaagcccacttgctggccggggcttgacattattccttcctgtctggctctgcaccgtattgaaactgagttaatgggcaaatttgatgaaggtaaactgcccaccgatccacacctgatgctccgactggccattgaaactgttgctcatgactatgatgtcatagttattgacagcgcgcctaacctgggtatcggcacgattaatgtcgtatgtgctgctgatgtgctgattgttcccacgcctgctgagttgtttgactacacctccgcactgcagtttttcgatatgcttcgtgatctgctcaagaacgttgatcttaaagggttcgagcctgatgtacgtattttgcttaccaaatacagcaatagtaatggctctcagtccccgtggatggaggagcaaattcgggatgcctggggaagcatggttctaaaaaatgttgtacgtgaaacggatgaagttggtaaagctgccccgatggtggattcgttaattgcgcgcgtaggagtaatggctcgcggtaatgccattactttgcctgtatgtggtcgggatgtgaagtttactcttgaagtgctccggggtgatagtgttgagaagacctctcgggtatggtcaggtaatgaacgtgaccaggagctgcttactgaggacgcactggatgatctcatcccttcttttctactgactggtcaacagacaccggcgttcggtcgaagagtatctggtgtcatagaaattgccgatgggagtcgccgtcgtaaagctgctgcacttaccgaaagtgattatcgtgttctggttggcgagctggatgatgagcagatggctgcattatccagattgggtaacgattatcgcccaacaagtgcttatgaacgtggtcagcgttatgcaagccgattgcagaatgaatttgctggaaatatttctgcgctggctgatgcggaaaatatttcacgtaagattattacccgctgtatcaacaccgccaaattgcctaaatcagttgttgctcttttttctcaccccggtgaactatctgcccggtcaggtgatgcacttcaaaaagcctttaggggatcctctagagtcgacctgcaggcatgcaagctgtcaccgtcgcaaaagacatcttgcatggttgcccggagtaggctccttttctccgttactgccggacctcttacgggatatcgtccaccctgtacagcatctccagttactatggcgcggctcgtgagcgctatatgcgttgggtcaaatttaatgggcacccgtccatcggagcacctctcgggaacagctgtcgccgcgcgccccgtcagcctgacaacagcgcagggaaatgtgtcaaaatctgatgacacactcaatatcaacggagtggaagatcacaaaacgatttttgacggagacggaaaaacatatcagaacgttcagcagtttaccgatgaaggcaattatacatccggcgacaaccatacgctgagagaccctcactacgttgaagacaaaggccataaataccttgtattcgaatccaacacgggaacagaaaacggataccaaggcgaagaatctttatttaacaaagcgtactacggcgtcggcacgaacttcttccgtaaagaaagccagaagattcatcagagcgctaaaaaacgcgatgctgatttagcgaacggcgccctcggtgatcatgagagtttaataatgattccacgattgaaacactgtaaagtcggcgacaactcaatcgacagctggaaaaacgcgggccgtgtctttaaagacagcgataagttcgacgccaacgatccgatcctgaaagatcagacgcaagaatggtccggttctgcaacctttacatctgacggaaaaatccgtttattctacactgactattccggtaaacattacggcaaacaaagcctgacaacagcgcaggtaaatgtgtcaaaatctgatgacacactcaaaatcaacggagtggaagatcacaaaacgatttttgacggagacggaaaaacatatcagaacgttcagcagtttatcgatgaaggcaattatacatccggcgacaaccatacgctgagagaccctcactacgttgaagacaaaggccataaataccttgtattcgaagccaacacgggaacagaaaacggataccaaggcgaagaatctttatttaacaaagcgtactacggcggcggcacgaacttcttccgtaaagaaagccagaagcttcagcagagcgctaaaaaacgcgatgctgagttagcgaacggggatcctctagagtcgacctgcaggcatgcagtggactcttgttccaaactggaacaacactcaaccctatctcgggctattcttttgatttataagggattttgccgatttcggaaccaccatcaaacaggattttcgcctgctggggcaaaccagcgtggaccgcttgctgcaactctctcagggccaggcggtgaagggcaatcagctgttgcccgtctcactggtgaaaagaaaaaccaccctggcgcccaatacgcaaaccgcctctccccgcgcgttggccgattcattaatgcagctggcacgacaggtttcccgactggaaagcgggcaatgattgcaataaacagggatcctctagagtcgacctgcaggcatgcaagcatgttaacgaggaaaagcacgttaatacgtgctcgtcaaaagcaacccataggtaacgcccctgtagcacgggacattaaagcgacggccggggattttgccgatttcggaaccaccatcaaacaggattttcgcctgctggggcaaaccagcgtggaccgcttgctgcaactctctcagggccaggcgcccctgaacagcaagcagcctgacttaagctggttgcatcatgatggatcaaatgatgagattttaagaggggatcctctagagtcgaccttaaaaaccacgcagggacccccccccgtgttgaagaaaaacgatttccccgggcccaagggactcaagaagtttgtgggcccaaagcaccctttccggaaaaatccaagggagctccccggccccaaaatattgtgtttatgtgcccccatctcacggcctataattgggcccatccctaaacagcagcaaaacgaaaaataccaagtgcctcaattcgatcaatcaacgattaaaaatattgagtctgcaaaaggacttgatgtgtgggacagctggccgctgcaaaacgctgacggaacagtagctgaatacaacggctatcacgttgtgtttgctcttgcgggaagcccgaaagacgctgatgacacatcaatctacatgttttatcaaaaggtcggcgacaactcaatcgacagctggaaaaacgcgggccgtgtctttaaagacagcgataagttcgacgccaacgatccgatcctgaaagatcagacgcaagaatggtccggttctgcaacctttacatctgacggaaaaatccgtttattctacactgactattccggtaaacattacggcaaacaaagcctgacaacagcgcagacaaaggccataaataccttgtattcgaagccaacacgggaacagaaaacggataccaaggcgaagaatctttatttaacaaagcgtactacggcggcggcacgaacttcttccgtaaagaaagccagaagcttcagcagagcgggggatcctctagagtcgacctgcaggcatgcaagattttcatgccttggaaaatcaaacaagcaggagggattttgccgatttcggaaccaccatcaaacaggattttcgcctgctggggcaaaccagcgtggaccgcttgctgcaactctctcagggccaggcggtgaagggcaatcagctgttgcccgtctcactggtgaaaagaaaaaccaccctggcgcccaatacgcaaaccgcctctccccgcgcgttggccgattcattaaaggcagctggcccgaccaggtttccccgactggaaagcgggccagtgagcgcaacgcaaataatttcttgtcatttgaaatgctgacggagctggtccacagaggcagcgtgtatgacgccccggaattctcagtgcactttgtatgtggtggcctggctgcctgtatggccaccctcactgtgcaccccgtggatgttctgcgcacccgctttgcagctcagggtgagcccaagtcccactgtggtgaagctgtgatcttatcacatggctgcaggaaggggccagtctctccttggcagttcatcccgtacaccaagcccaaaggcctgagcttttccccaggcgcctttgtcatgagtcagtggttttttggcaaaatccccagagccaaggcagaagaaatgcttagcaaacagcggcacgatggggcctttcttatccgagagagtgagagcgctcctggggacttctccctctctgtcaataagtatttcctgctgcagttgcctggaatcctgtctctgactgatccaaattgtgaagccgttggtcagaagcagagcactggccccttccagcccaccatgccacaacccttagggcagaaggacccaacccagtacgggtctgtggcctgtaagaagctgggccccacagcagaagatgatggcgggcgagcaagcattaccgcctcctgtcagatcagcggcggcactagattctcacaggagcacgaaccctacgtgaactgcgtacgcgagggatctaggttccacgctccttatgagaatctaatacctgatgatctgagatgtcagaaccaaaacacaaagccatcccgtaaattgcccaagatcgcaatgcccgatctgtctgtgacagagctaggattccaagcaggcaggtctcgcctagagccagtattctttacaatacttcagatgtctctcattccacatccagaaggagctccgtcagcatttcaaatgacaagaactgcaagagtaagtgaagaagtcaccgacagcccaaaggatgagggtgaggaccaaatactccccaaatacatcacccgtgacccggctggggcccagcaacccaagtcctacgttgaagacaaaggccataaataccttgtattcgaagccaacacgggaacagaaaacggataccaaggcgaaaaatctttatttaacaaagcgtactacggcggcggcacgaacttcttccgtaaagaaagccagaagcttcagcagagcgctaaaaaacgcgatgctgagttagcgaacggcgccctcggtatcatagagttaaataatgattacacattgaaaaaagtaatgaagccgctgatcacttcaaacacggtaactgatgaaatcgagcgcgcgaatgttttcaaaatgaacggcaaatggtacttgttcactgattcacgcggttcaaaaatgacgatcgatggtattaactcaaacgatatttacatgcttggttatgtatcaaactctttaaccggcccttacaagccgctgaacaaaacagggcttgtgctgcaaatgggtcttgatccaaacgatgtgacattcacttactctcacttcgcagtgccgcaagccaaaggcaacaatgtggttatcacaagctacatgacaaacagaggcttcttcgaggataaaaaggcaacatttgcgccaagcttcttaatgaacatcaaaggcaataaaacatccgttgtcaaaaacagcatcctggagcaaggacagctgacagtcgggggccaaccccttcgcccagtgaaaaaccgcggcccgttcttttaaagacagcgataagttcgacgcccaacgatccgatcctgaaagatcagacgcaagaatggtccggttctgcaacctttacctctgagggaaaaatccgtttattctacactgactattccggtaaacattccggcaaacaaagcttgacaacagcgcaggtaaatgtgtcaaaatctgatgacacactcaaaatcaacggagtggaagatcacaaaacgatttttgacggagacggaaaaacatatcagaacgttcagcagtttatcgatgaaggcaattatacatccggcgacaaccatacgctgagagaccctcactacgttgaagacaaaggccataaataccttgtattcgaagccaacacgggaacagaaaacggataccaaggcgaagaatctttatttaacaaagcgtactacggcggcggcacgaacttcttccgtaaagaaagccagaagcttcagcagagcgctaaaaaacgcgatgctgagttagcgaacggcgccctcggtatcatagagttaaataatgattacacattgaaaaaagtaatgaagccgctgatcacttcaaacacggtaactgatgaaatcgagcgcgcgaatgttttcaaaatgaacggcaaatgcagtggcagtgtggacgtgtgtggactgtggcaaggtgctagccagcgccggggtgccagcctccatgcaggcatttgcagcagctgggtggcagcatggctggaggagggcagggggtccctgcaaggaatagaattgggcactcatgggggcagtctgctgttctccatgcttagttttgggcaggcagcagtgtcggcggcaggggctggtggtctcattgctgccagtgctcctatgacagtggtggtttactctagaggatccccgatcctgaaagatcagacgcaagaatggtccggttctgcaacctttacatctgacggaaaaatccgtttattctacactgactattccggtaaacattacggcaaacaaagcctgacaacagcgcaggtaaatgtgtcaaaatctgatgacacactcaaaatcaacggagtggaagatcacaaaacgatttttgacggagacggaaaaacatatcagaacgttcagcagtttatcgatgaaggcaattatacatccggcgacaaccatacgctgagagaccctcactacgttgaagacaaaggccataaataccttgtattcgaagccaacacgggaacagaaaacggataccaaggcgaagaatctttatttaacaaagcgtactacggcggcggcacgaacttcttccgtaaagaaagccagaagcttcagcagagcgctaaaaaacgcgatgctgagttagcgaacggcgccctcggtatcatagagttaaataatgattacacattgaaaaaagtaatgaagccgctgatcacttcaaacacggtaactgatgaaatcgagcgcgcgaatgttttcaaaatgaacggcaaatggtacttgttcactgattcacgcggttcaaaaatgacgatcgatgggtgtggtgtggacggtgtgtcccaggaacagggtgtggtgtggacggtgtgtcccacgaacagggtgtggtgtggacggtgtgtcccacgaacagggtgtggtgtggacggtgtgtcccacgaacaggaaagtggcagctttaccaagccgatgcagaaaaatttgctgcaaaattttgcgctgggcgatcgaaaaatatttcacgtaagattattacccgctgaatcaacaccgccaaattgcttaaatcagttgttgctctttatcgtcaccccggtgaactatctgcccggtcaggctttgcagaactttcagcggtataccggcatacagcatgtgcatcgcataggaatggcggaacgtatgtggtgtgaccggaacagagaacgtcacaccgtcagcagcagcggcggcaaccgcctccccaatccaggtcctgaccgttctattcatcatggaaggctgcagtacaagtttgactgtggaagtggccctggaattgtctctgttcagagcattcaggtcaatgatgggcagtggcacgcagtggccctggaagtgaatggaaactatgctcgcttggttctagaccaagttcatactgcatcgggcacagccccagggactctgaaaaccctgaacctggataactatgtgtttttggtggccacatccgtcagcagggaacaaggcatggaagaagtcctcaagttgaacgttcagcagtttatcgatgaaggcaattatacatccggcgacaaccatacgctgagagaccctcactacgttgaagacaaaggccataaataccttgtattcgaagccaacacgggaacagaaaacggataccaaggcgaagaatctttatttaacaaagcgtactacggcggcggcacgaacttcttccgtaaagaaagccagaagcttcagcagagcgctaaaaaacgcgatgctgagttagcgaacggcgccctcggtatcatagagttaaataatgattacacattgaaaaaagtaatgaagccgctgatcacttcaaacacggtaactgatgaaatcgagcgcgcgaatgttttcaaaatgaacggcaaatggtacttgttcactgattcacgcggttcaaaaatgacgatcgatggtattaactcaaacgatatttacatgcttggttatgtatcaaactctttaaccggcccttacaagccgctgaacaaaacagggcttgtgctgcaaatgggtcttgatccaaacgatgtgacattcacttactctcacttcgcagtgccgcaagccaaaggcaacaatgtgatccctaaacagcagcaaaacgaaaaataccgagtgcctcaattcgatcaatcaacgattaaaaatattgagtctgcaaaaggacttgatgtgtgggacagctggccgctgcaaaacgctgacggaacagtagctgaatacaacggctatcacgttgtgtttgctcttgcgggaagcccgaaagacgctgatgacacatcaatctacatgttttatcaaaaggtcggcgacaactcaatcgacagctggaaaaacgcgggccgtgtctttaaagacagcgataagttcgacgccaacgatccgatcctgaaagatcagacgcaagaatggtccggttctgcaacctttacatctgacggaaaaatccgtttattctacactgactattccggtaaacattacggcaaacaaagcctgacaacagcgcaggtaaatgtgtcaaaatctgatgacacactcaaaatcaacggagtggaagatcacaaaacgatttttgacggagacggaaaaacatatcagaacgttcagcagtttatcgatgaaggcaattatacatccggcgacaaccatacgctgagagaccctcactacgttgaagacaaaggccataaataccttgtattacgaagccacagcacgggaaacagagaaacggataccaaggcgaagaatctttatttaacaaagcgtactacggcggcggcacgaacttcttccgtaaagaaagccagaagcttcagcagagcgctaaaaaacgcgatgctgagttagcgaacggcgccctcggtatcatagagttaaataatgattacacattgaaaaaagtaatgaagccgctgatcacttcaaacacggtaactgatgaaatcgagcgcgcgaatgttttcaaaatgaacggcaaatggtacttgttcactgattcacgcggttcaaaaatgacgatcgatggtattaactcaaacgatatttacatgcttggttctgatgaatcccctaatgattttggtaatcgtcacctccacaaagagcgactcgctgtataccgttggcatgctagctttatctgttcgggcaatacgatgcccattgtacttgttgactggtctgatattcgtgagcaaaaacgacttatggtattgcgagcttcagtcgcactacacggtcgttctgttactctttatgagaaagcgttcccgctttcagagcaatgttcaaagaaagctcatgaccaatttctagccgaccttgcgagcattctaccgagtaacaccacaccgctcattgtcagtgatgctggctttaaagtgccatggtataaatccgttgagaagctgggttggtactggttaagtcgagtaagaggaaaagtacaatatgcagacctaggagcggaaaactggaaacctatcagcaacttacatgatatgtcatctagtcactcaaagactttaggctataagaggctgactaaaagcaatccaatctcatgccaaattctattgtataaatctcgctctaaaggccgaaaaaatcagcgctcgacacggactcattgtcaccacccgtcacctaaaatctactcagcgtcggcaaaggagccatgggttctagcaactaacttacctgttgaaattcgaacacccaaacaacttgttaatatctattcgaagcgaatgcagattgaagaaaccttccgagacttgaaaagtcctgcctacggactaggcctacgccatagccgaacgagcagctcagagcgttttgatatcatgctgctaatcgccctgatgcttcaactaacatgttggcttgcgggcgttcatgctcagaaacaagtgccgcaagccaaaggcaacaatgtggttatcacaagctacatgacaaacagaggcttcttcgaggataaaaaggcaacatttgcgccaagcttcttaatgaacatcaaaggcaataaaacatccgttgtcaaaaacagcatcctggagcaaggacagctgacagtcaactaa

SEQ ID NO: 139978 - DNA, 390 bp, Homo sapiens
ttatgccgcgtcaattcgctgcgtatatcgcttgctgattacgtgcagctttcccttcaggcgggattcatacagcggccagccatccgtcatccatatcaccacgtcaaagggtgacagcaggctcataagacgccccagcgtcgccatagtgcgttcaccgaatacgtgcgcaacaaccgtcttccggagaatggccgggtactcctctgagacaaaacttccagaggaacgatcaggcagcaacatctgctgttcaccaatatctgctgttctgcagcctccactgctgatacccaggcaaacagggtctgcgttggatctccggcaaactccaacagacctgcagctaagggtcctgactctgaaggtcgggctgtccgcggtcat

SEQ ID NO: 139979 - DNA, 1213 bp, Homo sapiens; identical to SEQ ID NO: 132368

SEQ ID NO: 139980 - DNA, 491 bp, Homo sapiens
cagttttcgccactccccacttccaccagcaacggcacatccagacgggtacagttttccatcagttgatgaatctgcttcgcgacggcatcaacatcatctttatgaacttcaaataccagttcatcgtgtacctgcatgatcatacgtacacgcggttgctcagcctgtaaccacgcatcaacggcaatcatcgcccgtttgataatgtcggcggcggttccctgcattggcgcgttaatggctgcacgttcagccgctgcacgacgagcaccattgctggatttgatatccggcagatacagacggcgtccgtccagcgtttcaacgtagccctgctctttcgcctgagcacgggtgcgttccatatactccagcacgccagggtagcgttcgaagtaaaggtccatgtacttctgcgcttctttacgtggaatgttcaattgccgcgccagaccgaaagcactcatgccataaatcagaccaaagtt

SEQ ID NO: 139981 - DNA, 1195 bp, Homo sapiens
ttcagcgcgcgcctggttgattggtttgcccatttcgcgggtgatcatttgcgccatttcttcgctacgagcgcgcagagccttaccgatatcacgcagtttttcagcacgataatctatatttgtctcgcgccagtcgcgaaagcctcgtgccgccagctgaagtgcgttttcgatatcgtcagcgccagcccacggcagcacagaaagttgttcacccgtggcaggatttatcgaaattgcatgagttgccggagtaatggtcatcggggtatctcctttatgagtcatggtatgaagatacgcagatttactcttgctttaaaatgaataatattaagccacttattcacgaatcgagaatgctatggatctgacccaactggagatgttcaacgcggttgccgaagctggcagcataacccaggctgcagcaaaagtgcatcgcgtgccgtcgaatctcactacccgtctgcgccagctggaaacagaactgggggttgatctgtttattcgcgagaatcagcgtttacgtctctctcctgccgggcataactttttacgctatagccaacaaattctcgcgttagtggatgaagcgcggagcgttgtcgctggcgatgagccgcaaggtttattttctcttggttcgctggaaagcaccgctgcagtgcgcattccagccacgctggcggaattcaaccgtcgttatcccaaaattcagttttcactttccaccggcccttccggcactatgctggatggtgtactggagggaaaactgaatgcggcgtttattgatggacccattaaccatactgccatcgacgggataccggtataccgcgaggaactgatgatcgtcacgccacaaggatatgcgccagtaacccgtgccagtcaggttaatggcagtaacatttatgccttccgcgccaattgttcgtatcgtcgccacttcgagagctggtttcatgctgacggtgccgctccgggaactatccatgagatggagtcttatcacggaatgttggcctgtcccaccagtcagtcaagcagccgatctgccctcaaggagtttgaactccatggtggctgcataaattcatcaaaccatgaagatgaagaatacacaagcacatcaggtcttttccttaaagaagttgagctggggctaaaagagctccatgactga

SEQ ID NO: 139982 - DNA, 978 bp, Homo sapiens
atggggctagaagctactgacggggtggtgcgtaacggcaaaagcaccgccggacatcagcgctatctctgctctcactgccgtaaaacatggcaactgcagttcacttacaccgcttctcaacccgcagtagctgcatatgggcaaaagttacgcggttctgaatacctgaacaatacctcctggcagcagatcaaacagtgggctcagcaggcaaaaggggaagatccacagggttacagggcggaatttattcgcctgattgaactggcggatggacaaggcccaggccactgccaggactcttacagggacatccctacgcagaggcatcctacatcagaggactggcccttctcccttccctcttaccactgtggaagcctgggacccaacaggcttgaaatgagagctgaagagattgaatttgatgactgtgagatagagaaagatcaacttagcccgtttgaagtgcgccgctggcagcaggaattaaacagtccgaacgagcaaattcgccagctcgccattgatgaaattggcctgatgctcaagcgatttagcctctctggctgggaaccgattctggtcaataaaacctcgcgcacacacaaaaacagcgtctcgcgccatgcgcaattttatgttagccagatgctgggctttattgccgaaaactatgatcaggcgctgaccatcaacgatgtggctgagcacgtcaaacttaacgccaactatgcaatggggatattccagcgggtcatgcaattgacgatgaaacagtacattaccgcgatgcgcatcaaccacgttcgcgcgttactgagcgataccgataaaagtattctcgatattgccctgacgggaggctttcgttcaagtagtcgtttttacagcacgttcggcaaatatgtcggcatgtcgccgcaacaataccgcaaacttagccaacagcgccgccagacgttttcccgctaa

SEQ ID NO: 139983 - DNA, 1158 bp, Homo sapiens
ttaagcatcatatggttggtccaacaaagagatgtgtccaaaatcttgggctttatttaggccactttctttatattgctgtgacttctgttggctacacctttctagcacatcgcagttcagaccagccacattccagtcactcaggaggcacacgtggccaatagctgccacattgaagttcagctctgatgtcagggggtgaatgaactgaacatcccttttgggcggtgcgtactgaataccgccgttattccagagattattttgcccacgtttaattttcagcgggctttctgaacctacgttacgctcaaaaatttccgagtagttacccacctgtttgatgatgttataggcccatttattatccagcttcagatccttgccgtaatcgccttctttacccagcagatgtgccatatcaggcgttgctggattagccgctttttcatcgacgttctgggaattgatgcccatctcttcagcattcagcatggcgaaaagcgtccagcgtacaatcgagaaccattcatcatcgccacgacgaactaccggaccaagcggttcttttgagataacttccggtaagacaatccattcagctgggttgcttaatttgatgcgcagggcatacagttgtgattgatccgaggccagcgtatcgcagccccgacatagccccacgggttgagaagcggtgtaagtgaactgcagttgccatgttttacggcagtgagagcagagatagcgctgatgtccggcggtgcttttgccgttacgcaccaccccgtcagtagcttcggtatctggtttatgacagtccagacaggcggcatccgggttacgctgctgggtaacttgcgtagcgatcatcagatgccgtggctgaaatccaccaccagtatgttcaggtaaatcaaactcgtgcagcgtatcgcaggctgcggcgatatcatcggcatgataattcggttttttgccagccacgcataataatgtggccatacgggttgccgatggttccccatccccgggcaataagggcgcgtgcgctatccacttttttgcccgtccatattcaacggcttctttgaggagttcattttccatcgttttcttgccgagcaggcgctggagttctttaatctgcttcat

SEQ ID NO: 139984 - DNA, 2025 bp, Homo sapiens
atgctgagcatggaagatgtgctggagatcctgcgcatcaaactcgtcggcgtgatcccagaggatcaatcagtattgcgcgcctctaaccagggtgaaccggtcattctcgacattaacgccgatgcgggtaaagcctacgcagataccgtagaacgtctgttgggagaagaacgtcctttccgcttcattgaagaagagaagaaaggcttcctcaaacgcttaaaccagcaccgctgcgtgaatgttgcgcgaggccagaatagcaatgatgaagaagccgaggatacccagaagtacgctgtgagaagtcagattaccgatgctcaccagcgtttccgggttagcgacaatcacacctgcgtttttcagccccatcatgccaatgaacagaccgataccgctggtaatacccacacgcagactcaccggaatgttggctatcatccagtagcgaacgcggaaaatcaagattgcgcccatcccgacctgccacggcaagcccatcgcctgtacaacgacaaaagcgaagaacgcattcaggcccatagcgggtgccagtgcaactggcagctaaaatttccccaaatcatcatccctgctgtgctggccatcggttattatgtctgggataataggttctgccaggttatctgtggtatcagactgccgccaccccaagcatcgaacgctggtaataaactcgcgtccttcaacgtggggcaggatgtgccggtgctatccgggtcacagaccacttcaggggataacgtctttaataccgtcgaacgcaaaacggtggggacaaaactcaaagttactccgcaggtcaatgaaggcgacgcggtgttgctcgaaatagagcaggaagtctccagcgttgactcttcctctaactcgacgctcggcccgacgtttaatacccgtactattcaaaacgccgtgctggtcaaaaccggtgaaacggtggtcctgggcggattgctggatgatttttctaaagagcaagtgtcaaaggttcctctgcttggcgatattcctttagtggggcaactcttccgctatacctccaccgagcgcgctaaacgcaacctgatggtatttatccgtccgacgattatccgtgacgatgatgtttatcgctcactgtcaaaagagaaatacacccgttaccgtcaggagcaacaacagcggatcgacgggaaatcaaaagcgctggttggctcggaagattggccggtgctggatgagcacacgttcaacagtcacgcccctgcgccatcgtcacgttgggcgctggcacaacgaattggttatctctattcagagggcgagattatttatctcgccgatacgccattcgagcggttactcgatattcaacgtcaggttggccagtgccagaccatgaccagcttgtcacaggctgattttgaagctcggctggaagcggtattccatcagaataccggtgagtcgcaacagattgcgcaggatatcgatcaatccgtcgatcttctctcgctttcggaagagatgcccgcaaatgaagatctcctgaatgaagattcagcggcaccggttatccgcttgatcaatgcgattttgagtgaggccatcaaagaaaccgcctctgatatccacattgaaacctatgaaaaaacaatgtcgatccgttttcgcatcgacggcgttttgcggacaattttacagccaaacaaaaaactggcggcactgcttatctcccgaattaaggtcatggctcgtcttgatatcgccgaaaaacgtattccacaggatggaagaattagtttgcgtatcgggcgacgtaacatagatgtccgcgtatccacactgccgtccatctatggtgaacgcgccgtactccgcctgctggataaaaacagcctccagctttcattgaacaacctggggatgacggcagcggataagcaggatttagaaaatctcattcagcttccgcacggtattatcctggtgacagggccgacaggctccgggtaa

SEQ ID NO: 139985 - DNA, 834 bp, Homo sapiens
ttatgtaggagtgaaattttgctttgcaaggttagagtaagaacctgtatatttatccaatattcgtgtcctccatgcttgattcagggcaaaataaagagtcttgttggtgagtccattctgctctgagtaagtaagcactggtccctggtccacttggtcgggttgagaagcggtgtaagtgaactgcagttgccatgttttacggcagtgagagcagagatagcgctgatgtccggcggtgcttttgccgttacgcaccaccccgtcagtagctgaacaggagggacagattgccgggtaagggctaggttttactcccccctcaacggcgcctactgtcttaacagggtccactttgctaaacaccgagttggaaaagcagcttcctctctttcccaatctctgatggtgctgcttccaggtgtaacttctacctgccctctgccttaagggtcccctgcccccagcggcgggggagccgggcctacgggctaaaggacggtgttgtaagaagctggacgagcccggttccagaaaccaaacagcagttgttatcatgccttttaaatcacgcgtagaggtttcagtttcttcctctgcaggcccgtaaatatttgccttcgggtttctgtgttttctgccgttgccaggagctccgatcctcagttctggaggctggaagtccgagatcagggtgctggtatggtcaggttctggtgagggctgtcttccaagttgcagacagatgccttcctgttgtggccttacatgggataaagatgggaggaagctctctgggatctcttttataagggtatgaatcccattcat

SEQ ID NO: 139986 - DNA, 1427 bp, Homo sapiens
tcaattcgctgcgtatatcgctgctttacgtgcagctttcccttcaggcgggattcatacagcggccagccatccgtcatccatatcaccacgtcaaagggtgacagcaggctcataagacgccccagcgtcgccatagtgcgttcaccgaatacgtgcgcaacaaccgtcttccggagcctgtcatacgcgtaaaacagccagcgctggcgcgatttagccccgacgtatccccactgttcgtccatttccgcgcagacgatgacgtcactgcccggctgtatgcgcgaggttaccgactgcggcctcgttccgttcacgcagccaaatccattaactccataaaggttggccagcaaatagccttcttcacacgggttaacttccagtgcgaattccttcaacaacacctgatgcaattgcacaacggcttgccagtggctggattgcgccagttctgccagcaactcgttatccagcggctctatttcttcaccacggcgactgggcatcagggcaatcgccaaaagggtcatcgccatcggtccttgctcactgcgcaccggcagatggcactctgtttccagtacgttgacgaccggcatcatgcctttgcagatgtccttatcaataacgcctgctacccgttgttgatgggcgagcagggcgtgtttatctacaacggcacgcagcagttgttgcattgggtaatcatcgactcgcgtcaggaccacggcttcggtggcctgtaaaaatcgcggatcgtctgtgagcggcgtcgcctctaatcccagcatggtcagttcgttttccgccaccacgttccagatcaccgcatcgacatcgcctttaacaatgagttgtaatgacatgcttatgtctgcgccagcaatgaagttgtccggtttagcggagacaaacaccacgcctcgcaactctttgttttcacggagttgcttaataatggcgcgcacctgcgaggcaaactccgccttcagggtattcattttctcacccggtacgtcgatggtgataacggcaatgttgtccagacgaacattaagggtaaacgctgatgtcatttccattattccgccggcagcacaggcggtaactaaaccaaatccaccgccgcgacggcgaagttcatgcaatgtctgggtaatcatccgcgcgccggtcgccgcgaagggatgcccgtaagcaatcgaaccgccaagcacgttaaatttgctatcgtccacttcgccagtggcatgtgcacgccccagtgcttcacgagcaaaacgttcactacccagcaactgaatattcgccagcgtctgagctgcaaaggcttcgtgcatatcgatcaatgtcagatcgctcatcgtcaaaccggcacgctccagcgccagcggtgttgaccaggctggaccgagcaacat

SEQ ID NO: 139987 - DNA, 2685 bp, Homo sapiens
atgcgtggagaagttctattagctggtgtgccgcgccatgttgctgagcgtgaaatcgctacactggcggggagtttttccctgcatgaacagaatattcataacctgccgcgcgaccaggggccgggtaataccgtctcgcttgaagtcgaaagtgaaaatatcaccgaacgcttttttgtcgtcggtgaaaagcgcgtcagtgccgaggtggttgcggcacagttggtgaaagaggtgaaacgctacctggcaagcacggcggcggtgggggaatatcttgctgaccaactggtgctaccgatggcgctggcgggcgcgggggaatttacggtcgcccatccctcatgccatctgctgaccaatatcgcggtggtggagcgtttcttgccggtgcggtttagtttgatagaaacagatggcgtaacgcggcaattgctgggcgtgtcgtaccgcatcctggcgatgggccacgccgagtttctgatacagattgcggatatgcgtaatgatggtgggtggcgcgacttccagttctccgggaatttggtcatggatgaaccaaatagatcagcccagacctacataaagttggtcaagtcgagactcggtaccaccaaacgatataaccataaggacgattgcccacggtgtaggtggatagcggcaatgatcgacaacccgccaagaatcaggaaaccgacaaaatcggccagcgtatggcatgccactgcaaccagtgccagcccggagagacagatgagcacgacggtaataatgagcgcccgtttcatctcttgctgggtaatgacccctttttgcatgccgcgtagcggcccaatgcgattcgttcacctgccatgccgcttccgcgatgcgtttaataccggagtcggtaaactcgatcagctcggtccgtcgatgagcacgcgaatccgacaacgcttcaccacattatgcccgatgactttgtcaagcagctccaccgagtttgagaacgtcagcgactgccgtcccagccgtgccaggagctgcctcagattcaggttatgccgctcaattcgctgcgtatatcgacttgctgattacgtgcagcgttcccttcaggcgggattcatacagcggccagccatccgtcatccatatcaccacgtcaaaggtgcgttcaccgaatacgtgcgcaacaaccgtcttccggagactgtcatacgcgtattacagccagcgctggcgcgatttagccccgacatagccccactgttcagtccatttccgctgcacgacgatgacgtcactgcccggctgtatgcgccgagcctgatgccaaaattacgcctgatcggattaactttactcgcacttagcgcgactgccgtctcacacgctgaagaaacgcgctatgtttccgacgaactgaatacctgggtccgcagcggtccgggagatcattatcgcctcgtgggcacggttaacgccggcgaggaagtgaccttattacaaactgacgccaacaccaattatgcccaggtgaaagacagctctggccgtaccgcctggatcccgttgaaacaacttagcactgagccaagcctgcgctcccgtgtgccagatctggaaaatcaggtcaaaaccctgaccgataaactcaccaatatcgataacacctggaatcagcgcaccgcagaaatgcagcaaaaagtggcgcagagcgacagcgtgatcaacgggttaaaagaagaaaatcagaaactggcgcgtgtacgtgaaatctggaaaatttgcagggtagttgtgagggatttttcgcgtaggagcggggaaatgaccgccagtcttgccgctgacgtcggctacgcgcgcgttaaaagtcatcgcgttggaacagtttggcccagatttttccgggcacgttcctttggttgtgtgcaacgttgggaaggccgcaaccggcaggtttgcgttgatttgccgttccatgtcgtacatcgtttggaagtattgaaaccgtttcgcaccccgggcgcgatacttaaagcgcttgagcgtatcgggtacaagtcgatagccacaggccacggctggcgcacaacgttcagcaccgcacttaacgaatcaggcagatactcgccggattggattgagatccaactagcccacgtcccgaagggaataaggggcgtttataaccaggctgcctacctgaagcaacggcgagcaatgatgcaggattacgccgacgctattgattcaatattggcagatccagagttcgaaaataggatcaacacaaataaaagcccccggaatgctgcaacatgccgggggcggtatgagaaacaagctaaaggagaatttctcatgtctgatatgctagcagtagaacaagaaacaaacaatgatgttcgtcaatttttaaacaaaattaacgagttacggaataaagcacccaaaaacgaagagattgtgcgcgcgtgtgcgagtggcctcttctaccgcatccggcagtttggtgccgtcgatagagaagaatttaatgccattatcgtagaacgggttatgcgatgcagatatcacaattccggcctctgcgcggaaggtacgcgtcagataagccacacgtatgacatgatacacatcgatctcggtacccggcttttgctatgcgcatgttgcctgcacaaatga

SEQ ID NO: 139988 - DNA, 876 bp, Homo sapiens
ttattgcaacagcgaaatatccgcaacgcgcaggaacagttcgcgcagtttctccagcatggtcagacggttgatacgcaattctttgtcatcaaccatgaccatcactttatcgaagaaagcatcaaccggttcacgcagctcagccagttcgaccagcgcatcctggtaacgaccttccgtaaagtacggctccagcttgtcacgtagcaccacaacctgcatcgccagtttaatttcttccggctctttcagggtagaggcattcacgcggtcgctcagcacttcgtcagatttcgccagaatgttagatacacgtttgttcgccgccgccagtgcagcagctgcatccagggtacggaaatgcgataccgctttcatacgggcatcgaaatcagccggacgagtcggacgacgcgccagtaccgcctggatggtgtcaacggtataaccttcatcaaaaatcaacagcgcattgtggcggttacacaattcacgcagaccttgtaaaaacgcgttgctggctggcaccacaccgccttccccctggtccaggcaggtagtagcagtagcatccggtgtgtacccggcctgacagtggcagcggaaggagccaaggctgttgatgcactccccatgagcacacaggtgagcaagcatacggcattcatctacatctgaattagctgatatcaggagggagacattcctcttactgctgctgatgggattgctaaacttggacgatgataacttggagtttccagaactcaacttctttacagcatgagggccttggaaggtctgcgtgttgtggtggagctttgcaaaaaccttatttcgagcatccaggagcttcatggctcttaactgcat

SEQ ID NO: 139989 - DNA, 1350 bp, Homo sapiens
atggccatctacaagcagtcacagcacatgacggaggttgtgaggcgctgcccccaccatgagcgctgctcagatagcgatggtctggcccctcctcagcatcttatccgagtggaaggaaatttgcgtgtggagtatttggatgacagaaacacttttcgacatagtgtggtggtgccctatgagccgcctgaggttggctctgactgtaccaccatccactacaactacatgtgtaacagttcctgcatgggcggcatgaaccggaggcccatcctcaccatcatcacactggaagactccagtggtaatctactgggacggaacagctttgaggtgcgtgtttgtgcctgtcctgggagagaccggcgcacagaggaagagaatctccgcaagaaaggggagcctcaccacgagctgcccccagggagcactaagcgagcactgcccaacaacaccagctcctctccccagccaaagaagaaaccactggatggagaatatttcacccttcagatccgtgggcgtgagcgcttcgagatgttccgacagctgaatgagcccttggaactcaaggatgcccaggctgggaaggagccaggggggagcagggctcactccagccacctgaagtccaaaaacgtgtatgatggtgtttttgaggtgctccagtggcttctgtttctatcagctgtccctcctgttcagctactgacggggtggtgcgtaacggcaaaagcaccgccggacatcagcgctatctctgctctcactgccgtaaaacatggcaactgcagttcacttacaccgcttctcaacccgccgggcagtgacgtcatcgtctgcgcggaaatggacgaacagtggggctatgtcggggataaatcgcgccagcgctggctgttttacgcgtatgacagtctccggaagacggttgttgcgcacgtattcggtgaacgcactatggcgacgctggggcgtcttatgaaattaaagcaggacttacttaaccatctctttttcaatcaactggatcaggatatggatcactttaatgtgaatctcctgaatgcggtcggcataaccaaagtgcggtacgcgaatttcgatatccgccgtgccagccattttgccgccgtctttaccggtcagggtgatcactttcattcccttctcacgcgccgctgcgatcgctttgatcacgtttgcagagttaccggaggtggagatccccagcagtacatcgccttcgcgacctaccgcttcaacgtagcgggagaaaatatcattgaaaccgaaatcattaccgacgcaggaaatatgactaacgtcagaaatagcaatcgccgg

SEQ ID NO: 139990 - DNA, 3226 bp, Homo sapiens
ttattgcaacagcgaaatatccgcaacgcgcaggaacagttcgcgcagtttctccagcatggtcagacggttgatacgcaattctttgtcatcaaccatgaccatcactttatcgaagaaagcatcaaacggttcacgcagctcaggccagtcgaacagcggcatctggtaaagaccttccgtaaaggtagaggcattcacgcggtcgctcagcacttcgtcagatttcgccagaatgttagatacacgtttgttcgccgccgccagtgcagcagctgcatccagggtacggaaatgcgataccgctttcatacgggcatcgaaatcagccggacgagtcggacgacgcgccagtaccgcctggatggtgtcaacggtataaccttcgtcctgataccaggcgcggaagcgaccgagcataaagtcgataacatcatcaactacgttggcattagtcagcttatcgccatacagacgcaccgcttcttcggtcagcgtttgcagatcaaggttgagttcttctggggacctctagagtggacatgcagcagcagctcgcccgccccccgagccgttatataccgaaggcaaatcaccgaatcgggagaatctctgcgtgcattgattggcgcgggagcaagcgatatgccgcagattagtccggtggcattaccgcaagtccaggccggcattccggtcactctctcttatgatttgctcgcaagacgcccggatctgcaagccatgccgctgctactgacggggtggtgccgtaacggcaaaagcaccgccggacatcagcgctatctctgctctcactgccgtaaaacatggcaactgcagttcacttacaccgcttctcaacccgccgggcagtgacgtcatcgtctgcgcggaaatggacgaacagtggggctatgtcggggctaaatcgcgccagcgctggctgttttacgcgtatgacagtctccggaagacggttgttgcgcacgtattcggtgaacgcactatggcgacgctggggcgtcttatgagcctgctgtcaccctttgacgtggtgatatggatgacggatggctggccgctgtatgaatcccgcctgaagggaaagctgcactcaaatgaaggcgacgcggtgttgctcgaaatagagcaggaagtctccagcgttgactcttcctttaactcgacgctcggcccgacgtttaatacccgtactattcaaaacgccgtgctggtcaaaaccggtgaaacggtggtcctgggcggattgctggatgatttttctaaagagcaagtgtcaaaggttcctctgcttggcgatattcctttagtggggcaactcttccgctatacctccaccgagcgcgctaaacgcaacctgatggtatttatccgtccgacgattatccgtgacgatgatgtttatcgctcactgtcaaaagagaaatacacccgttaccgtcaggagcaacaacagcggatcgacgggaaatcaaaagcgctggttggctcggaagatttgccggtgctggatgaaaacacgttcaacagtcacgcccctgcgccatcgtcacgttgggcgctggcacaacgaattggggtctctagagtggacatgcagcagcatgttcgccgccccccggtaaatttgtcaccaaaaagggagaatgtcatagcgggatatctgtcgaactctgtagcaaggaagcaacggcacatccagacgggtacagttttccatcagttgatgaatctgcttcgcgacggcatcaacatcatctttatgaacttcaaataccagttcatcgtgtacctgcattttcttctgagccctaaatgggtcatgtataacagaaaatgtgttaatggcatgctgttaattgcctcagttccggcgacctggatgctgtcgcgataccgttcatcccatcgttggatagcaaaggagataccgatgggtaaaacccagcccttgccaatattattacttggcgaggtcgtcgcatcggcctcgccctcgccatggcatttcattatccaaaagcaaccggtgattgtcagctatcggacacactatccagccattgatggactgattaatgcaggtgcgcagtgtattcaggctgatttttcgaccaccgacggtgtgatggcgtttgccgatgaactactaaaaagcacccatggtctgcgtgctattttgcatcacgccagtgcgtggatggcggaaaaaccgggtgcgccactggccgacgtactggcttgcatgatgcagatccacgttaataccccatacctgctcaaccatgcgctggaaagattactgcgtgggcacggacacgccgccagcgatatcattcactttaccgattatgtggtggagcgcggtagcgacaaacatattgcgtatgctgcaagcaaagcggcactggataatatgacccgctcgtttgcccgcaagctggcaccggaagtgaaacgacagacggcgacgcgcgcgggtcaccgcggtataaaccagctctcgcgttactaccggcgtgcgttggctcggcaaaatcaacgccgcatggtcgaactccgatccctgcgatttatgtaccgtcatcgcccacgtagtttcgtgctctggcaagcgactcggttgcacagacttaatattgccgtccggcatcgcaaaccagacgcgcgtcccctgcccgcgatccagcgcaataccgatatcgccattaaacaacccaagcgcgctgtcattacgggcaatcatcaccggtcgaccttcgtaccaacgagactggcgcagacgggtagtgagattcgacggcacgcgatgcacttttgctgcagcctgggttatgctgccagcttcggcaaccgcgttgaacatctccagttgggagataccccgatgaccattactccggcaactcatgcaatttcgataaatcctgccacgggtgaacaactttctgtgctgccgtgggctggcgctgacgatatcgaaaacgcacttcagctggcggcagcaggctttcgcgactggcgcgagacaaatatagattatcgtgctgaaaaactgcgtgatatcggtaaggctctgcgcgctcgtagcgaagaaatggcgcaaatgatcacccgcgaaatgggcaaaccaatcaaccaggcgcgcgctgaagtggcgaaatcggcgaatttgtgtgactggtatgcagaatcactttga

SEQ ID NO: 139991 - DNA, 543 bp, Homo sapiens
attcagctgtatgccagcctgctattacaggtgtttttctttgccgcgaatatttacggttggtatgcgtggtcgcgacaaaccagtcagaacgaggcggagttgaaaattcgctggtgcacagtgccgacgacactcagttggttgcggaacaggggtggctggttggcgcgcgccgcgttccctcaccacattacgattgccgcccggatgacgaaacacccaccctgctggtggtgcacaatattagcctgccgccaggcgagtttggcggtccgtggatcgacgcattattcactggaactattgatccgcaggcacatcctttctttgctgagatcgcccatttgcgcgtctccgctcactgtttgattcgccgtgatggtgaaatagtccagtatgttcctttcgataaacgtgcatggcatgcgggagtctctcagtatcaggggcgcgaacgctgcaatgatttttctattgggattgagcttgaaggcacccgatacgctggcgatatgccgatgcacagtatcaacagcttgg

SEQ ID NO: 139992 - DNA, 2346 bp, Homo sapiens; identical to SEQ ID NO: 138879

SEQ ID NO: 139993 - DNA, 1018 bp, Homo sapiens
atggattcttatgtcgatcaactgcaagcgcagggcggaagtatgatcatgctggcgaaaggcaaccgcagccagcagggtgaaccgtggcaaacgattcgtttaatttctgaattttacccggaagacagcggtctgttctccccgctattgctgaatgtggtgaaattgaaccctggcgaagcgatgttcttgtttcgttgaaaccaccgcacgttttacttcaagggcgtggcgctggaagtgatgccaaactccgataacgtgctgcgtgcgggtcttgacgcctaaatacattgatattccggaactggttgccaatgtgaaattcgaagccaaaccggctaaccagttgttgacccagccggtgaaacaaggtgcagaactggacttcccgattccagtggatgattttgccttctcgctgcatgaccttagtgataaagaaaccaccattagccagcagagtgccgccattttgttctgcgtcgaaggcgatgcaacgttgtggaaaggttctcagcagttacagcttaaaccgggtgaatcagcgtttattgccgccaacgaatcaccggcgttttatatttcgccaaattacctctcgcacctgtttcaaaaaacgggggccattggttttaacgaatacctgaatcacacgcgactggagcacgctaagacgttattgaaaggctatgacctgaaggcacaacttttccagggtaccgagatgatgtgtatcagtcaatattaccgtccccgccatgtggcaaatggaaggtcacggcaaactgcaatataccgacgaaggttttcgccaacatcgcccgtaacggatcgagcagctcctggctgtgcagcggatattacgctctacgagccgcgcggcgactaccagataatcgttgagagtatctggaagtcgggcgcaatccagagagcttttatcgctaaatcagggggatttgctgtggtaatgccggatgccattctgaagcatccggcatgggagatttaa

SEQ ID NO: 139994 - DNA, 583 bp, Homo sapiens
tcctgagcatcgatattgcgtcccttcatgaaagggattttttcatagatagcatcaagtagaacgaaaagcggtactgaactggaaccgtagccttgcggtatcgaaataccttccagcccgacgatgttctgtacccgttttgccgtccagtcggccatttttaacgatagcgccgcatggcagattgcccccagcacaccataaatcaggctaccggtcataagctggaccaccgtacccgtaatggcgtagtgccagtaattgtaaatatcgacgttcatcgttttggtcagacgggtgaccagcatggcgacattgagaagaaaaataactgggataatcatggcgccaatggctgtcgcataaccaacgccggaggcagggccctgcggccaacgttcaaaggacatggcagggccttaggcccgaaaccgctccaattccatcacttttggatagggggactgaggctgtcgatcgccatgacgatcaccagtcccataccgacaaaaccaatcccccccgttacccctgccttaatcgcatgcagacaggggatgcggaagataaggccaatcac

SEQ ID NO: 139995 - DNA, 2667 bp, Homo sapiens
atgatcgtgattggccttatcttccgcatcccctggctgcaggcgattaaggcaggggtaacggttgggattggttttgtcggtatgggactggtgatcgtcatggcgatcgacagcctcagtccccctatcaaagtgatgattgagcgtttcggcctagccctgcatgtctttgacgttggcgcaggccctgcctccggcgttggttatgcgacagccattggcgccatgattatccccagttatttttcttctcaatgtcgccatgctggtcacccgtctgacaaaacgatgaacgtcgatatttacaaatactggcactacgccattaacgaaggcggcattgcctggggcgatatgcgcaactgcctcaaccagctgataacggaaccgagcgtcgcctccgcgatgtttgaataccgttttggtggcaatggcgaactttccggtcataatctcggaaacttgatgttaaaggcgctggatcaccttagcgtgcggcctctggaagccatcaatttaattcgtaatctgctgaaagtggatacgcatttgattccaatgtcagagcatcctgttgatctgatggcgattgacgatcaggggcatgaagtttacggcgaggtcaatatcgaccagttaactacgccgattcaagagttattgttaacgcctaatgtacccgcaacgcgtgaggcggttcacgctatcaatgaagcggatctcatcattattgggcctggcagtttttataccagcctgatgccaattctgcttgctgaaggaaatcgccccaggcattacgccgcacgccagcgccgatggtttatatcggcaatctggggccggtctgttctccccgctattgctgaatgtggtgaaattgaaccctggcgaacgatgttcctgttcgctgaaacaccgcacgcttacctgcaagctgtggcgctggaagtgatggcaaactccgataacgtgctgcgtgcgggtctgacgcctaaatacattgatattccggaactggttgccaatgtgaatttcgaagccaaaccggctaaccagttgttgacccagccggtgaaacaaggtgcagaactggacttcccgattcctgtggatgattttgccttctcgctgcatgaccttagtgataaagaaaccaccattagccagcagagtgccgccattttgttctgcgtcgaaggcgatgcaacgttgtggaaaggttctcagcagttacagcttaaaccgggtgaatcagcgtttattgccgccaacgaatcaccggtgactgtcaaaggccacggccgtttagcgcgtgtttacaacaagctcgatatccggatagcaatcaatcagtgctcgcgtaaccgccgcaagctgttgatactgcgcatcggtatacgccagcgtatcggtgccttcaagctcaatcccaatagaaaaatcattgcagcgttcgcgcccctgatactgagagactcccgcatgccatgcacgtttatcgaaaggaacatactggactatttcaccatcacggcgaatcaaacaagtagcatgtttctaccttatgattcgttagctatctggagttttaacatgccgcctcgccgctataaccctgacacccgacgtgacgagctgctggaacgcattaatctcgatatccccggcgcggtggcccatgcgctgcgggaagatttaggcggaacagtcgatgccatcaatgatattacggcaaaacttttaccggaaaattctcgctctcatgccacggtgatcacccgcgagaatggcgtcttttgcggcaaacgctgggttgaagaggtgtttattcaactggcaggcgacgatgtcaccataatatggcatgtggatgacggcgatgtcatcaatgccaatcaatccttgttcgaacttgaaggcccatcccgcgtgctgttaacgggcgaacgcactgcgcttaattttgtgcaaaccctttcaggagttgccagtaagatgtgctggtgccgtaagcataacggtcactggacggtagaactctacagtgacagcattccgcgtctgcaaatcaaccagcactacgcctcgatgtgcaataacgcgcgcaacgatggtgacagccagtttatccgcagcaatctgcaggatgccaaatggttgatcaagagtctggaaagccgtaacgatacgctactgcgcgtgagtcgctgtatcgttgaacagcagcaagccttctttgagcaaggtgaagaatatatgaaaccgatggtactggccgatatcgcccaggctgtcgaaatgcatgaatcgacgatatctcgcgtgaccacgcaaaaatacctgcatagtccacgaggcatttttgaactgaagtattttttttccagtcacgtcaataccgagggcggcggcgaagcttcctccacggcgattcgtgcgctggtgaagaaattaatcgcggcggaaaacccagcgaaaccgttgagcgacagcaagttaacctctttgctgtcggaacaaggtatcatggtggcacgccgcactgttgcgaagtaccgagagtctttatccattccgccgtcaaaccaacgtaaacaactcgtttgacccaaccgataaggaagacactatgcagctcaacattaccggaaataacgtcga

SEQ ID NO: 139996 - DNA, 1146 bp, Homo sapiens
atgctgttctgtcatcaggcgactgatattgcctgcaaattcatcatcctgaatcagcgacaaatgggcgctgaagatagttttgtttcgccgtcaccgtcacgcaattgctgggtcagcgtacccacgccgacgccgcttgccagcacattgccgtacagtaaatccgggttaaggcggcttaatgaacgcggcagcggatgcgccgtcagttctgcctgcataaaagttgctgcatctgcaaaatgtcgcggcaatcggcaatcgaaaagacatggtgaaccgtgccgtcggtccaacaccgttaccagtcaaaagtctgacctgaacacgacaattgagtttgttagtccgaatgacgttgtaagcattcgtgagaaagcgaagaagcagtctcgcgtgaaagccgctctggagctggctgagcagcgtgaaaagccaacctggctggaagttgatgctggcaagatggaagagtttctaaaaccgcgcctggttgatatcgagcaagtgagttcgacgcacgccaaggtgacccttgagcctttagagcgtggctttggccatactctgggtaacgcactgcgccgtattctgctctcatcgatgccgggttgcgcggtgaccgaggttgagattgatggtgtactacatgagtacagcaccaaagaaggcgttcaggaagatatcctggaaatcctgctcaacctgaaagggctggcggatttcaagatcctcgacagtgaagacccagtacgcctgattaagcgtctgataaaagccatgaacctcgacgagaagcagtggccgccgcggcaggcaatgtggtacatcaacagccagaaagatgaaggcctgcgtccgcatcatattcaaagctacggtaatccggtggagcaagacctggtgtatcaggcgtatcaggaagcgtgtgaccgcgcgggcctggtggacttcgccgagcatgatgtgcgcgctcacgagttgtggcttaacaagccgcatatcctgcaacactaccgcgaacgttttaccaatatcctggtggacgaattccaggataccaacaacattcagtacgcgtggaatcgcctgctggcgggcgacaccggcaaagtgatgatgatcggtgatgacgaccagtaa

SEQ ID NO: 139997 - DNA, 1788 bp, Homo sapiens
  misc_feature (1)...(1788): n = a,t,c or g
atgctggctttcttaaaccaggttcgcaagccgaccctggaccttccgctcgaagtgcggcgcaaaatgtggttcaaaccgttcatgcaatcctacctggtggtctttatcggctacctgacgatgtacctgattcgcaagaactttaacatcgcgcagaacgatatgatttcganctacgggttgagcatgacgcagctggggatgatcggcctgggtttctccatcacttatggcgtgggtaaaacgctggtttcctactacgccgacggcaaaaacaccaaacaattcctgccgttcatgctgatcctctctgctatttgtatgctgggcttcagtgccagtatgggcagcggctcggttagcctgttcctgatgattgccttctacgccttaagcggctttttccagagtaccggcggttcgtgcagttactccaccatcaccaaatggacgccgcgtcgtaaacgcgggacattcctcggtttctggaatatttctcacaaccttggcggtgcaggcgcagcaggtgtggcgctgttcggggcaaattacctgttcgatggccatgtcatcggcatgtttatcttcccgtcgattatcgcgctgattgtcggttttatcggcctgcgttacggcagcgactccccggaatcttatggcctcggcaaagctgaagaactgttcggcgaggagatcagcgaagaggacaaagagacagaatctaccgatatgaccaagtggcagatctttgttgagtatgtgctgaaaaacaaagtgatctggctgctgtgcttcgccaacattttcctctatatgtacgtaggtaccgagctcgattctactccccttccaaatctaggagcaaagcagaatgtccacatgaaagaatccaatcgtgtgatacaccaccctgcagataatatactgccaagctatgattatccagtgcaagtctggttaacaagaaagattctgggccgatttcccccactcggcatacaggatgccgccacaaaccagatacagtgcgtcgccgtgtacgtcgctcatcgcgataagcgcaaacgttccggtctgcaaaaacagcgtgacgccggcaacgatacaaccccaacgagccgatatgacgttttctgggagaaattgttgtttaacgaccgcctggcgcagtcgctggcaatcaacgatcagaacgccattactgaaacgaccgaacagttaatcaacgaaccgctcgaccatcgcggtgaagtggtgctggttggtgcaggtccgggcgatgccgggctgctgacactgaaaggactgcaacaaattcagcaggcagatgtggtggtctacgaccgtctggtttctgacgatattatgaatctggtacgccgcgatgcggaccgtgttttcgtcggcaaacgcgcgggataccactgcgtaccccaggaagagattaaccagatcctgctgcgggaagcgcaaaaaggcaaacgcgtggtgcggctgaaaggtggcgatccgtttatttttggccgtggtggcgaagagctggaaacactgtgcaacgcgggtattccgttctcggtggttccgggtattaccgcagcttctggttgctctgcctattcgggtattccactcacgcatcgcgattatgcccagagcgtacgctctaattaccggacacttaaaccccggtggcgagctggactgggaaaacctggcggcagaaaaacagacgctggtgttctatatggggttgaatcaggccgcgactattgggtaccgagctaa

SEQ ID NO: 139998 - DNA, 2976 bp, Homo sapiens; identical to SEQ ID NO: 138186

SEQ ID NO: 139999 - DNA, 1951 bp, Homo sapiens; identical to SEQ ID NO: 138811

SEQ ID NO: 140000 - DNA, 1817 bp, Homo sapiens
tcataagttgaattcctgcagaaggatacatatagcttgcacagcttcaatggactgttcaaaagtaacagtgcctattccacgactttttccatctttatcttcaagaatgtctgctcggaccaccacaccagccatactaaatacttccttcagtttcttccagccaactttataatccagatttgctacaaatactgtgcttccaagtcttccagcctgtaatgcatggataatctcatttgggatgttgggattatttaggatactgggtgggatagtaatcattcctgggccacctggtcccatacccatcccaccagtcgtagccatcaccttttgcattgctctcctggcatgttcaccatcaggatcccgtccgaggtgaacggtgaaagggcgcaagtttatacgggaacgccggcgcagataagcgcagtgccagtcatttttaagggcaaaaatcctgtatctcgggacggtggcatttgtgccccctgagggcgcgtcggagccgccctggggtcttcgggggctgctgccagcaccttgtctctttttccagacgtcggcgctggaagccggcgggccgggtgcagcgtccaggaagtggcgcaggcgcggcgggtcttccagggactgtgtgggcgggcagtgggttcgcagatgctgtgccaggtcacggacgctgggaaaactgagggcagcagccagggctggagcaagggatttgttccccggtccccgatggacccaaccaaccaggtgtccgtagggaaaccaggcgctgaggaactcggtgaaggaattaggccaaatggtgccgaacttcgggagaaggcaacgctgatatgtaggtgaagcgacttgctcgtggagtttcaggccatacaggcacagcagacgcaggtcgagaatgttttcgccaatcgccgctttatctttgttaggggtaaattctgctgcctgacgttgcagggcgccgagatcgtcgctcaccagttgcaggtcagccatcgggttatcgacgcgcgcgttggcatctacagccaggcattgcgctttcagcgcctcgcgcagggcaatcgcttcacgagcgtagccgaccaatacgcggagaatcgaagttaacgttggtcagggttgagaaaaaggcacgtggcgcgaagtgttcaacatcgtgggttgatgatgccgtattcacgcgcttttaccgcccaggcagaaagcccttgcagcgccgcgatgagtaaatccagaagttttcggcccacctgcgccacatcgcctggtgagcaggtaatcgcccgctgggagacttttttcgccgccggatgcggggcaaaaatgacgctgttgcccgcggcaatcaggctgatggcgttgttaattacggtagccgccgggttagtggaaggcgtcaccgaagccaccacgccccagggtgcgttttcaattagggtcaggccgttgtcgccagtcagcacttgcggagagaggcactcaacgcctggtgtgccgcgcgcctgagcgacgttttttgcaaatttatcttcaacgcgccccatgccggtttcactgacggcaagttccgctaaatctctggcgtgtttttcgcctgcttcacgaatggcagcaatggctaactggcgcattgccacgctttttaacccttgctgggcgactttggctgccgcaacggcgtcatccagggacgcgaaaacgcccatctcatgaacggcggcggacggcgtgtcactgctttgcattttcagcagtaccgctttcaccacctgttcaatatcctgttgattcat

SEQ ID NO: 140001 - DNA, 2414 bp, Homo sapiens
atgccggtaattaaagtacgtgaaaacgagccgttcgacgtagctctgcgtcgcttcaagcgttcctgcgaaaaagcaggtgttctggcggaagttcgtcgtcgtgagttctatgaaaaaccgactaccgaacgcagccgttatgatctggtggatcgcaacaacaatatcgttctggaatatcgcaaaaaagaactggttcgcctgaccctgacagaccccgtgacagggaagtcaggagaagtgaaatcactggtttcgtcgctacaaaccaaatatgccctgaaaggctataacgtcgaagccaccgcactggaagctgccggtggcaaagtggtcacaacgggtaaagatattctggttcgcaagccgaccctggaccttccgctcgaagtgcggcgcaaaatgtggttcaaaccgttcatgcaatcctacctggtggtctttatcggctacctgacgatgtacctgattcgcaagaactttaacatcgcgcagaacgatatgatttcgacctacgggttgagcatgacgcagctggggatgatcggcctgggtttctccatcacttatggcgtgggtaaaacgctggtttcctactacgccgacggcaaaaacaccaaacaattcctgccgttcatgctgatcctctctgctatttgtatgctgggcttcagtgccagtatgggcagcggctcggttagcctgttcctgatgattgccttctacgccttaagcggctttttccagcagtacctggcggttcgtgcagttactccacccatcaccacaatggacgccgcgtcgtaaacgcgggacattcctcggtttctggaatatttctcacaaccttggcggtgcaggcgcagcaggtgtggcgctgttcggggcaaattacctgttcgatggccatgtcatcggcatgtttatcttcccgtcgattatcgcgctgattgtcggttttatcggcctgcgttacggcagcgactccccggaatcttatggcctcggcaaagctgaagaactgttcggcgaggagatcagcgaagaggacaaagagacagaatctaccgatatgaccaagtggcagatctttgttgagtatgtgctgaaaaacaaagtgatctggctgctgtgcttcgccaacattttcctcctatgtggtacgtattggtatcgaccagtggtcaaccgtatacgcgttccaggaactgaaactctctaaagcggtggcgattcagggctttacgctgtttgaagctggtgcgctggtcggaaacggctgctcatacgcgcaggggatgtgtggtaaaacggcggaaacttctgaccttcaggatttactcatcgcggcgctgcaagggctttctgcctgggcggtaaaagcgcgtgaatacggcatcatcaaccacgatgttgacagcttcgcgccacgtgcctttttctcaaccctgaccaacgttaacttcgattctccgcgtattgtcggctacgctcgtgaagcgattgccctgcgcgaggcgctgaaagcgcaatgcctggctgtagatgccaacgcgcgcgtcgataacccgatggctgacctgcaactggtgagcgacgatctcggcgagctgcaacgtcaggcagcagaatttacccctaacaaagataaagcggcgattggcgaaaacattctcggcctgcgtctgctgtgcctgtatggcctgaaagtgttcaatggaagagaagaccaactagactcttgttatcacgggaataggcagctgcgcggcagcctgcgcctgttgtttttggcgtttatccgccagcgtctgcgcgacctgataataaccgctcaccgcgtcattcgggttaatcgccagcacgccgcactgggcgtcaagcactgcaggttgcccggcataacgggcaatcgcatccagcggcaagccactcagtaccgggatcgccgaggcacgggccagaatcagtgtatgcgaggtgatatgcagcaactgttcgctgatatcgcgaatgtcgctaacacgttcgcgcagataatcgctggcagaggcagaaagtttggcgcaaacctgctccatattgctgatgatcgccgcccccagcccctgatgctgttctgtcatcaggcgacggatattgcctgcaaattcatcatcctgaatcagcgacaaatgggcgctgaggatagttttgctttcgccgtcacgctcacgcaattgctggttcagttgctcggcaagcgttgccaggctgtgctccagccggatggacagtgtacgctcgacagcgacccggatgacatgaaggacttcatggagaacgtgctgcgctatctatccgacgatagatggaagccgacgcgaaagccacgcatgaccgtaggcaccaaacacgtggatactgtctag

SEQ ID NO: 140002 - DNA, 3738 bp, Homo sapiens; identical to SEQ ID NO: 135690

SEQ ID NO: 140003 - DNA, 4119 bp, Homo sapiens
ttactgcgatgaggaaaaagtttttttagcgtcgatcaactcaatgtataaagtgttcactgcattattctggtttattcttcctgtaacgaaataatctggcttgaatctgctcaagaatgaattttgagatatgtgatcattaccaaaatttgtcgcagccatcggataggtatagagaccatcgatttttttatttgaaatgatttgcactaattcctgattaagtattaatggatccagtgtattcaatgaagtagtgaaagggaatatagctatggaatagtctgaagtattatcttcattaattttagttttgaaaacctgcccgctgaaacgataacctttccggtagattgtttctatgcaacgatcatagccaattttttcaaaaatgcagcgcaaagaatagatacatcttgtcagggactcgtcactaacaataatatttttccatactgattcgatgatcatatctttcagtacaacatgaccagcggattcaagtaatactattaatacacctaactctttctgtggaatataaacttgctcatttccttgagtaagaattccatcttccgtgagcgttaatcccagacacgaaggtgaaaaatcgacgcgacgatcagtcgcgtggtcaacgtatatcactcgcccccgcctaaaccttttttctcccagttcttctttaaagttgtcacgcgtgatcagtaccacgtcggtaacttcggtaaattttggcggttcaacgtcttttgctacccagttgtaaagcatttcgctggatttatagccatgtacgtccgggcttggcagcagggaaccgtagaagccggttgcctgtgctttagacagttcgctcaccgcatccacaccgttaatgccaatgccgatgatatcggccgctttaaagccctgaccttccgtcgcgcgtacgccgcccagcacggtgctgtcgttcataccgacgatcagccaatgtttaactgataaatttgtttttccgggaatccggccgctttcagagattgttcgaggtctggcgtacatcatttcagacggtaaacggtcggtatcgaagatgaaagcttctttgcccttggttacgccaactggttcggtctgcctgcgccaatctggctcaccgtcgcgtgtctgattatctttggtttgctgctgaataaaaccactgtctgatgcttttttctgcgcagcgtcgtactgcagcggaccgtcgatcatcaggtcaggacgtttttcctgcgccagacgagttgcttcgcgaactttttctacgtcgctacctgcaccagaagtaccggtggagtaggagagcatagcaacgcgcggttcgataccgaaggccgcagcggaatcagcggactgaatcgcgatttctgccagcgtaaacgtaaacctgttccggcagcagcatgaagaacacggaagataccagggagctgcccggccaacatcaccgacgaagatcagcggacggatataggcgctggtgagattgtttttgcggatcacgtcacgacaagcttccatcagctcatcaatgctctgcgaaaccgggaagcgatagattttggcggagtcatgcagacgctgcatatgctcacgatggcggaatacaaccggtcctttgtgcgagtcgtagcaacggatgccttcaaaaaccgaagtgccataccattgtttcaggtagatgcccgttgcagcagatcggttcgcagcgtttttccttccggcgatgcagcaaacgtcgcatcgttcagttgcgcttgcgacaacgcagggtcggcgcagcatcgcacgcttttgctgggcaagcagttcttcaactgtcgtaacgcttttcacttcaaccggaatagccgccagactgcgctcaagtcgggcatctcctgggtgacgtttcagttgatcctcaagcaacagccgcgcccggtcatcatgaccaaaatggcgataggcttccgcaaggtataaagtcagcggaatattatccggcacctgctggtgtatatattcaaattcgcggatggcggttgcttcgtcgttatttttctgtgccttcagcgctttatcgagacggggataaataacaaaatgggataatcgctcagccccagctcttctgcgctggtccgaatattgtctgcgagtgcgctggtactccaataaagacgtcagcagtaaaccagaccatccgatgacgcgattaaggttattctccttcattttcggactccagttgcgcaacctgctttgagtaatagtgattgcatcgaaacttgtaattcgcgttgaattgtcaggacgcgatccaacgtttcctggctgataacgccttcggtgaccaaaacttgccgagcggcagagaactgcgttcatggcgcaataacacacgttaattgctgaacgattaatatgaccgagcgtggtcagtatttcggcgaacaggaactgatgcggcacatattgccgccagatttcaccggcctgctgttccgtgagccactgatgctgaaccgcattgtacaacattgcccgcggatcgtgaccgcgtcggcgtgcataccagtgacgtaaccctgtgacaatttgtccccgcagaacaatgacgtaacgcactttgcgtccgactttacgcgtcagggccgccagcgaaaccgggtcaataccatcttcactgccgacaattaactcgtcattttccagacgcagcggcagtaccgcattggtcagcagaatcagcttatcttccagcacaaagcgcgcttccagcgcctcgccgatgtcagataaaacctgttgaaactcaaggtaattatcatgatcgatggcggtttccagactggaatcgtagtaatccataatctgaacccgttcatcggtcaccacaacggtgacatcgtgggtaaaatctgtgccgaaaccggtaagagtgtacgtgaagtcgttctggaacgcggtctgttgactgaagcggaacttgacgatattttctccgtacagaatctgatgcaggtaggtgacccagccggccgcatcacagggaaagcagccctgtttttctcctcttgcttgcttcttctctcctcctcttcttcctcctcctcctcctcctcctcctcctcctcctcctcctctcttccttctcttcctgcctccttcttcttctttttggctgcagattcgatcagctataataacgtgatacaggggcacgtaataccataatacttccgctcgcttcgtccttccgcgaaatactatgatgaactgccaacggaagggaatgagcacggtcaggcgttccgcgatgtggaactggaaaaagaattgctgatcgaagcgcaaaatcttggtctgggtgcgcagtttggtggtaaatacttcgctcacgacatccgcgtgattcgcctgccacgtcacggcgcatcctgcccggtcggtatgggcgtctcctgctccgcgtaacattaaagcgaaaatcaaccgcgaaggtccttgccttccatcatgtttgtgaggcttccccagccacatggaactgtaagtccaattaagcccctgagttcccagtgctggaaagtgacagacacaaggtgcttcaaagattgcaaacgctattccaaaactgcctccatgattcttcaccctactcgtcagcatatgcatttcctgaatgcgagcactacgatgcgaaggaatgcggatctccacatcctgtggccctaacaaacctgcaagttcgccgccgtcatagccggtcaatgccacaatggtcatatcacgcgtaacggcggcttcaactgctttaacaatatcgcggctgttgccacgggtggaaatggctaacaatacatctcccgcatgacccagcgcccgcacctgttttgcatacacttcatcatgtaagcgatcgttggcaatcgccgttaagacaacattatcagtatttagtgcaatggcaggtaagctggccgctccgtttcgaaacggttgatcatgctggcagcaaaaatgctgtgcattggcagcggaagttccattaccacaacagaggattttgttgccattgagcagagactgaaccagcgtcat

SEQ ID NO: 140004 - DNA, 747 bp, Homo sapiens
atgaccgagttaccaatcgacgaaaacacaccgcgtattttgatcgtggaagatgaaccgaagctggggcagttgctcattgattatctgcgtgctgcgagctatgcgccgacgcttatcagccacggcgatcaggtactgccgtatgtgcgccagacaccaccggatctgatcctgttagatctgatgctccctggcaccgatggcctgacgctgtgccgggaaattcgtcgtttttctgacattccgatcgtgatggtgacggcaaaaatcgaagagatcgatcgcctgctggggctggagattggcgcagatgattatatctgtaagccgtacagcccacgggaagtggcttcatggcgcggtaaaatgcttgacctgacgcctgcggaatctcgtctgctgaaaacgctctctcacgaaccaggaaaagtgttctcccgcgagcaatggctcaatcatctttatgacgagtaccgcgtagtaaccgaccggaccatcgacaggcatttaaaaacctgggccgcagctgcaattctcgagccggaggtcattgatcgagcgcgggtcctcctggctactgagtactgccatcgtatagcgccgatgttacggaagatagcagaagtattatttacacagtatacggcggcgaacacaggggaacctgcagaaataattaagggccaaacgagcggaatttggcacgtgaggatacccttacaagtaaaaaacaacgggctatga

SEQ ID NO: 140005 - DNA, 1157 bp, Homo sapiens
atgaagttctggcgacccggtattaccggcaaactgtttctggcgattttcgccacctgcattgtcttgctgatcagtatgcactgggcggtgcgtatcagttttgagcgtggctttattgattacatcaagcatggtaatgaacagcgattacaactgttaagtgatgcgcttggcgagcagtatgcgcagcatggcaactggcgcttcctgcgcaacaatgatcgctttgtctttcagatcctgcgttcatttgaacacgataattcggaagataaacccggcccgggtatgccaccgcacggctggcgtacccagttttggggtggttgattcaaaccaacaaagtgttggtttggtccgcgagccgccgatttccacctgacggtacacggcgacccattttggtcaacggtgcgaaagttggcgcggtgatcgcctcccccgttgagcggttaacgcgcaatactgatatcaatttcgataaacaacagcggcaaaccagctggttgattgtcgccctggcaccgttactcgcggcacttgccacttttctgctggcgcgcggtttactggcaccggtaaaacgacttgtcgatggcacgcacaaactggcggcgggcgatttcactacccgcgtaacgcccaccagtgaagatgacctgggcaaactggcgcaagacttcacccagcttgccagcacactggagaaaaaccagcaaatgcggcgcgattttatggccgatatttctcacgaactgcgtacgccattagcggtgctgcgcggtgaactggaagccattcaggatggcgtgcgtaaattcacgccggagacggtggcgtctttacaggcggaggtcggtacaaagaacaaattggttgacgatctccatcagttgtcgatgtctgatgaaggcgctctcgcctatcaaaaagcaccggtagatttgatcccactgctggaagtggcgggcggcgcatttcgcgaacgattcgccagtcgtggcctgaaactgcaattttccctgccagacagtattaccgtattggcgatcgcgaccgttaatgcagtattcatacttgcccaaccaaaggccacccctggaatccggtttgaaacgggaaaccgggccaaaaacacgctgccgggaatctga

SEQ ID NO: 140006 - DNA, 2709 bp, Homo sapiens
atgctggtgatgatccagcttttgctgttgctggcgtatgaaagtttgtggcccgatgcctggcatttcctttctattttcagcggcagcgcatggttaatgaccctgctgtggctaaactttggtttgatggttaaccgcatcgtgcagcgggtgattttcgttactggctactacggcctgacgcaggggctgctttccgtcctgcgtcttttctggggcaacctgattaacttcatggccaactggcgcgcgctaaaacaggtacttcaacacggcgatccacgtcgcgtggcgtgggataaaacaacgcatgacttccccagcgtgactggcgatacccgctcgttgcgcccgttaggtcaaattctgctggaaaatcaggtcatcactgaagaacaactcgatacagcactgcgtaatcgcgtcgaaggtctacgcctgggcggttcaatgctgatgcaggggctgattagcgccgagcagctggcacaggcgctggcagagcaaaacggcgtggcgtgggaatccatcgatgcctggcagatcccttcctcgctgattgccgaaatgccggcctccgtggcgctgcattatgcggtactgccgctgcgtctggaaaatgacgagttaattgtcggcagtgaagatggtattgacccggtttcgctggcggccctgacgcgtaaagtcggacgcaaagtgcgttacgtcattgttctgcggggacaaattgtcacagggttacgtcactggtatgcacgccgacgcggtcacgatccgcgggcaatgttgtacaatgcggttcagcatcagtggctcacggaacagcaggccggtgaaatctggcggcaatatgtgccgcatcagttcctgttcgccgaaatactgaccacgctcggtcatattaatcgttcagcaattaacgtgttgttattgcgccatgaacgcagttctctgccgctcggcaagtttttggtcaccgaaggcgttatcagccaggaaacgttggatcgcgtcctgacaattcaacgcgaattacaagtttcgatgcaatcactattactcaaagcagtgcgggccacagtagtggtccgctgcacttcatattcgactgtacatcatagagcacatagcgaattcatcgccgcccaggcggtatcattgatgtatttgaaattatcgccatcaagaaatagtaacgccgacgtttttcgggcatcggaattgttcatcaacgtgttgatgccgctacgaaacgctgcgcggttagccagcccggttaatgggtcatgtagcgcgcagactgttgaagtcgagagcgaagcggtgaaactcagcgatacgttcttccgaaactcgtcgggaaaaattgcggttggaacgcacatcatgtacgacatcggtgatatttttcagcgcttctaccaggccattgtgcaaatggcggcgctgccagtgtttcagttgctgcagggccatcggcaaaacatggtggaagtcatcgagccgttttaccccaaggctggtaatggccggcgaccttatccgctggaaaccatgctacgcattcactgcatgcagcattggtacaacctgagcgatggcgcgatggaagatgctctgtacgaaatcgcctccatgcctctgtttgcccgcgccttgccggactgcaccaccatcatgaatttccgccacctgctggagcagcatcaactggcccgccaattgttcaagaccatcaatcgctggctggccgaagcaggcgtcatgatgactcaaggcaccttggtcgatgccaccatcattgaggcacccagctcgaccaagaacaaagagcagcaacgcgatccggagatgcatcagaccaagaaaggcaatcagtggcactttggcatgaaggcccacattgggccggagaaacgcagacggcgtaccacacaggaaaagatcgcaattgttcagcagagctttgaaccggggatgacggtctccctcgttgcccggcaacatggtgtagcagccagccagttatttctctggcgtaagcaataccaggaaggaagtcttactgctgtcgccgccggagaacagttgcacgtcattctcagacgaaccgatgactggatggatggccgccgcagtcgtcacactgatgatacggatgtgcttctccgtatacaccatgttatcggagagctgccaacgtatggttatcgtcgggtatgggcgctgcttcgcagacaggcagaacttgatggtatgcctgcgatcaatgccaaacgtgtttaccggatcatgcgccagaatgcgctgttgcttgagcgaaaacctgctgtaccgccatcgaaacgggcacatacaggcagagtggccgtgaaagaaagcaatcagcgatggtgctctgacgggttcgagttctgctgtgataacggagagagactgcgtgtcacgttcgcgctggactgctgtgatcgtgaggcactgcactgggcggtcactaccggcggcttcaacagtgaaacagtacaggacgtcatgctgggagcggtggaacgccgcttcggcaacgatcttccgtcgtctccagtggagtggctgacggataatggttcatgctaccgggctaatgaaacacgccagttcgcccggatgtcgggacttgaaccgaagaccaggcggtgcggagtccggagagtaacggaatag

SEQ ID NO: 140007 - DNA, 1065 bp, Homo sapiens
atgcaagccaatggtatcgttctacccattaccgtgtttcctttgttcctctatggtttttactccgctgttacccgcggggggcctaaaatgaacgaaggggggttcttgttgtgttggaatgtggatcgttcctttaaaattggacaaagtaaagcttttggaaagttcgtccctggaaaggtacgaacccccaaattggcccttgtgaccaatgccaccccttacaatccacctctttatctaccacaatctttgtgtttcaaatatcccaacgctgtatggcgccaaattggcacaccgaatgattgtgcctcaattgaatcttctgtgcgccctgtgaaaaccgccccattttgtttgagggtgtccgaatgcacatatagggacaaagagtcattgcatatcaactgcaacaacactgcgatgcaaactgcgctgcccaacgtgattgattatgtgacagatctcttctcctacgactactcaatctctcgacatgagagcagaagaacatccgggcacccgcaaagggccaaacagacgggaacccacacgaaatattgccccggacgcatgatcaggccccggggttacaccagccaattcagcgcaccaatccctgcgagtgttcgcctgcccacactgaccagaaggtcactgtcgggttacgtaattttggcacatctaaagcatgactgcttttcggggggagactgctgcagcatgccggaaatatgcttctggcgacagtaccagtgggcggcggtcatgaatatctaccagaccttgatctgccgcagcagtgacgatcaaaaatccttcggcttcgtcaccacgctcaaatggtgtgctacctatcgcggccataaaaataggttgtccatcagcacgatagataaaaaaaggctgttttttgtcgccttcttttttccactcaaaccagccatcggcaaaacagattgcccgaccatgttgccagagcggtttaaacatacgactggttgccgcagtttctacgcgggcgttaatcagcggcggtttataccaccagggatcctctag

SEQ ID NO: 140008 - DNA, 858 bp, Homo sapiens
atggacgctggcggcaacgtgcctccaaatccgccagtgctgattggcggttgtaccggcagcggtaaaacgctgttagtgcagcaacagccgaacggtgttgatctggaagggttggcgcgtcatcgcggttcggcgtttggtcgcacgttacaaccacaacttagccaggcgagttttgaaaacctgctggctgccgaaatgctaaaaaccgacgcccgtcagaatttgcgcctgtgggtgctggaagacgaaagccggatgatcggttcgaatcacctgccggaatgcctgcgcgagcgaatgactcaggcggcgattgcggtggtagaagatccgtttgagatccgtcttgagcgcctgaacgaagagtatttcttgcgtatgcatcatgattttacccacgcgtacggcgacgaacagggctggcaggagtattgcgaatacctgcatcacggactttcggcgattaagcgtcggctggggctacagcgctataacgaactggctgcaaggctggatgcagcactgacaacgcaactcaccaccggcagcaccgacggtcatctggcctggctggtgccgttacttgaagaatattacgacccgatgtatcgctatcagcttgagaaaaaagcggaaaaagttgtctttcgcgaggtaactctcatgcttcatactgccaatcccgtcatcaaacacaaagccggtttgctcaatctggctgaagaactcagcaacgtatcaaaagcctgtaaaatcatgggcgtttcgcgtgatacgttttatcgttaccgcgaactggtcgctgaaggcggtgtggatgcgcagattattcgtagtcgccgcgctccgtaa

SEQ ID NO: 140009 - DNA, 2412 bp, Homo sapiens; identical to SEQ ID NO: 129879

SEQ ID NO: 140010 - DNA, 1257 bp, Homo sapiens
atgggcgggattatgatcctgacggcgattgtgatctccgtactgctgtgggcttacccgtccaatccgtacgtctggtgcgtgttggtggtgctggtaggttacggtgttattggctttgttgatgattatcgcaaagtggtgcgtaaagacaccaaagggttgatcgctcgttggaagtatttctggatgtcggtcattgcgctgggtgtcgccttcgccctgtaccttgccggcaaagacacgcccgcaacgcagctggtggtcccattctttaaagatgtgatgccgcagctggggctgttctacattctgctggcttacttcgtcattgtgggtactggcaacgcggtaaacctgaccgatggtctcgacggcctggcaattatgccgaccgtatttgtcgccggtggttttgcgctggtggcgtgggcgaccggcaatatgaactttgccagctacttgcatataccgtatctgcgacacgccggggaactggttattgtctgtaccgcgatagtcggggcaggactgggcttcctgtggtttaacacctatccggcgcaggtctttatgggcgatgtaggttcgctggcgttaggtggtgcgttaggcattatcgccgtactgctacgtcaggaattcctgctggtgattatggggggcgtgttcgtggtagaaacgctttctgtcatcctgcagtcgctccataaacttccatctaagccaacacagagtaacacaaggccaacgtctccagatgtcaatgggagaagatctgtggtaacaattggggcgatgcaccttcgcaactctaagtggaacatcatcagagatgtccctaagaaagcaggattggagctgaaaccttcatttggagaaggagagctccaggcagaggaaagagctgctgcaaaggttctggggttggaacaagttggtttgcttgaggaacagaagaaacgcatgtggccagcgcagagtgaggccggggagatgagagatgagatgggagagcccgaggagcgggatacatacccggataaaatccccggcgaggatgatcacttaaacgaacgatttcgaaccgcctttgacgtcgttaacgtacacagcgacggactccgcgccacctgcggccataaagatccaggtggtaacgccgaggaacgcccagttgaagttcgggatcatcgcgtcaacggtgatggcgtcagcaggctgtacgccgccaaccagcgccgtacctgccagtaa

SEQ ID NO: 140011 - DNA, 1184 bp, Homo sapiens
atggacttcgctgaaacggagctcgagttcatcaaattctggggagatatcatcaccaacaagctgaacgaggcgctcgcagcacaaggcgataatgtggtgattaatctggcgtcagatgagtattttaaatcggtgaagccgaagaaattgaatgccgagattatcaagccggtgttcctcgatgagaagaacggcaaatttaagatcatcagcttctacgctaagaaagcacgcggtctgatgagtcgtttcattattgaaaatcggctgaccaaaccagagcaactgactggttttaatagcgaaggttacttctttgatgaagattcctccagcaatggcgaactggtgtttaaacgctacgagcagcgcgctgaatgccggattgttacccggcatttgtcatttagcggtgatgtttgcctggaccatgaccgccgtgatgatcatgaggagctttcttatggtggcgcggcggtggcggcggtccttgttatcgaaccgaacaaactggcctttgacggcagcggttatctggcctgggaaggtctgatctgcatgcaggaaatcggcaaatgcaccgaagaacatcaggcgattgtgcgtaagtggctggaagagcgcaaactggatgagtttccggttgggccctttcccggggaaaaaaccaaccgggggttggttgcgaagcaggcgcccgtcgacacgcccgagaagcgcgcatcggtgatgagcgacaccgtcttgccccacgagatatgctttagcgcggagcgcgacaaaacggtgcgcctgacctttgccgacagtgcgccaggtgtcagtgacgatcagctacaaaaattgtttgaacgtttttatcgcaccgaaggttcccgcaaccgtgccagcggcggttccgggctggggctggcgatttgcctgaacattgttgaagcacataatggtcgcattattgctgcccattcgccttttggcggggtaagcattacagtagagttaccgctggaacgggatttacagagagaagtatgaccgagttaccaatcgacgaaaacacaccgcgtattttgatcgtggaagatgaaccgaacctggggcagttgctcattgattatctgcgtgctgcgagctatgcgccgacgcttatcagccacggcgatcactttagagccctatag

SEQ ID NO: 140012 - DNA, 2546 bp, Homo sapiens
  misc_feature (1)...(2546): n = a,t,c or g
atggcaatgaatcaggcgaaaattattgcctccaatgacagtgtcatctctgcggtgaaaacgcgtgactacaaacggctggcgaccatcgctaacaaattacaaagagataccgattttgattatgtggtgattggggaccggcactcgatccgcctttaccatcctaatccggagaaaatgttcaccaaacagggcgcgctggagaaaggggagagctacttcattaccgggaaagggtcaatggggatggcgatgcgcgccaaaacgccaatctttgatgacgatggaaaagtcatcggcgtggtgtcgattggctacctggtgagtaaaatcgatagctggcgggctgagtttttattaccgatggcaggtgtgtttgtcgtgctgttagggattctgatgttgctgtcgtggttcctggccgcgcatatccgtcggcagatgatgggcatggagccaaagcaaatcgcacgcgtggtccgtcagcaagaggcgctgtttagttcggtttatgaagggctgattgcggtggatccgcatggttacattaccgccatcaatcgtaacgcaagaaagatgctggggctgagttcccccggacggcaatggttgggtaaacccattgttgaagtggtcaggcccgccgatttctttaccgaacagattgatgaaaaacgtcaggatgtggtggcgaactttaacggtctgagcgttattgccaaccgggaagctattcgttcaggtgatgatttgctgggggccattatcagctttcgtagtaaagacgaaatttccaccctcaatgcgcaactgacgcaaataaaacaatacgttggagagccttcgtacattgcgacacgagcatctcaattgatgtcgacgctcaattttccccacaactcgcggccgccgaaaagtcctggccctggcgtgggcggtcactgcattgctgttgatccgtggtttatcgtggcacagaacccccagcaggcgcggcttatccgtaccgcgcgcgaagtgaacgatcacaaaccgttctgggttatcgatcaggtgaaagcggcggtggctgattgcctggcggctaccgataaacgcgccagtgaactgaaaatcgcctgctttggtctggcgtttaaaccgaatattgatgacctgcgcgaaagcccggcgatggaaatcgctgaactgatcgcccagtggcatagcggcgaaactctggttgttgagcctaacatccaccagttgccgaaaaaactgaccgggctttgtactctggcgcagcttgacgaggcgctggcaacggcagacgtgctggtgatgctggtcgatcatagtcagttcaaagttatcaatggcgacaatgtccatcagcagagtctggcgctgatgagaaaaattctgataacaggtggtgccgggtttattggctcggcgctggtgcgttatatcatcaacgaaacgagcgacgcggtggtagtggtcgataagctgacctacgccgaacctgatggtaccgatttcaagtacttactggaaacagcctgcgctacactgacagcgtcggcagcctgcaatctctgccgggcagcgcgacaaaacggttcccgcaaccgtgccagcggcggttccgggctggggctggcgatttgcctgaacattgttgaagcacataatggtcgcattattgctgcccattcgccttttggcgggcattacagtagagttaccgctggaacgggatttacagagagaagtatgaccgagttaccaatcgacgaaaacacaccgcgtattttgatcgtggaagatgaaccgaagctggggcagttgctcattgattatctgcgtgctgcgagctatgcgccgacgcttatcagccacggcgatcaggtactgccgtatgtgcgccagacaccaccggatctgatcctgttagatctgatgctccctggcaccgatggcctgacgctgtgccgggaaattcgtcgtttttctgacattccgatcgtgatggtgacggcaaaaatcgaagagatcgatcgcctgctggggctggagattggcgcagatgattatatctgtaagccgtacagcccacgggaagtggtagcgcgcgtcaaacccattttgcgccgttgcaaaccgcagcgcgagttgcagcaacaggatgctgaaagcccgttgattatcgacgaaggtcgttttcaggcttcatggcgcggtaaaatgcttgacctgacgcctgcggaatttcgtctgctgaaaacgctctctcacgaaccaggaaaagtgttctcccgcgagcaattgctcaatcatctttatgacgactaccgcgtagtaaccgaccgcaccatcgacagccacattaaaaacctgcgccgcaagctggaatcttttgacgccgaccagtcatttatccgcgccgtttctggagtcgccccccgntgggaagccgacgcctgacgcatggtttaaaggngnnnngtctgggtgacaccagcatatgtgcgattancgccgatgtacagtgtaccgac

SEQ ID NO: 140013 - DNA, 5356 bp, Homo sapiens
atggactggctggctaaatattggtggattctggtgattgtctttttggtaggcgtcctgctgaacgtgattaaagatctcaagcgcgtcgaccataagaaatttctcgccaacaagccggagcttcccccgcatcgtgatttcaacgataagtgggacgatgacgacgactggccgaaaaaggatcaaccgaagaagccaggtaatctgtcttttacatcatttcaatcacatcatcatcgccaggcttaccgccacttagaataccgacagtatgcgcgtgtgcacctgcgcttgcagcagtgccggacaggtccggcaacttccgactccggtatagaagttaaccagaatatagctgtcgccagagcgggtgacattgtaagcgccagattcggcattccatggaacgccaccatccgcatcggcatatgtatccgttgcccttctggcaaaagcagccacatgcgcggcgccaccataaacatcaccttgattggtaagcagcaggaaaaagaagctaatggtctggacccggaagtgctggcggagattaaccgcgaacgcgaggccttcctggcagcacagcagggaagtacttcaacggagttgtttaccaccattgaaggcaactacgctgatgctgtgcgcctgctgacgactgctcatagcgtaccgtttgacggtaaagcgacgctgtttgttgctgaacgcacacttcaggaaggtatgagtcccgaacgcgcctggtcgccgtggatagcggagctggatatctatcgtcaggattgtgcgcatgtggatattatctctccagggacgtttgaaaaaattgggccgattattcgcgcaacgctaaacaggttataccccatgtcatcactgaatattaaacagggaagtgacgctcattttcccgattatcctctggcgtcgcccagtaataatgaaattgatttacttaatctaatctcagttttatggcgggccaaaaaaacggtcatggcggtcgtttttgcgtttgcctgcgcaggcttgctgatctctttcatcctgccgcaaaaatggaccagcgcggcggttgtcacgcctccagaacctgttcagtggcaagagttggagaaatcattcactaagcttcgtgtgctggatctggatatcaaaattgatcgtacagaagcatttaacctgtttatcaagaagtttcagtcggttagcttgctggaagagtacctgcgttcatcaccttatgtgatggaccaattaaaagaggcgaaaatcgacgaactggatttgcatcgcgcaattgtcgcattgagcgaaaaaatgaaagcggttgatgacagtgccagtaagaaaaaagatgaaccgtcactgtatacctcctggacgctaagttttaccgcgccaaccagtgaagaggcgcagaccgttttgagcgggatgttcgcacaaacagcggggaaacattatccggcccccatcaccgcagtaaaaaccattgaagctgcggcccgttttggtcgtgaagaagccttaaacctggaaaacaaaagttttgtcccgctggcgcataccaacgaagcccgcgcactggtcggcattttccttaacgatcaatatgtaaaaggcaaagcgaagaaactcaccaaagacgttgaaaccccgaaacaggccgcggtgctgggtgcaggcattatgggcggcggcatcgcttaccagtctgcgtggaaaggcgtgccggttgtcatgaaagatatcaacgacaagtcgttaaccctcggcatgaccgaagccgcgaaactgctgaacaagcagcttgagcgcggcaagatcgatggtctgaaactggctggcgtgatctccacaatccacccaacgctcgactacgccggatttgaccgcgtggatattgtggtagaagcggttgttgaaaacccgaaagtgaaaaaagccgtactggcagaaaccgaacaaaaagtacgccaggataccgtgctggcgtctaacacttcaaccattcctatcagcgaactggccaacgcgctggaacgcccggaaaacttctgcgggatgcacttctttaacccggtccaccgaatgccgttggtagaaattattcgcggcgagaaaagctccgacgaaaccatcgcgaaagttgtcgcctgggcgagcaagatgggcaagacgccgattgtggttaacgactgccccggcttctttgttaaccgcgtgctgttcccgtatttcgccggtttcagccagctgctgcgcgacggcgcggatttccgcaagatcgacaaagtgatggaaaaacagtttggctggccgatgggcccggcatatctgctggacgttgtgggcattgataccgcgcatcacgctcaggctgtcatggcagcaggcttcccgcagcggatgcagaaagattaccgcgatgccatcgacgcgctgtttgatgccaaccgctttggtcagaagaacggcctcggtttctggcgttataaagaagacagcaaaggtaagccgaagaaagaagaagacgccgccgttgaagacctgctggcagaagtgagccagccgaagcgcgatttcagcgaagaagagattatcgcccgcatgatgatcccgatggtcaacgaagtggtgcgctgtctggaggaaggcattatcgccactccggcggaagcggatatggcgctggtctacggcctgggcttccctccgttccacggcggcgcgttccgctggctggacaccctcggtagcgcaaaatacctcgatatggcacagcaatatcagcacctcggcccgctgtatgaagtgccggaagtcggtgtggcggtgggcctgcacggcgccagtgtgcagcagcaaaaatcattctgtccttctgttagtatctactcacagccgatcccgggcctgcagcaactctgcgccgctccccccccccccggcttagtgcaccgaacggcaatctccgagggggtcggaatgcctttacacgtcgtcaatttaccgccgaaaagatttgcgcgtaaacgcctggagcccaaatgggtacggataacttggcagttcgctgatatgcaagatatcggtaagacgccgctcaccgcctgccgttgccagcaagttttcagcaatgttacgcgccgacatcagcgcccgcagcatcggcataacgccacgtttgcgccagatttgccgataaccatcgaactcttcgactaccacatcccacgcatcgtttcgatatccagcgcgttcagccccatcattgacgttgccagcgcactacgcagggtgttctcacgttcgggcgtcatcaccgcctgcaacaaccaaagcatttcctgcgcttccagagtttcaaaaacactgtcgcggttcgaaagtgtagtgggcgtgaacttcgctacgcgccttcatataagtgaagatatccgcaccccggaatgcatatattgcctgcttcgggtcgccattagcaacaatgcggttcccgctgatggtgccagataccgcgaaaaatcggtactgctgggggaccgggtggccccgagcggcggcgagcggtgcaagagggggaacggaggggcccgtaaaggggggcgcgctagaggaggagcccctagggatccgaagggagcagcaagggcgaaggccaatgcatggccatggacggagccaagagagtgttccttgattgctggcgaatatcgccatcgaattgcagcgtgggattggtcaccaggatcgttttcagcgcctgatcaccacgctacgtcaggtgctggagtgcgatgcgtctgcgttgctacgttacgattcgcggcagtttattccgcttgccatcgacggtctggcaaaggatgtactcggtagacgctttgcgctggaagggcatccacggctggaagcgattgcccgcgccggggatgtggtgcgctttcccgcagacagcgaattgcccgatccctatgacggtttgattcctgggcaggagagtctgaaggttcacgcctgcgttggtctgccattgtttgccgggcaaaacctgatcggcgcactgacgctcgacgggatgcagcccgatcagttcgatgttttcagcgacgaagagctacggctgattgctgcgctggcggcgggagcgttaagcaatgcgttgctgattgaacaactggaaagccagaatatgctgccaggcgatgccacgccgtttgaagcggtgaaacagacgcagatgattggcttgtcccctggcatgacgcaactgaaaaaagagattgagattgtggcggcgtccgatctcaacgtcctgatcagcggtgagactggaaccggtaaggagctggtggcgaaagcgattcatgaagcctcgccacgggcggccaagctgctgagggtgttgcagtatggcgatattcagcgcgttggcgatgaccgttgtttgcgggtcgatgtgcgcgtgctggcggcgactaaccgcgatttacgcgaagaggtgctggcgggcgattgccgcgaccgatttgtttcatcgcctgagcgtgtttccactttcggtgccgccgctgctgccgttgaggcgttgcgtgaccatctcaatacgctgggcggcgagcaccatgaccccgtgcagttgctgaatatttactacgaaacgccggataactggctgcgtgggcacgatatgggcttacgtattcgtggcgaaaacggtcgctatgagatgaccatgaaagttgcaggaagagtgacaggcggcttacatcagcgcccggaatataacgtggcgttgagcgaaccgacgctcgacctggcgcagttaccgacggaagtctggccgaacggcgaattgcccgccgatctcgcctcccgcgtgcagccgctgttcagcaccgatttttatcgcgaaaaatggctggtggcggtcgatggtagccaaattgaaatcgccctcgaccagggggaagtgaaagcgggtgaatttgctgaacctatctgtgagctggaactggaactgcttagcggcgacacgcgcgcggtgctgaaactggcgaaccaactggtatcgcaaaccggattacgccagggcagcctgagcaaagcggcgcgtggctatcatctggcgcagggcaatccggcgcgtgaaatcaaaccgaccaccattttgcatgttgcggcaaaagccgatgtggaacaggggctggaagcggcgctcgagctggcgttagcgcaatggcagtatcatgaagaactgtgggtacgcggcaacgatgcggcgaaagaacaggtgctgcagccattagcggccagccaggaggctggaccaacgcatatgtga

SEQ ID NO: 140014 - DNA, 3000 bp, Homo sapiens
cgaaagcgatgtacaacaactggcggctgagtccggtgacgaccgcagcgtggtgattggcgtcggtggcggtgcactgctcgacaccgcgaaagccctcgcccgccgtctcggtctgccgtttgttgccgttccgacgatcgccgccacctgcgccgcctggacaccgctctccgtctggtataatgatgccggacaggcgctgcattatgagattttcgacgacgccaattttatggtgctggtggaaccggagattatcctcaatgcaccgcaacaatatctgctggcggggatcggtgacacgctggcgaaatggtatgaagcggtggtgctggctccgcaaccagaaacgttgccgctaaccgtgcgactggggatcaataatgcgcaagccattcgcgacgtcttgttaaacagtagcgaacaggcgctgagcgatcagcaaaatcaacagttaacgcaatcattttgcgatgtggtggatgctattattgctggtggtgggatggttggtggtctgggcgatcgttttacgcgtgtggcggcagctcatgccgtgcataacggtctgaccgtgctgccgcaaaccgagaagtttctccacggcaccaaagtcgcctacggaattctggtgcaaagcgccttgctgggtcaggatgatgtgctggcgcaattaactggagcgtatcagcgttttcatctgccgactacactggcggagctggaagtggatatcaataatcaggcggagatcgacaaagtgattgcccacaccctgcgtccggtggagtccattcattacctgccagtcacgctgacaccagatacgttgcgtgcagcgttcaaaaaactaatacagggcctgattagcgccgagcagctcgcacaggcgctggcagagcaaaacggcgtggcgtgggaatccatcgatgcctggcagatcccttcctcgctgattgccgaaatgccggcctccgtggcgctgcattatgcggtactgccgctgcgtctggaaaatgacgagttaattgtcggcagtgaagatggtattgacccggtttcgctggcggccctgacgcgtaaagtcggacgcaaagtgcgttacgtcattgttctgcggggacaaattgtcacagggttacgtcactggtatgcacgccgacgcggtcacgatccgcgggcaatgttgtacaatgcggttcagcatcagtggctcacggatacagcaggcacggtgaaatctggcggcaatatgtgccgcatcagttcctgttcgccgaaataatgaccacgctcggtcatattaatcgttcagcaattaacgtgttgttattgcgccatgaacgcagttctctgccgctcggcaagtttttggtcaccgaaggcgttatcagccaggaaacgttggatcgcgtcctgacaattcaacgcgaattacaagtttcgatgcaatcactattactcaaagcaggtttaaacacagaacaggttgcgcaactggagtccgaaaatgaaggagaataaccttaatcgcgtcatcggatggtctggtttactgctgacgtctttattggagtaccagcgcactcgcagacaatattcggcaccagcgcagaagagctggggctgagcgattatcgccattttgttatttatccccgtctcgataaagcgctgaaggcacagaaaaataacgacgaagcaaccgccatccgcgaatttgaatatatacaccagcaggtgccggataatattccgctgactttataccttgcggaagcctatcgccattttggtcatgatgaccgggcgcggctgttgcttgaggatcaactgaaacgtcacccaggagatgcccgacttgagcgcagtctggcggctattccggttgaagtgaaaagcgttacgacagttgaagaactgcttgcccagcaaaaagcgtgcgatgctgcgccgaccctgcgttgtcgcagtgaagtcgggcagaatgccctgcggctggcacagttacctgtcgccagagcgcaactgaacgatgcgacgtttgctgcatcgccggaaggaaaaacgctgcgaaccgatctgctgcaacgggcaatctacctgaaacaatggtcccaggcagatacgctatacaatgaagcacgccagcagaacacattaagcgcggcagaacgccgtcagtggtttgacgtgcttcttgccgggcagctggacgatcggatcctggcactgcaatcacaggggatcttcaccgatcctcagtcatatattacttacgcgaccgcgctggcttatcgtggcgaaaaagcacgcctccagcattatctcattgaaaataagccactatttaccacggacgcacaagagaaaagttggctctatctgttatctaaatacagcgctaaccccgttcaggcgttggcgaattatacggtacagtttgccgagaaccgccagtatgtcgttggcgcgaagctaccggtgctgttaaaagaaggtcagtacgacgcagcgcaaaaactgctcgccaccctccccgccaatgaaatgcttgaggagcgttatgctgtcagcgtggcgacccgtaacaaggctgaagctctgcgtctggcacgattgctgtatcagcaagaaccggcaaatcttacccgcctggatcaactaacctggcaactgatgcagaacgagcagtcacgcgaagctgccgatttattgctgcaacgctatcctttccagggcgatgcgcgtgtcagccagactttaatggcgcgactggcgtctctgctggaaagtcatccttacctggcaacgccggcgaaggtggcgattttatcgaaatctggttggaccaagttgcgtgggccatttcttgtagagacaggatttcggcatgttggcaaggatggtctcgatccccatgaccgtcgtgatcctacccgaccatcgagacgcttctccaatacgtgcctgggcgccttgactatgacagtgtag

SEQ ID NO: 140015 - DNA, 3137 bp, Homo sapiens
atggtctgcgttgctacgttacgattcgcggcagtttattccgcttgccatcacggtctggcaaaggatgtactcggtagacgctttgcgctggaagggcaccacggctggaagcgattgcccgcgccggggatgtggaggtctgaaggttcacgcctgcgttggtctgccattgtttgccgggcaaaactgatcggcgcactgacgctcgacgggatgcagcccgatcagttcgatgtttcagcgacgaagagctaccgcctgattgctgcgctggcggccgggagcgctggcgctgggacataaactggtggcgggtgaaattcgtcagcagcgcatggacgcctggcgggcagcgtgcctgcaaaatccgcaaggtattctctgctgcgcccgtggcggtcagcgctcacatattgtgcaaagctggttgcatgcagcggggattgattatccgctggtggaaggcggttataaggcactgcgccagaccgcgattcaggcgactattgaactggcacaaaaaccgatagtgctgattggcggttgtaccggcagcggtaaaacgctgttagtgcagcaacaggcgaacggtgtgatctggaagggttggcgcgtcatcgcggttcggcgtttggtcgcactgaagatgaactgggcaaactggcgcaaacttcaaccagctcgccagcacactggagagaaaccagcaaatgcggcggattcttatgcccgatatttctcacgaacatgcgtacgccattaccggtctgcgcgacagtattaccgtatttggcgatcgcgaccgtttaatgcagttatcaataacttactggaaaacagcctgcgctacactgacatcgtcggcagctgcaaatctctgccgggcagcgcgacaaaacggttcccgcaaccgtgccagcggcggttccggctggggctggcgatttgcctgaacattgttgaagcacataatggtcgcatattgctgcccattcgccttttggcgggcattacagtagagttacgctggaacgggatttacagagagaagtatgaccgagttaccaatcgacaaaacacaccgcgtattttgatcgtggaagatgaaccgaagctggggcattgctcattgattatctgcgtgctgcgagctatgcgccgacgcttatcaccacggcgatcaggtactgccgtatgtgcgccagacaccaccggatctgtcctgttagatctgatgctccctggcaccgatggcctgacgctgtgccggaaattcgtcgtttttctgacattccgatccgcgagttgcagcaacaggatgctgaaacccgttgatatcgacgaaggtcgttttcaggcttcatggcgcggatttaaacgacaaaggcaccaccatcattctcaccacacactacctggaagaagcagaaatgctgtgccgcaatatcggcattattcaacacggtgagctggtggaaaatacctcgatgaaggcgctgctggcgaagctgaaatcggaaacctttattctcgatctcgcaccgaaaagcccgttaccgaagctcgatggctatcagtatcgactggtcgataccgcgacgctggaagttgaagtgctgcctatatgcattcatcgtaccggggctgatcatgatgtcggtgatcaccaatgcctacgcaacgttgcgtcatcattttttggtgccaagttccagcgtaatattgaaagctgctggtagcgccggttccgactcacgtcattattgccggatatgtggcggtggcgtggcgcgtggtgcattcgtgggtattcgttgcctaacgctggtgctcacggcggtgttgttctcccttgcgggtttgctgaagggcaatgcatccggcatcataatcagtcatacgtgcacgatggttggtggcctagcagcggtgcagcataacatcatgcctggactggttgtgcgtagttcgtttcatgtaggtgagagtatcgttaagcgtgccggagtacagcaaccacagcggaataatggaatctgcatatgcaacaaccagcgccacagtcggatgcgtggagattcgttgcgtctggcgactgcagcagtccaggtactggctgaaatgccgggctaccgcgtgctggtggtgggcgatatggcggaactgggcgctgaaagcgaagcctgccatgtcaggtgggtcgaggcggcaaaagctgctggtattgaccgcgtgcttaaggtggtgcgtaacgacggtcctgaatcacacttcagcaagcgcggtacgccgaccatgggcgggattatgatcctgacggcgattgtgatctccgtactgctgtgggcttacccgtccaatccgtacgtctggtgcgtgttggtgtgctggttaccggtgttacttggctttgttgatgcttactcgcacgtggtgcgtacagacaccaaagggttgatcgctcgttggaagtatttcggatgtcggtcattgcgctgggtgtcgccttcgacctgtaccttgccggaacgacacgcccgcaacgcagctggtggtcccattctttcaacatgtgagccgcagctggggctgttctacattctgctggcttacttcgtcattgtggtactggcaacgcgcaacttcagcgcaccaattcctgcgagttgttcgccttcccatactgaccagaatgtcactgtcgggttacgtaatttttgcacatctaaagcatgactgctttcggggggagactgctgcagcatgccggaaatatgcacttcaccggtgttgacatccaccagccggcgctaccagattcagccttgttaaaggccaccgcattgttcagttccgataaaccagcgcctgcaggcgttcatcaatactcagcgccaggttgtcgcagcctggctgtcagtagaagaaatatcttcaattacgcgaccatagggtctttacgcacaatgcgctcacccggctgcccgcgttacgtcactggtatgcacgccgacgcggtcacgatcccgggcaatgttgtacaatgcggttcagcatcagtggctcacggaacagcgcccggtgaaatctggcggcaatatgtgccgcatcagttcctgttcgccaaatactga

SEQ ID NO: 140016 - DNA, 954 bp, Homo sapiens
  misc_feature (1)...(954): n = a,t,c or g
atgctgcgtcgggcgctaagcaacctgctttcgaacgccgtgcgttatacgccaaccggagagacaattgtagtgcgctgtcagacggtcgatcacctggtgcaagttatcgtcgaaaaccccggtacgcccattgcgcccgagcacttaccgcgattgtttgaccgtttctatcgcgttgacccctcccgccagcgaaaaggtgaaggtagcggtattggcctggcgatagtgaaatcgattgttgtcgcgcataaaggcacggttgcgcgcaagttgagtgttaatcgccgtaaccggcgaatgagttaccgcgaactgtataaaccagatgaaaacccgttagcgattatggttccgccgtggaatgaaacgggcgtcatcggcaatatggccgagctggcggcgacaacgctcgactacgaaaactatcatatctttgttggcacntaccccaacgaccccgatactcagcgtgatgttgacgaagtgtgcgctcgcttcccgaatgtgcataaggtagtctgcgcgcgtcctggccccaccagcaaagccgactgtctgaacaacgtgctggacgccatcacccaatttgagcgtagcgccaatttcgcttttgctggttttattctgcatgacgccgaagatgtgatttcaccgatggaattgcgtctgttcaactatctggtcgagcgtaaagatctgattcagatcccggtgtatccgttcgaacgcgaatggacgcacttcaccagcatgacttacattgatgagttttcagagctgcatggcaaagatgttccggtgcgtgaagccctcgccggacaagtgcccagcgcaggcgtcggcacctgtttcagccgccgcgccgtgaccgcactgttagctgacggtgacggtattgctttcgacgtgcagagtcttactgaagattacgacattgcttccgcctga

SEQ ID NO: 140017 - DNA, 1129 bp, Homo sapiens
catggccgcatatggttccgggattttcgcccagacatacatcgaagccttcggcatttcaaccatccagcccgcttcatgcagccctgttaaccaatacatcacggcggcgtttgtactgttcggcaatgtcgcgcacgcactgttgatcgccctccagcgccgcaatcgccgccacctgcaacggcgtaaaggtgccgtaatcgtgatagcttttaatacgagccagggcgctgaccagcgttttgttgccaaccataaagccgatacgccagcccgccatgttgtagcttttcgacagcgtaaagaactcgactgccacatcgcgtgcacccggtacctgcataattgacggcgctttccagccatcgtagacgatatcggcataggccaggtcatggaccaccagcacatcgtagcgtttcgccagcgccactactttttcgaagaactccagttccacgcattgcgcggttgggtttgacgggaagccgaggatcatcatcttcggtttcggataactttcacgaatggctcgctccagttcgttgaagaaatcgacacgaatttcctgactgacatctctggttccggatgactgaactttacgatacaggtcgagagcctgtcggagatcgacaggtcttccttctccgtagtgatacataatggccaggttataccaggcagtggcgtcattgcattcagcggctttcgtaaaccattcaaaggcagcctgataatctttctcaacgccttgtccgtgtttatacatataaccgatgttgacgtaagcgccgacgctcccctgagcggcagccttcagataccagtacatcgcttgcttatagtcctggtccaccccttcgccagcgttataatcccatgcaatttgaaactgggcgtgccgattaccctgctgtgcgcttttcaaataccagaatgcggcgagtgtcttgttttgagcaacgccttttccgtcttcataaagatcggccagattgttttgcgcgtcactatggccttgtaatgcagcttgtttgtaccagaaaaatgccagcgcatagtcttttgcgactccgttgccatttctgtacatccacccaagattattttgcgcataagacat

SEQ ID NO: 140018 - DNA, 1020 bp, Homo sapiens
tcagacatccgcaaactgcgaattatcgcaggtccagcaagtccgtaatgcgtctgattccaagatatctcggagaaaccacttaaggggttcggcattgaaggctaaaactggtttctcaaagtgtcgccggtgaaattccgattcctcgtgtccactggctgcctcttcatcacgagttacttcctgatcggtaaaccagttgctggcattctcgaagggctgactcactggctgcagaccatggggactgcgaatgcggttctgctgggggcgatcctcggtggcatgatgtgtactgacatgggcggtccggtaaacaaagcagcgtacgcattcggtgtgggtctgctgagtactcaaacctatggcccgatggcggcgattatggcggcaggtatggtgccaccgctggcaatgggtctggcaacaatggtggcgcgtcgcaaattcgacaaagcgcagcaggaaggtggcaaagccgctctggtattgggactgtgcttcatttcggaaggtgcaattccgtttgctgctcgtgatccgatgcgtgtgctgccgtgctgtatcgtgggtggggcgctgactggcgcaatctcaatggcgattggtgcgaaactgatggcaccgcacggtggtctgtttgttctgctgatccctggcgctattacgccggtattgggttacctggtagcaattattgccggtacgctggtggcgggtttggcctatgccttcctgaaacgtccggaaggggacgcaataacgaacgccccgtaataaaagggcggttaaaggctttaaatttcctgccctgtagcattggaaaaaacgccaaaaaatgatcggctcttagaaattactctcgcgacgcaaacccgtgttatcctttgggaaaaaagagacacgcgactctaaccgctctgtgttttgcgatactcgccatacgcagcgctcgggctgttatggtagacaatcagcccctcgaccagagaagaacgacacgctccgttaagatac

SEQ ID NO: 140019 - DNA, 1239 bp, Homo sapiens
ctaaattacacataagaagccgcccccttcttggaggtctgctctgcttccggcggcaggcgtgttttcacgcaggtacatgcctgcattgtgcgagtaacactgggcttcgtaaagaatgagggctgaggcaacggaaacattcagcgactgcaccatgccgatcatcggaatgatgatgtcctgatccgccagggccaatgcttcctgcgtgatgcccgttttctcctgtcccatcaaaatgcaggtcgggcgagtgtaatcaatttcgcggaaatcgacagcgttatcagaaagatgggttgccagaatctgcatgccctggcctttgagatgagcgacggcatcgccaatggtgcggtgtgttttcacctgtacccagctgttactacccgccgctgccgaagccatggtgcgcatgcggctaccaggccagacggcgtgaacttcatgtacgccaacggcatctgcggtacgaataatcgcagaaacgttatgaggtttgtggaccagtgaagatgaactgggtgcccccgtcccgctgaaatcgttgctgtcgtgctttccactcagcactctgaagagatcgaccagaaatcgctgcaagaagcggtaatggaagagatcatcaagccaattctgcccgctgaatggctgacttctgccaccaaattcttcatcaacccgaccggtcgtttcgttatcggtggcccaatgggtgactgcggtctgactggtcgtaaaattatcgttgatacctacggcggcatggcgcgtcacggtggcggtgcattctattctttcggcgtcatgcagaataaaaccagcaaaagcgaaattggcgctacgctcaaattgggtgatggcgtccagcacgttgttcagacagtcggctttgctggtggggccaggacgcgcgcagactaccttatgcacattcgggaagcgagcgcacacttcgtcaacatcacgctgagtatcggggtcgttggggtaggtgccaacaaagatatgatagttttcgtagtcgagcgtggtcgccgccagctcggccatattgccgatgacgcccgtttcattccacgccggaaccataatcgctaacggtttttcatctggtttatacagttcgcggtaactcattcgcgggtagcggcgataaacactcaacttgcgtttaatgcggcgtacccagtagacgacatcaataaaaaaatcgtccagcccgctgatgaacat

SEQ ID NO: 140020 - DNA, 714 bp, Homo sapiens
atgtctctaacgcgcatccgacgttaccgcaaccgtgcctttatgcgcgacaacaatcgatttcactatcgccaggccaataccgctaccttcaccttttcgctggcgggaggggtcaacgcgatagaaacggtcaaacaatcgcggtcagggttcctgcgtctgcttctgggtctgtctggtctgcatgtcggcgcgatctcgacctggattcgtgtctctgtatgtccagaggccagcgtgttgggggtgtccagcctcccggaggagtactatgccttgacaccttcgtttcaccgccccaaagctggcctggggctccagccggcagcgcgctccgctcggcatttcccgaagagccagatcgcggccggcgccagcgccaccgtccggtccacccgccagcccgcacagccgcgccgccgccgagcgtttcgtgagcggcgctccgaggatcaggaatggggcttcgggcgctgggcgcgctccgaacccggcgcacgtaagagcctgggagcgcccgagccgcccggctgcccggagccccatcgcctaggaccgggagatgctggaaatgcaaccgcctgttccccgaggagccgctgccccggggaccacctggcactgtgcgcacctggtcagcagcccccggagaagacggcgcccccaacgcccgacccgcgtggccgtggcagcgccacgcgagccctctag

SEQ ID NO: 140021 - DNA, 2856 bp, Homo sapiens
ctatatttgggggcaaaatccccatatctttatcctggactctagaagttgacatgatacactcgatctcggtacccgatttacatgagcacatttcaggcgtccggcaatgggcagcagctgcagatcgcgcggatcgtcattcaaaacatcaccggttagttttagcacgcttcggcgcagcgtgatgagctgcgcccgcgcttcgttaggatcgttttgtttactgatccatagcgattcattgctggaaaaggtgtggttatcgggcgcgtgtgggctatgaaacccgcgcgtcgcacgctgtagttccatatcgaggccacattcaccttcggttgttaacgccacgccaaccatattcccggcataggaaatggaaaacgaaggcaaatttttatcactgaaaaccggtttacctttcggcagggtgacgatttccggcaattcgccaatgccatacagcatgaacatcagttctgcgagtaaacctctggacgccagaaaacggctttgacgatgagggggaatgtttcgggcttcttgatgacactgggaggggagacgaacagaaatcagatgtccttccgttaaaatccctcgggcaaagtgagtcgccatttttcgctccatgcttaatggtccattatgaatacaagagtaatcatttactggaagccgtcgttcgcggtggtgcggacgttgtgcgtctgccgaaaaccgataccgctcaggatgttgcttccgagcgtttgatcggtatcgccctcggtgcagaagactatgtgcgcaacctgcgtacagaacgctccccggaaggaactgaactgctgttcgcacgctgttccattttgcaggccgcgcgctctgcgggtaaaactctgccgaggctgccagtttgaaggtgccgccctcttgcagataacgactcaggtcggcaagcgaagtgagtttatttttctctgccacatcctgacgcacggcgatagtccaggtgttatttgcaggcgcgggcgtcagccagattaacttgttgtgctccgaatcgagctttttgactttctcgtaaccttgctgcgcgtttttccacgctgcatcgttttcatctttaaagaagaaagcgccattgccggtatattccggatagatatccagttcaccggaagtaatcgccccgcgcaccacaggagtcgttccgagttgcactttattcaccgtcggtacgccgtggctttccagcacctgcaaaatgatattgccgagtagcgcaccttcggtatcgatttttgaaccgactttaacgggggaagccgcctgtagcggcaggctcacggctgccaacataaccagtgaacggcagctttcataataggcctgaatctccatcatgcgagtgcgatgacgctggtaacgacgccaggcatgtacgccattgtaaatggcgctacccagcatcgtcagtagcagcaatgtggtgctgagatagcgccacaggccggaacgatccgggatcggatgaaggccaatatgctgcgtaccattggcgtcagtgaagatttttgtgacgataccctcggcgttaaacggcgtatgcatcagcatttgtgccagtttctggaaagcgttccactgttcttgcggcgggtagtcgtaaagtgatgccgaaggccagggctgatcaacaaaatcgctgccttcgtcgctgacaatcaggaatccgccgggggccggactgtttagtgattgtgccgctcgcgccgtttcatgcgtgataaacggcgcggtggaggttgccaccaggttatccagcgattccgcactcaccgggcgtaataacacattcacgccatcgagcttcccggcgttggcgcgttttaccagcgcgtcccagtctttactgttgccgagattgaccagcgcatttttcagtcgcacacagtcatcatggcttcggcagcggcgggtagtaacagctgggtacaggtgaaaacacaccgcaccattggcgatgccgtcgctcatctcaaaggccagggcatgcagattctggcaacccatctttctgataacgctgtcgatttccgcgaaattgattacactcgcccgacctgcattttgatgggacaggagaaaacgggcatcacgcaggaagcattggccctggcggatcaggacatcatcattccgatgatcggcatggtgcagtcgctgaatgtttccaatgtaagtcatgctggtgaagtgcgtccattcgcgttcgaacggatacaccgggatctgaatcagatctttacgctcgaccagatagttgaacagacgcaattccatcggtgaaatcacatcttcggcgtcatgcagaataaaaccagcaaaagcgaaattggcgctacgctcaaattgggtgatggcgtccagcacgttgttcagacagtcggctttgctggtggggccaggacgcgcgcagactaccttatgcacattcgggaagcgagcgcacacttcgtcaacatcacgctgagtatcggggtcgttggggtaggtgccaacaaagatatgatagttttcgtagtcgagcgtggtcgccgccagctcggccatattgccgatgacgcccgtttcattccacgccggaaccataatcgctaacggtttttcatctggtttatacagttcgcggtaactcattcgcgggtagcggcgataaacactcaacttgcgtttaatgcggcgtacccagtagacgacatcaataaaaaaatcgtccagcccgctgatgaacatgatgaccgctaacgttatcgcgtttgtcgttaaacgatcgtcatcttgaaaagccgggacaccacgagtccgcat

SEQ ID NO: 140022 - DNA, 753 bp, Homo sapiens
atgtggaggaagccagtctttatggagaaacacaaagatgactcagggagcatccgggaagcgggaagtccgctcagttgtagagttcttctcgttcatcgttcttatcgttctacagtcgcgcagttcgttcagcagcagtcagtcgtcagctctcttcagttttgttcgtcatcgtctcctcgtgccagagttctcgtgcttagttctcgtcgtctgcgcgtcgacgtcttcgctctgtctctcagcgacccgtcgtctgttctttctcttcatgtgttcttctcgcagcgtcttgtgctcgttcagcgtacagcgtacgcattcggtgtgggtctgctgagtactcaaacctatggcccgatggcggcgattatggcggcaggtatggtgccaccgctggcaatgggtctggcaacaatggtggcgcgtcgcaaattcgacaaagcgcagcaggaaggtggcaaagccgctctggtattgggactgtgcttcatttcggaaggtgcaattccgtttgctgctcgtgatccgatgcgtgtgctgccgtgctgtatcgtgggtggggcgctgactggcgcaatctcaatggcgattggtgcgaaactgatggcaccgcacggtggtctgtttgttctgctgatccctggcgctattacgccggtattgggttacctggtagcaattattgccggtacgctggtggcgggtttggcctatgccttcctgaaacgtccggaagtggaccagtag

SEQ ID NO: 140023 - DNA, 1068 bp, Homo sapiens
atgaaggttttagagaagaggaacaatgcttcctctgagcctgaagaaaagaatgaaataagggctgcaagggaacatgcaggtttcacactacaggagcttgtctgtcttggtgcaagtgggagaaaagtacaaggtgaagcagcaaatgctgaggaagaagttgcagcaggtgaactggataatatagctaagataacaaatgaaggtagctacactgaacaacagattttcaatgaagggtacatgtggctttccacattaatgaaaataaaagaaaataaaatatcctgttcctgggccacacaatctcatttccagggctcaatagatgcgggtgaactggaacacctgacgcctgaacgggtatggaaagagacggaaagcgccctcaccacccgcaatccacaggtgttcttccaggtactgcgcgattgcggcgcactgcgcgttttattcccggaaattgacgcactgtttggcgttccggcccctgccaagtggcatccggaaatcgatacgggtattcataccttaatgacgctctcaatggcggcgatgctgagtccgcaggtcgatgtccgtttcgcaactttatgccacgatctcggtaaagggctgacgccgccagaactctggccgcgtcatcatggtcatggcccggcgggtgttaagttagtggaacaactatgccagcgtctgcgcgtgccaaatgaaattcgcgatttagccagactggtggctgagtttcacgatctcatccacaccttcccaatgctgaacccaaaaaccatcgtcaaattatttgattccatcgatgcctggcgtaaaccgcagcgtgtcgagcaactggcgctgaccagcgaggctgacgtgcgcggcagaaccggttttgaatcagcggactacccgcaaggccgctggttgcgcgaagcctgggaagtggcgcagtcagtgccgacaaaagccgtcgttgaagcgggatttaaaggtgtggagattcgcgaggagctgacccgacggcggattgcggcgggactgcgaggcatgccaactgccattcaatga

SEQ ID NO: 140024 - DNA, 2691 bp, Homo sapiens; identical to SEQ ID NO: 138482

SEQ ID NO: 140025 - DNA, 2823 bp, Homo sapiens
ttagttgactgtcagctgtccttgctccaggatgctgtttttgacaacggatgttttattgcctttgatgttcattaagaagcttggcgcaaatgttgcctttttatcctcgaagaagcctctgtttgtcatgtagcttgtgataaccacattgttgcctttggcttgcggcactgcgaagtgagagtaagtgaatgtcacatcgtttggatcaagacccatttgcagcacaagccctgttttgttcagcggcttgtaagggccggttaaagagtttgatacataaccaagcatgtaaatatcgtttgagttaataccatcgatcgtcatttttgaaccgcgtgaatcagtgaacaagtaccatttgccgttcattttgaaaacattcgcgcgctcgatttcatcagttaccgtgtttgaagtgatcagcggcttcattacttttttcaatgtgtaatcattatttaactctatgataccgagggcgccgttcgctaactcagcatcgcgttttttagcgctctgctgaagcttctggctttctttacggaagaagttcgtgccgccgccgtagtacgctttgttaaataaagattcttcgccttggtatccgttttctgttcccgtgttggcttccaatacaaggtatttatggcctttgtcttcacgtagtgagggtctctccacgtatggttgtcgccggatgtataatttccgcggtccctcttccagctcaccgtctttcattgccatacggaactccggatgagcattcatcaggcgggcaagaatgtgaataaaggccggataaaacttgtgcttatttttctttacggtctttaaaaaggccgtaatatccagctgaacggtcatcagctctgtagcaacgataacaatcaccaaaccaacaagcaccggtaccgaggtgcgttttacgacttcaaacggcgagatcttcgccatcccggcaaccgcaacgactacgccagaaacgggcgaaagggtacggccaaggtttgacgcctgcagcatcgggatagtcaaatacgccgggttaatgccggaagagtgcgccagtttcgggatcatctcaacaaacgcataaaacggcgcattgcctgaaccggtcgtgactgccgccagcattgtcagaatcaccaataccagcatcaggatgatactcgccgaaccaaacgaggtagcgatagaaatcagactttgaataaagccgatggtgctaagcccctgagcgaataccccagcggcaaccagcagcatcaccacgttagcaaacgcatctgccatcccgcgataagccacttccagaccagagaaaactttctgggtattaaagctgcggaggaactccagaatggaggcaatcagcatacaaatcaccagaatagtgatgatgtgtaattgcggaccccatttaccgtcaaaaatcagtacaccgatgatcggcgtgaacggcaaaatggcataaaacgcaggagcagtggtggtgatttcactgacatctaacatttcatgagagatgtgctcttttttatccagataacgttgccagaagaagtgggcgatcgccatgccgataattgcagcaattgagataggcagcgtcgttttgaaggcgaagtcaatcagcgacatttcggaagcttgcgccgccagcaccacatccccatcaacgcccattttaatggcatggtgatggcagtacgtcacgatgcggatcgcgtttgtggattccagttccatccggaatccattctcaccacccagggcgctcgcctgctggaacaaacgctggcccgaacgagatcgccggggcagcaaccgcgtctctggaaaacgcagcgccgttcccgcgccccgattatcctgttgctgatatcggcggtactggcggtgaccggcagcaacagtattaatatttctaccgccagtgcgtttgtcgccgggcgccctgtgctctaaagcgctgcggtcacgctggcagatttgatcaagctcatcaatgatataccgtagattcgggctgatttcctggacttctttataaccctgacccacaccatcagcgacgaccgttttacgctgacgcggatatttaaacttaacgctcttggcgaaaaactcgcctttgtctttctggaaatagattttcagaatatcgttgttggcttcctgccggaggctgtaacgatcaatttcttcaggattggtaatacccagacttttcagattgtcgtacatagcgttactcgatgactcatcgtcattgtgctctaaagcgagcaggaagcccgccgccgctgccattaatccagcaatcggcaggcaggtccagaagcccaagccgtaatagtgattgagcagcgcaaaagtgtaagcgccgatggcgtaaaaaccgccgtaccccagcaccagcagaccagaaagaccaacaaccacgttcagcccgagaccgaggataatgtagatcatggtcagggtggcaatatccaccgtcccgcgtgaaaccataaacggccacgccaccgcaagcaccaacagcgccacgaggaacagtttctgcttcaccgtggagccatcaatggcgggcagaataaacttcggtccggaaacgcttttcaaccctttctggaaagccggtcgcaaaagctggaagaaaaagaccaccgccgtgccgataaacacccactgccaacggacatccgaagccgtgtcgaccaccagtttggtgccatccagctccagttgcacgcccataaagacgcccgccagcacaaagaacatcgcggcagagagcagcgccat

SEQ ID NO: 140026 - DNA, 1449 bp, Homo sapiens
atggatctggcgaaatttgctggtaaaccgatgtatcgtacctctaccggtctggcgctgaagaaaaccgcgcaggaactggataaagcggttgctgaagcaacgccgtatgaaccggcgggcaaagctcaaacggcgaccactgaaagtaagaaagagagtgcaggcgcataccgtcacttgctgacgggcgtttcttacatgctgccgatggtcgttgcaggtggtctgtgtatcgcgctttcttttgcttttggtatcgaagcgtttaaagagccgggtacgttggctgcggcgctgatgcagattggtggtggttcagcctttgcgctgatggtgccggtactggcaggttatattgccttttccattgccgatcgtccgggcctcactccgggtctgattggcggtatgctggcggtcagcaccggttctggcttcattggtggtattattgcgggcttcctggctggttacattgcgaagttaatcagtacgcaattgaaactgccacagagtatggaggcgctgaaaccgatcctgatcattccgctaatttccagtctggtggtcggtctggcgatgatctacctgatcggtaaaccagttgctggcattctcgaagggctgactcactggctgcagaccatggggactgcgaatgcggttctgctgggggcgatcctcggtggcatgatgtgtactgacatgggcggcccggtaaacaagccgcgtacgcatccggtgtgggtgcgcacgcggggcaggcgctgtacctgccagctgtttgcgcaggctggctacgtcggtttcggtagtcaccatcgccatatgctcgcgcttttgcgtcacgctaatcttctcaacgccttgcggcaggttattcaccagaatccggttggcacgatcgaccgcttcacgagagtcacgctgaatttctggcgcgtcaaagcccgcgttatacttcagggcgggctgctgtggttttctgggggtccactctggaccctcatcacctcagtctctcctgcccctggaggtatcaccagtgaaggctgcgaaacagcaaagatggcggcctgttccttcctctgggagcaccagtccaaggaggaggtgtctggagacccctgttgggaggtcttgcccagtcaggagaaacagaatcagggactgcttaaagaagcagtctggctgccctttggcagaacacacgcacccgtggtgggcccccccacgcccgctagcccttcctcaaccagccgcgcccttgagaaacggagcagcaacggaagctccggccacaggggctcactcaagcacagatacccgaattccctctgcgctgcaggtttggaaagcccccttggattcctggctggggacaatgatgacctggaccctggccagaagagccctggccctccagcaaggcagcacctgctctga

SEQ ID NO: 140027 - DNA, 2025 bp, Homo sapiens
atgcgtggagaattttatcagcagttaaccaacgatctggaaaccgcacgggcggaagggttgtttaaagaagagcgcattattacgtctgcgcagcaagcagatatcactgtggctgatggaagccacgtcattaacttttgtgccaacaactatctcgggctggcgaatcatcctgatctgattgcggcggcaaaggcgggaatggattctcacggtttcggcatggcttcggacagccataaagagcttgaacaaaaactggcggccttcctggggatggaagatgcgattctctactcttcctgctttgatgctaacggtggcctgtttgaaacgcttctgggtgcggaagacgccattatctccgacgcactgaaccacgcgtctattattgatggtgtgcgtctgtgcaaagctaaacgctatcgctatgccaacaaagatatgcaggagctggaacaccatctgatcgtctttatcgtactgttggcggtacataaaggtcacgcgccgatccgcagcgtcagccgtcaaatccagaatattacctcgaaagatctcgacgttcgcctcgacccgcagaccgtgcccattgagctggaacagctggtactgtcgttcaaccatatgatcgagcgtattgaggatgtctttacccgccagtccaatttctcagcggatatcgctcacgaaattcgcacaccaattacgaatctcataacgcaaaccgaaatcgccctcagccagtcgcgcagccagaaggagctggaagatgtgctctactctaatctcgaagagctgacgcgaatggcgaaaatggtcagcgatatgctgtttctcgctcaggccgataacaaccagctaatccccgaaaagaaaatgctcaacctggcggatgaagtcggcaaagtgttcgattttttcgaggcgttagcggaagatcgcggcgtggagttgcggtttgttggcgacaagtgtcaggtcgcgggcgatccgctgatgctgcgtcgggcgctaagcaacctgctttcgaacgccctgcgttatacgccaaccggagagacaattgtagtgcgctgtcagacggtcgatcacctggtgcaagttatcgtcgaaaaccccggtacgcccattgcgcccgagcacttaccgcgattgtttgaccgtttctatcgcgttgacccctcccgccagcgaaaaggtgaagcggcgaccggttccggcggtgaaatccgcgatgaaggtgccaccgggcgcggcgcaaagccgaaagcgggtctggttggtttctccgtttccaacctgcgaattcctggcttcgaacagccgtgggaagaagatttcggtaagcctgagcgcattgtcaccgcgctggacatcatgaccgaaggcccgctgggcggcgcggcgtttaacaacgaatttggtcgtccggcactgaacggctacttccgtacttatgaagaaaaagtgaacagccacaacggcgaagagctgcgcggttatcacaaaccgatcatgctggcgggcgggatcggcaacattcgcgccgatcacgtacaaaaaggcgagatcaacgtcggtgcgaagctggtcgttctcggcggcccggcaatgaacatcggtcttggcggtggtgcagcgtcttctatggcgtctggtcagtctgatgccgacctcgactttgcttccgtacagcgcgacaacccggagatggagcgtcgctgccaggaagtgatcgaccgttgctggcagcttggtgatgccaacccaatcctgtttatccacgacgttggcgctggcggtctttctaacgccatgccggaactggtgagcgacggcgggcgcggcggtaaatttgaactgcgcgagattctaagcgacgaaccgggcatgagcccgctggaaatctggtgtaacgaatcccaggaacgctacgtgctggcggttgctgccgatcattaccgctgtatgacgaaactgtgtacgcgtgagcgcgcacccctacgcggggattggtga

SEQ ID NO: 140028 - DNA, 3555 bp, Homo sapiens
atgaacgacgtttccttcatgatttctggagatgcaatgaagattattacttgctataagtgcgtgcctgatgaacaggatattgcggtcaataatgctgatggttcattagacttcagcaaagccgatgccaaaataagccaatacgatctcaacgctattgaagcggcttgccagctaaagcacaggcagcagaggcgcagttccgtcgcggggatccctgatgctgcttcggcgctaaacaccggctttcgaccccctgcgttatacgccacccggagagacaattgtagtgcgctgtcagacggtcgatcacctggtgcaagttatcgtcgaaaaccccgcgggctggacgatttttttattgatgtcgtctactgggtacgccgcattaaacgcaagttgagtgtttatcgccgctacccgcgaatgagttaccgcgaactgtataaaccagatgaaaaaccgttagcgattatggttccggcgtggaatgaaacgggcgtcatcggcaatatggccgagctggcggcgaccacgctcgactacgaaaactatcatatctttgttggcacctaccccaacgaccccgatactcagcgtgatgttgacgaagtgtgcgctcgcttcccgaatgtgcataaggtagtctgcgcgcgtcctggccccaccagcaaagccgactgtctgaacaacgtgctggacgccatcacccaatttgagcgtagcgccaatttcgcttttgctggttttattctgcatgacgccgaagatgtgatttcaccgatggaattgcgtctgttcaactatctggtcgagcgtaaagatctgattcagatcccggtgtatccgttcgaacgcgaatggacgcacttcaccagcatgacttacattgatgagttttcagagctgcatggcaaagatgttccggtgcgtgaagccctcgccggacaagtgcccagcgccagggtcggacctgtttcagccgcgcgccgtgaaccggctgtagctgaggatattttgatatcttctcatacgatactgccatccctggtcagagtgcagaacaggatgctcgtgaggattaagctttttgaatgcctgatcgagcatattctcaaccatgttcatcactggtctttccgaaaggctgtaagaaataacttcgttgttgaagagatctattactggagacaaatacagcttgcgcccattgactgcaaattcagtaacatcggtaacccacttctcgtttggccgcgtagccttgaaatctctttggagaacattaggggcggtttgccctacctctcctctgtaagagcggtatcgcttgaccttaatcgctgctttaagatcatctcggcacgttttggtgtcccccgaacccaggtcaggacatgggttgccctctatgaaaaacatggagaaaaaggtttaattcccaaacctaaaggcgttagtgctgatccagagttgcgtattaaggtcgtgaaagctgtgatcgagcagcacatgtcccttaatcaggctgctgctcactttatgcttgctggtagtggttctgtagccaggtggctgaaggtctatgaagagcgcggagaagctggtttacgcgcgctcaagattggcaccaaaagaaacattgcaatatcagttgatccagaaaaagcggcatcagcattggagctgtcaaaagaccgacgcattgaggatcttgaaaggcaagttcgatttcttgaaacgcggcttatgtatctaaaaaagctgaaagccttagctcatcccacgaaaaattcaatcatccgttcgggcaactggcgtttatcgcgaccacgctggttgggctgtacccgattgctcgatcaggcattacggttgatcaaatccggcagctacttcgccattgaaaccttaatgagcgtagccgctattggtgcactgtttattggcgcaacggctgaagctgcgatggtgttgctgctgtttttgattggtgaacgactggaaggctgggccgccagccgcgcgcgtcagggcgttagcgcgttaatggcgctgaaaccagaaaccgccacgcgcctgcgtaagggtgagcgggaagaggtggcgattaacagcctgcgccctggcgatgtgattgaagtcgccgcaggtgggcgtttgcctgccgacggtaaactgctctcaccgtttgccagttttgatgaaagcgccctgaccggcgaatccattccggtggagcgcgcaacgggcgataaagtccctgctggtgccaccagcgtagaccgtctggtgacgttggaagtgctgtcagaaccgggagccagcgccattgaccggattctgaaactgatcgaagaagccgaagagcgtcgcgctcccattgagcggtttatcgaccgtttcagccgtatctatacgcccgcgattatggccgtcgctctgctggtgacgctggtgccaccgctgctgtttgccgccagctggcaggagtggatttataaagggctgacgctgctgctgattggctgcccgtgtgcgttagttatctcaacgcctgcggcgattacctccgggctggcggcggcagcgcgtcgtggggcgttgattaaaggcggagcggcgctggaacagctgggtcgtgttactcaggtggcgtttgataaaaccggtacgctgaccgtcggtaaaccgcgcgttaccgcgattcatccggcaacgggtattagtgaatctgaactgctgacactggcggcggcggtcgagcaaggcgcgacgcatccactggcgcaagccatcgtacgcgaagcacaggttgctgaactcgccattcccaccgccgaatcacagcgggcgctggtcgggtctggcattgaagcgcaggttaacggtgagcgcgtagtgatttgcgctgcacggaacatcccgctgatggcattgtggatacagacgggtcacaaaggcaacggcttccggatcgtccgcgttaacgtggaaaatcggggcctgaaccatcttaccgatatcagtacagtacggcgtagaacgggcatccagcggattagaggtggtgaaaccaacctggttgttgataacgatacgtaccgtaccgccaacttcataaccacgcgctttcgacatgttcagggtttcctgaaccacgccctgcccggtcactgcggcgtcaccgtggatggtgattggcagcactttgttgctgctcggctcatcaagtctgtccagacgggcacgaacagaaccgataactaccgggcttacaatctcaaggtgagacgggttaaacgccagcgccaggtgcaccaggccgccatcggtctggaagtcagacgagaagcccatgtggtatttcacgtcacccgtgccgaggtgttctttatgtttaccggcgaactcgtcgaacaagtcttgcggttttttacccagcacgttcaccagcacgttcagacgaccacggtgcgccatcccgagaaccacttcgcgggtgccgctgttgccagcgtggcggatcatctctttaagcatcgggattaa

SEQ ID NO: 140029 - DNA, 826 bp, Homo sapiens
tagctgcagcagcagttggcgcaactgagatccagctgcgcgttgtcagtcagggggatggtaagggcctcattgaacggggcgttggccagagccatcagctgctgtcgagtttgttcgctgacactggcgttatcttcactctcttccagctgtattttccggatgcgtactgtccatcgtccagccagataaaagcgctgccgattcgctgatcgtcctggcgaccctggccgacaaggaacgccagccgccacgacgtttggtggaatgtcttttgtgacgatactacccgcgccaataccagaattatccccgatggtgacgcctggattaataaccacatgacttccgatccagacgttattgccaatcgttatcggaaaagagtacatctcgccgttttttctcaattcatggtgtacagggtgtcccgtaacggaaagagtaacgttgggtgcaatcagtacgttatcaccgattgttaccgtgtagtcatcgacaatggttaaattgaaatttgcataaaaattgcggcctatatggatgttggaaccgtaagagaaatagacaggcggttctacccaggcgttttcccctaccgtggcaaacatttctttaatcaggctttctcttttttcaacttctgatggatgcgagtgattaaacctcatacatttaacgttttcccacgaagcttttttgttggttagtttttgaatttttgggtccggggtagggggtgataaaggttgggtaacggccgtcatcaccgcccccctcgcccctcttttgtttcccatgttgacatgcgccgctgttcgac

SEQ ID NO: 140030 - DNA, 4128 bp, Homo sapiens
atgaccgacaagcaccagcagcaccgatatgttgcggccccagggccgtttgttggcgacaagtgtcaggtcgcgggcgatccgctgatgctgcgtcgggcgctaagcaacctgctttcgaacgccctgcgttatacgccaaccggagagacaattgtagtgcgctgtcagacggtcgatcacctggtgcaagttatcgtcgaaaaccccggtacgcccattgcgcccgagcacttaccgcgattgtttgaccgtttctatcgcgttgacccctcccgccagcgaaaaggtgaaggtagcggtattggcctggcgatagtgaaatcgattgttgtcgcgcataaaggcacggttgcggtaacgtcggatgcgcgggggacaagcgggctggacgatttttttattgatgtcgtctactgggtacgccgcattaaacgcaagttgagtgtttatcgccgcataccgcgaatgagttaccgcgaactgtataaaccagatgaacaaccgttagcgattatggttccggcgtggaatgaacgggcgtcatcggcaatatggcgagctggggggaccacgctcgatacgaaatttctttttgtgggcctaccaggacccatactcgggagttgcaaggtgccgttcgagttcttggaggtggcgtgtcccccgagcgggggtccggtgggccccccatggcggcgaccatgtcgtggcgcagctgctgccatttgtgcctccccggcggcgattattctcgcaccgacttcaggggatgtggtgctggcggcgcaagcttccgaaatgtcgctgattgacttcgccttcaaaacgacgctgcctatctcaattgctgcaattatcggcatggcgatcgcccacttcttctggcaacgttatctggataaaaaagagcacatctctcatgaaatgttagatgtcagtgaaatcaccaccactgctcctgcgttttatgccattttgccgttcacgccgatcatcggtgtactgatttttgacggtaaatggggtccgcaattacacatcatcactattctggtgatttgtatgctgattgcctccattctggagttcctccgcagctttaatacccagaaagttttctctggtctggaagtggcttatcgcgggatggcagatgcgtttgctaacgtggtgatgctgctggttgccgctggggtattcgctcaggggcttagcaccatcggctttattcaaagtctgatttctatcgctacctcgtttggttcggcgagtatcatcctgatgctggtattggtgattctgacaatgctggcggcagtcacgaccggttcaggcaatgcgccgttttatgcgtttgttgagatgatcccgaaactggcgcactcttccggcattaacccggcgtatttgactatcccgatgctgcaggcgttcaacccttgggcgtacccttttcgcccggttcctggcgtaaaccgttgccgggttgcccgggaatgggggaagaatttccgccgtttgaaagtccgtaaaaggcacccccggaaccgggggtgggagggtcggggaaagtatccgttgtcatgtctgtcactcgcgacggaccatgaattcactatttgtcgaagacgcaacaacaggtgcaattatgtcattgataaatatcccacgcgcattaatactccccttaatcgtagacggattatctgcaaagcgaacatgcgtatcaccatagtcgccaaagccaatccccggcgagacacaaaccttcgcttcgttaaggagcttcttgcaaattccagcgatcccatggccgcatatggttccgggattttcgcccagacatacatcgaagccttcggcatttcaaccatccagcccgcttcatgcagccctttaaccaatacatcacggcggcgtttgtactgttcggcaatgtcgcggcacgcactgttgatcgccctccagcgccgcaatcgccgccacctgcaacggcgtaaaggtgccctatcaaaaatcgaaaatttggcggtaatgtcaacgccgaacgtatcgctttactggcgatgtaccacgatggcctcagaagtgctcaccggcgatgctgccctgactccggtgaaatacttcaattcgcaaatcgctcaggagtacaaggctattgaaaaaatcgctcagcaaaaactggtcgatatggttccggaagagctgcgggatatctttgcgccgttaattgacgagcatgcatatagcgatgaagacccactcgctggtggaaacaggcagatgcactgtggccgcaatttttatgcaaatttcaatttaaccattgtcgatgactacacggtaacaatcggtgataacgtactgattgcacccaacgttactctttccgttacgggacaccctgtacaccatgaattgagaaaaaacggcgagatgtactcttttccgataacgattggcaataacgtctggatcggaagtcatgtggttattaatccaggcgtcaccatcggggataattctgttattggcgcgggtagtatcgtcacaaaagacattccaccaaacgtcgtggcggctggcgttccttgtcgggttattcgcgaaataaacgaccgggataagcactattatttcaaagattataaagttgaatccgtcatcaatgccagtaaggaaccgctgtactgcgctgctggcacctatctctatatagatatatcgggtaaccaggctatcaggtctggcgtataccgccgcttaatcagaccgtatattagacaccctgcgtccacgcgcgggtgtataccacgcgaaccggagtggttgttcttggtgattgtggcggcagatatcgaagtggatctggcgaaatttgctggtaaaccgatgtatcgtacctctaccggtctggcgctgaagaaaaccgcgcaggaactggataaagcggttgctgaagcaacgccgtatgaaccggcgggcaaagctcaaacggcgaccactgaaagtaagaaagagagtgcaggcgcataccgtcacttgctgacgggcgtttcttacatgctgccgatggtcgttgcaggtggtctgtgtatcgcgctttcttttgctttgggtatcgaagcgtttaaagagccgggtacgttggctgcggcgctgatgcagattggtggtggttcagcctttgcgctgatggtgccggtactggcaggttatattgccttttccattgccgatcgtccgggcctcactccgggtctgattggcggtatgctggcggtcagcaccggttctggcttcattggtggtattattgcgggcttcctggctggttacattgcgaagttaatcagtacgcaattgaaactgccacagagtatggaggcgctgaaaccgatcctgatcattccgctaatttccagtctggtggtcggtctggcgatgatctacctgatcggtaaaccagttgctggcattctcgaagggctgactcactggctgcagaccatggggactgcgaatgcggttctgctgggggcgatcctcggtggcatgatgtgtactgacatgggcggtccggtaaacaaagcagcggtacgcatttcggtatggtgccaccgctggcaatgggtctggcaacaatggtggcgcgtcgcaaattcgacaaagcgcagcaggaaggtggcaaagccgctctggtattgggactgtgcttcatttcggaaggtgcaattccgtttgctgctcgtgatccgatgcgtgtgctgccgtgctgtatcagaagtgtgcacagaatccaagtacgtgagttcctgcctgctctttggcttggcaattcggcgatccccccccttcggggttgccgtggcagacacccggggccacattggcagaaaagtacaaggtgaagcagcaaatgctgaggaagaagttgcagcaggtgaactggataatatagctaagataacaaatgtagtggtgggcgctttgagagggcgaaagcgtgtggtgttggaaagcgtgtgggtggagaatgccgtgccttgcgtagttgtgggtggccccaactgtggtgaggccccttgcgtggtgtgccgtgtgttgggtgttgtgggctaa

SEQ ID NO: 140031 - DNA, 387 bp, Homo sapiens
tgggagatatgcagcgcctgaactcgctgttttgttggtggcttacagtgtgctggaacagccggatgaagatgaaggacgggacagtattaatattgtgaatccttccggtagaccaataatcgtcagttctggcgcgacgccagcagttcgcgaatacgctgctcacgggtttcacctttatggccttcggcagcgcgttggtgaagtgcgggttgatttgcagcgggaacagatttacgcatcgaaaccttgcggatcgacaatcggcatatcgttggtggtacgatagttgggcaagcaaggttagcgcctgcgctccagccaatatacagagcccacgtttaaccacgtcagtaattggtgccagcagcccgcgctcgcggc

SEQ ID NO: 140032 - DNA, 181 bp, Homo sapiens
cagcgctcgtcgtttgcgtccagcaaacatcgttttcgcattcttaatcgccgctattcccacgcccactcgatcgctgggagatatgcagcgcctgaactcgctgttttgttggtggcttacagtgtgctggaacagccggatgaagatgaaggacgggacagtattaatattgtgaatc

SEQ ID NO: 140033 - DNA, 2784 bp, Homo sapiens
atggaataccagggggagctgaacacgtgggctcacacgctacagagggagacccgtgtgatgctatgtgtcccatgcactgaaaagatgaatgcttgtgctgggtcactgagaaactcctctggcacagcaaaatcgcagattcggaattggaggcgagtgggtgctaagaaactgagcagcagcagggaaactcagactcagggagtggaggggcttgggggtgatgattatcttttaggttacctgcttttgcttacttctgtatgtaggccaagccaatttactccggcctcccgaaatgctagtggcactccagtgtttgtgtttggcccgcaactgtggcgcttccatggctggctccgttgccgcggagggggtgatgagaccgttatccgacttgttttccgtgctgtgaaagttcacctccatgacgttgcaacattatctgacgtggctctcctgaagcggctgcggaatgccgccgactggtttggcatacttgccgcacaaacacttgctgtacgcgccgcagttacgggttgtacaagcggaaagagattgcgtcttgtcgatggaacagcaatcagtgcgcccgggggcggcagcgctgaatggcgactacatatgggatatgatcctcatacctgtcagttcactgattttgagctaaccgacagcagagacgctgaacggctggaccgatttgcgcaaacggcagacgagatacgcattgctgaccggggattcggttcgcgtcccgaatgtatccgctcacttgcttttggagaagctgattatatcgtccgggttcactggcgaggattgcgctggttaactgcagaaggaatgcgctttgacatgatgggttttctgcgcgggctggattgcggaaaaacacctgactacccaaagggacctaacacagaccctcacataccacaaccaggcaccgagcccaaggtggccttaccaggtaaactactcatggcacagcccaaggtcaatactaaatcaactgccattggttggctcctggtggtgtatggtttgcctggggaggtggttcgcatcgattatggtaaaaccgtgtacaccctggggtctggtcttggtttgggccaagacaagcctaatgctttaaatgtgtttggacgttcttcgtccacgaaattacgtaaagcgaagagcccgtttgtcccaatttgcgaagtattctggggccaaggaactaacactaagctgtgcctgtggtggaaattggaagcccaagattacgagaagattgcccccaagtctgtgtccgcagcggcagtttgttcatcagctgtaactggacgaactcattttcattctaaggagtggttaaaagttgttgctaatgaccccacagcggtgagaaaactcgaacactactggagccaggatatatttagcgatcgagaagccagctacatgtcgcatgaaaaccacttcggctacgcggcctgcgccgcccttttgcgcgaacaaggactggcagccattccgcgcctcgcgatgtatgcccataaagaagattgcggcagtctgctggtacaaattaaccatccgcaagtcatccgcaccttgctactggtggctgataaaaacaaacccagcctgcaacgtgtagctaaataccataaaaacttcccccatgcgacgctcgccgcactggcagaactgctggcgttaacagaaccaccagcccgccctggttatccaatcatcgaagacaaaaagctgcctgcacagcaaaaagcacgcgatgaatactggcgtacgctgttacaaacgctgatggcatcgcagccacaactggcagcagaagtgatgccgtggttaagtactcaaccccagtcagtgctgaagagttatttatcggcaccgcccaaaccggttattgatggcaccgataacagcaatctgccagaaatcctcgtttcaccaccgtggcgtagtaagaaaaaaatgacagctccacgtcttgatttggcaccgctcgaattaactccgcaagtttactggcaaccaggcgaacaagagaggcttgccgccactgagcctgcccgttatttcagcacggaatctcttgcgcaacgcatggaacaaaaaagtggacgagttgtattacaggaactgggttttggggatgatgtatggctgtttctgaattatatactccccggaaaactggatgctgcacgcaattcactctttgttcagtggcattactaccaggggcgggttgaagagatcctgaatggctggaactccccggaagcacaattagcagaacaggcgctccgcagcggtcacatagaagcgttaattaacatatgggaaaatgacaactactcacattatcgtccggaaaagagtgtctggaacctgtatttattggcacagttgccgcgtgagatggctttgaccttctggctgcgtatcaatgagaaaaagcatctgttcgcgggtgaggactattttctcagtatcctcggattggatgcgctaccaggtctgctgttggctttttcacatcgtccaaaagaaacatttccgttaattttaaattttggcgcaacagaactggcgctgcctgttgcccacgtctggcgacgtttcgcggcgcagcgtgatctggctcgccagtggattttacaatggccggacatacggctagtgcacttatccctcttgtcttaccaacccagcgataatagcgagggtccgggtttttattctttactgacaggagcttga

SEQ ID NO: 140034 - DNA, 2554 bp, Homo sapiens
atgcgctcggacccggatacttcagttaatgaaattgagacgaaactttctgccctactgggtagtgagaccactggtgaaatcctttttgacctcttgtgcgctaacggtccagagtggaaccgcttcgttacgctggaaatgaaatatggccggatcatgctggatacggccaaaattattgatgagcaggacgttccgacacatatcctgagcaaactgacttttactttacgtaatcatcctgaaggagtggtgatgaaaaattttgaagttctgcagccactacagaactccctttccggtctaccgctatgggtatctgaacgtatattgcagcagataaatcagttaacccactacgagccagtgatcggcatcatgggtaaaactggggcgggaaagagtagcctttgcaatgccctgtttgccggtgaagtatcgccggtcagcgatgtagcggcctgtacacgtgatcctttacgctttcgcctgcagattggagaacactttatgaccatcgtggatctgcccggcgtgggcgaaagtggcgttcgcgataccgagtatgctgcgctgtaccgcgaacaacttccccggctcgacctgattctgtggctgattaaggctgatgatcgggcactggcgactgatgagcatttttaccgtcaggtgattggcgaagcataccggcataagatgctgtttgttatcagccagtcagacaaagctgaacccaccagcggtggaaatatcctttccacagagcagaaacaaaatatcagccgcaaaatctgcctgctgcatgagctattccagcccgtgcatccggtgtgtgccgtgtcggttcgcctgcacccggtagtagcgctactgcaacaattccgcacggatgatgagcggactcaccggtaccattacgacagtcagcaccggctggtcgactacacgcggacacaatatgaagagccgctggtcgaaagtcgctatctttacgacccgctgggccgcagggtggcaaaacgggtgtggcggcgtgaacgggacctgacgggctggatgtcgctgtcacggaaaccgcaagtgacctggtacggctgggacggcgaccggctgaccacgatacagaacgacaggagccgcatccagacgatttatcagccggggagcttcacgccactcatcagggtcgaaactgccaccggtgagctggcgaaaacgcagcgccgcagcctggcggatgcccttcagcagtccggcggcgaagacggtggcagtgtggtgttcccgccggtgctggtgcagatgctcgaccggctggaaagtgaaatcctggctgaccgggtgagtgaggaaagccgccgctggctggcatcgtgcggcctgaccgtggagcagatgcaaaaccagatggacccgcacggaagggacaacagcgtggtaccagaatacgatgaatggggtaacctgctgaatgaagagaacccgcatcagctgcagcagcttatccgcctgccggggcagcagtatgatgaggagtccggcctgtattacaaccgccaccgctattatgacccgctgcaggggcgatatatcactcaggatccgattgggctgaaagggggatggaatttttatcagtatccgttgaatccgatctcagacatcgaccccctgggtttatctatgtgggaggttgccagacagatgaacgctatcgcgagtaaattgccggaaggttttcatattggaattaattttagcgcttcgcatattatttcgccgacgtttgtcgacgagtgtttaaatttccgtgacagttttacccgccgcgatttaaaccttgttctggaagtcaccgagcgtgacctattgaatgttgatgaaagtctggttcagcggttgaacatactgcatgaaaatggttttgtcatcgcactggatgatttcggtactggctactcagggctttcttatcttcatgacctgcatattgattatatcaaaattgatcacagtttcgttggccgcgtaaacgcagacccagaatcaacccgaattctggattgtgtattggatctggcgcgtaaactttcgatcagtatcgtcgctgaaggtgtcgaaacgaaagaacaacttgactatctgaaccaaaattatatcacatttcagcagggttattatttctataaacctgttacatacatcgacctggtcaaaattatcctttctaaaccgaagaaaggcattattgcgcaaatagttgtcaaccctggtgttatcacggttgtttttatatatcaccgaaataatcctcattttggcgcttctgaggggggcaacaaggggattgatatcgcaggcagcaaaggacaggcaattatcgcgaccgcagatggccgcgttgtttatgctggtaacgcgctgcgcggctacggtaatctgattatcatcaaacataatgatgattacctgagtgcctacgcccataacgacacaatgctggtccgggaacaacaagaagttaaggcggggcaaaaaatagcgaccatgg

SEQ ID NO: 140035 - DNA, 1952 bp, Homo sapiens
atgtactggtatctgaaggctgccgctcaggggagcgtcagcgcttacgtcaacatcggttatatgtataaacacggacaaggcgttgagaaagattatcaggctgcctttgaatggtttacgaaagccgctgaatgcaatgacgccactgcctggtataacctggccattatgtatcactacggagaaggaagacctgtcgatctccgacaggctctcgacctgtatcgtaaagttcagtcatccggaaccagagatcgtcagcacttccggtgtgtagatcgggagatggaagtgacatttctcgcagaccagatttcccagcccgaccacttctccgctgtgataaaccccatgatgattgaggtcctggaaaacttcgcgccattcaagctgcgttttatcggtgatgtctgccagctcctgccacaagctttctttaatcacccgcataaagacgctgtcagattcttctttcaggctctcttcatagcgcatgcctacagttgggttggcggcgatcgtccggcggatgttatcgacggcattaaaacgctacgcgaaatcggcttcgataccttcaaactgaacggttgtgaagaactggggctaattgataactcccgcgcggtagatgcggcggttaacaccgtggcacaaattcgtgaagcttttggcaatcagattgagtttggtcttgatttccacggtcgcgtcagcgcgccgatggcgaaagtgctgattaaagaactggagccgtatcgcccgctgtttattgaggagccggtgctggcggaacaagccgaatactacccgaaactggcggcacaaacgcatattccactggcggcgggtgaacgcatgttctcacgcttcgattttaaacgcgtgctggagggaagtggtatttcgattctgcaaccggatctctcccacgcgggcggtattaccgaatgctacaaaatcgccggaatggcagaagcctatgacgtgacccttgcgccgcactgtccgctcggaccgattgcactggccggttggctgcatatcactttgttttctaataacccgaccttcaagaacaaagtatgggaattcattacaaaagcacaattagcagaacaggcgctccgcagcggtcacatagaagcgttaattaacatatgggaaaatgacaactactcacattatcgtccggaaaagagtgtctggaacctgtatttattggcacagttgccgcgtgagatggctttgaccttctggctgcgtatcaatgagaaaaagcatctgttcgcgggtgaggactattttctcagtatcctcggattggatgcgctaccaggtctgctgttggctttttcacatcgtccaaaagaaacatttccgttaattttaaattttggcgcaacagaactggcgctgcctgttgcccacgtctggcgacgtttcgcggcgcagcgtgatctggctcgccagtggattttacaatggctggaacatacggctagtgcacttatccctcttgtctttaccaaacccagcgataatagcgaagccgcattacttgccctgcgtttactgtacgaacagggacatggcgaattgctacaaaccgtggcaaaccgctggcagcgtacagatgtccaatggacatttacccggcacgcatttaaaaccgggcgtctggcactggaaagtttaggtctggggccgtatgaagcgcgagaacgtgccgatgtgttccgccgctttaatattcagatggtggaagagatggcaatggttgagaacgacaccaaagcccgcgcggcggtctataaacgcaccagcgcgatgttaagtgagatcattaccgaggaccgcgatctatcgtcattatttaacgccagcagcgggatgtgtatcttgcttttatcaaatctcaatatggattttcatggagaaaacaacaa

SEQ ID NO: 140036 - DNA, 1428 bp, Homo sapiens
ttaaatactggcaatactctcacgcaaaatccgcagcaccgtctcttcaccgctgcgattcgggttaatgcgaatcgcacaatgttctgattgtggattcgcctggcgaaacgttccggaaaggcgataaaagagcggcgggatttcatatttcgactctgcacccaccgggtaaggcaaggcaccgcgcttttgcgcctcttccagcactctggcggcaatcggctgatgaaactcgacaatcaacaccttcgactgcgcattagcaatcaccgcgcttttcacttccggcaccgcaccaccgttaagcaaagccagcaaacgttcagatatccctggctgtatcgcgtgcgtcactgggggcaaaaaccgaaaacggataatttccacggccttttggcccgtatatttgggaacagccggagtaaaacgtggggggaaaataggtgagaacatagtgtgctggaacagccggatgaagatgaaggacgggacgagtattaatattgtgaatcctgtaggcctgataagacgcgtcaagcgtcgcatcaggcatgtgatccagttaccttccggtagaccaataatcgtcagttctggcgcgacgaccagcagttcgcgaatacgctgctcacgggtttcacctttatggccttccggcagcgcgttggtgaagtgcgggttgatttgcagcgggaacagatttagcgcatcgaaaccttgcggatcgacaatcggcatatcgttggtggtacgaatagttgggcaagcaaggttagcgcctgcgctccagccaatatacagagcgccacgtttaaccacgtcagtaattggtgccagcagcccgcgctcgcggcactggaagtgactatccgtactcggacccagcatcaagctcagcagcgtgaagtcggtttgaactccagcggtaaactggttatcacttcccgtaatactgaactgaaactgatcgacgaattcggtcgtactaaagaaagctacaaagtaccttacggtgcggtactggcgaaaggcgatggcgaacaggttgctggcggcgaaaccgttgcaaactgggacccgcacaccatgccggttatcaccgaagtaagcggttttgtacgctttactgacatgatcgacggccagaccattacgcgtcagaccgacgaactgaccggtctgtcttcgctggtggttctggattccgcagaacgtaccgcaggtggtaaagatctgcgtccggcactgaaaatcgttgatgctcagggtaacgacgttctgatcccaggtaccgatatgccagcgcagtacttcctgccgggtaaagcgattgttcagctggaagatggcgtacagatcagctctggtgacaccctggcgcgtattccgcaggaatccggcggtaccaaggacatcaccggtggt

SEQ ID NO: 140037 - DNA, 3129 bp, Homo sapiens
agttatttcgggataattaaaaccaccgtataacccaggggtgtcaatatttggccaaaaacccctccttcaaagatccggggtttctgcacccaacatttaacgcgtatggcagagagagacttaaggtttttgttttttcccgtgggtcagagtttctttcttaattagttaacccagatatctccccgccaacaaaggggctaaagcaattttattgtcacaagcatttctccaagccgggtactgggttttccaataagaatgaccagcagggtgatcagcataaatgcaatggaaaatatgatatagagagtgaaataatccagattattactattgttcatgctactaatggcaatcctgtcaaaactttcaaacaattatagcaaccaaaataatgaacaatagtaacaagaggcaacgagctaattagctgtctataattacgccgcactatggccttactgatcaattttcactcaaccacaaccttcaccttcggtttagaaaggataattttgaccaggtcgatgtatgtaacaggtttatagaaataataaccctgctgaaatgtgatataattttggttcagatagtcaagttgttctttcgtttcgacaccttcagcgacgatactgatcgaaagtttacgcgccagatccaatacacaatccagaattcgggttgattctgggtctgcgtttacgcggccaacgaaactgtgatcaattttgatataatcaatatgcaggtcatgaagataagaaagccctgagtagccagtaccgaaatcatccagtgcgatgacaaaaccattttcatgcagtatgttcaaccgctgaaccagactttcatcaacattcaatggctcacgctcggtgacttccagaacaaggtttaaatcgcggcgggtaaaactgtcacggaaatttaaacactcgtcgacaaacgtcggcgaaataatatgcgaagcgctaaaattaattccaatatgaaaaccttccggcaatttactcgcgatagcgttcatctgtctggcaacctgattcatcagggctgccagcggatttgccacggtttgtagcaattcgccatgtccctgttcgtacagtaaacgcagggcaagtaatgcggcttcgctattatcgctgggtttggtaaagacaagagggataagtgcactagccgtatgttccggccattgtaaaatccactggcgagccagatcacgctgcgccgcgaaacgtcgccagacgtgggcaacaggcagcgccagttctgttgcgccaaaatttaaaattaacggaaatgtttcttttggacgatgtgaaaaagccaacagcagacctggtagcgcatccaatccgaggatactgagaaaatagtcctcacccgcgaacagatgctttttctcattgatacgcagccagaaggtcaaagccatctcacgcggcaactgtgccaataaatacaggttccagacactcttttccggacgataatgtgagtagttgtcattttcccatatgttaattaacgcttctatgtgaccgctgcggagcgcctgttctgctaattgtgcttccggggagttccagccattcaggggggatcctctagagtggacttcacgagtagaaatcaatatcgctattggcaacgccatgatgatggcgtcttcgcgaccgtccgtggtggggtagtaattgcggcgaatcgtcgcctcgttaaagcctaaactttcgtacagggcaatggcggcagcgtttgaagcacggacttccagccatagtgtcgccacgccgcgtttttccagttcgtcgatcagatgttccagcagcgcccttcccaatccctgacgctgatagtcaggatcgaccgcaatattgaacaatgtagcttcatccagcaccacttgcgtaatcgcaaacgccgccattttgccgttttgcgttaactgaaagttgagataacgctcgccctggttgctggcaaacgttttttcactccacggaaaggcgtgggcgcgttgttcaatgtggtaagccgccggtaaatcagtcgtttcgagggaagaaatcgtgttcatatgtgcaaatttgttgccataacgcggcgcgtgccgttgggtttgcccgtaaatcggtgagcgccggtgatgccacctgagcgccttccagtgatagcggttcgtcagtacccaaccgccaactgttgcagtgactgccttgcggcagcatcgcgattttttctggcgtcagttgcagcacctgaacagaccgatgcggacacgcgtagatcacgtgtagcagtaggaaggcggaagacgcgctccaatagcgcaaaccagcctcgtccccggcgcgattggcgcgagttgcagttaatggacagactggctcgagtcgcacaagctcgcgccagtttcgccgcgcgcgaaaccctgcgcattggcgacgccatggaacagatgatggaagggttgaataaagtgatgcacggtgagccacggcaggagaaagagctgcgtaagctggcagatgatatcaacgttctctacaccgccattaagctgtatctggcgcggatgccaaaagaagagctggcggaggaagagtcgcgccgctgggcagagatcatcgaaatgtcgctcaaccttgaacaggcctccgatatcgtcgagcgcatgggccggggaattggtggacaaatcctgggcagcacggcgggcattttcgcttgatgggttgaaggaactggatgcgctctatgagcaattgctcagtaatttaaagctggcaatgtcggtgttcttctcgggcgatgtcaccagcgctcgtcgtctgcgtcgcagcaaacatcgttttcgcattcttaatcgccgctattcccacgcccacgtcgatcgcctgcatcagcaaaacgtgcagagcattgaaaccagttcgctacatttaggcttactgggagatatgcagcgcctgaactcgctgttttgttcggtggcttacagtgtgctggaacagccggatgaagatgaaggacgggacgagtattaatattgtgaatcctgtaggcctgataagacgcgtcaagcgtcgcatcaggcactatgaacaagatgcc

SEQ ID NO: 140038 - DNA, 1068 bp, Homo sapiens
ctactcctccacttggtctttatggacccgttccttccccgggttctcggcgattggttcttcccgcgcgggcccgtcgccccgtcccgccctctggtaacgcccctcctcctcgccctgccccttctcgatgaaaactgtctcttcgcctcgggatctttcctcgcccttcgttgtttcctcgccccacaccttctccttccacgccggcaccagcttcttagccggcaccttcttgagtctcaccttcccctcgtaccgcgacaccttcttgccccacttcttactcttccttcccatgccattaacacctgcctgctctataccccgactctctgcaccgcccggacttcgcccttcagtttcggctcccctttccctctctggcaagtccacgacttttccctcttttcctctctccaagtccaagaatctcaccttttccctgcctttcccttttggcttcctttccgtgccatcattaccggtttggccgtgcccgaaaaataactcttcagcactgactggggttaagtacttaaccacggcatcacttctgctgccagttgtggctgcgatcccatcagcgttgtaacagcgtacgccagtattcatcgcgtgctttttgctgtgcaggcagctttttgtcttcgatgattggataaccagggcgggctggtggttatcgcgaggcgcggaatggctgccagtccttgttcgcgcaaaaggcggccaggccgcgtagccgaagtggttttcatgcgacatgtagctggcttctcgatcgctaaatatatcacggctccagtagtattcgagttttctcaccgctgtggggtcattagcaacaacttttgacctgcaggcatgccgaatctctttgcccggctcgttaacactgcgggcacatagccaaagcccgcgcaaccccgtttggttaacgcctaagcgcacgccgaccatacccggctgctttgccaccagctcacggatgtgtatccccgctgcgggtgtcagcgttaagccttgccaggcgaaatcttgtgggttaaaggttcctgaatgcat

SEQ ID NO: 140039 - DNA, 663 bp, Homo sapiens; identical to SEQ ID NO: 124951

SEQ ID NO: 140040 - DNA, 1080 bp, Homo sapiens; identical to SEQ ID NO: 124952

SEQ ID NO: 140041 - DNA, 1326 bp, Homo sapiens
atgcattcaggaacctttaacccacaagatttcggctggcaaggcttaacgctgacacccgcagcggcgatacacatccgtgagctggaaattcttgatgagtacggcatcccaaatgcctggcaaggggaaaccaacttctggggcagtaccgccgtcagtatcgatcgtctggcggcgtataaagacgttgatgtgctctgttttgatcacgacaacagcaaagacatggatgcgctaatggcaacgccgctgtggcaggccatgccgtttgtccgcgccggacgctttcagcgcgtacctgcagtctggttttatggtgcgacgctctcggcaatgcactttgtgcgcgttctggataacgccatcggagtgattgtcgctacggcgctcacctggatgaacttctcgcaggcgctgccgcgtagccagtgggcgcaggctgcctggtcgccggatattgacgtcatcgagcagatgatttttcactacagcttgttgccgcgtctggcgatttcgctgctggtgggcgcgggtctggggctggacgttcgctattacttaaatggtatgctgtttgaaaccgaaggtgaagaactgcgcaccgtggcaaccgacggccaccgtctggcggtctgttcaatgccaattggtcaatctttgccaagccattcggtgatcgtaccgcgtaaaggcgtgattgaactgatgcgtatgctcgacggcggcgacaatccgctgcgcgtacagattggcagcaacaacattcgcgcccacgttggcgactttatcttccacctcaaaactggtggatggtcgcttcccggattatcgccgcgttctgccgaagaacccggacaaacatctggaagctggctgcgatctgctcaagcaggcgtttgctcgcgcggcgattctctctaacgagaaattccgcggcgtacgtctttatgtcagcgaaaaccagctgaaaatcaccgccaacaacccggaacaggaagaagcggaagagatcctcgacgttacctatagcggtgcggagatggaaatcggcttcaacgtcagttatggtgctggatgttctgaacgcgctgaaatgcgaaaacgtccgcatgatgctgaccgattcggtttccagcgtgcagattgaagatgcggccagccagagcggcggcttatgttgtcatgccaatgagactggaaggttctccaccgcttggtaatcccgaattccaaaagatatcatcgccctgtgctctgtatatcgccctgtgctctaaagccaggcaccacacaggacgatatctcggactatgtggcctctaa

SEQ ID NO: 140042 - DNA, 1520 bp, Homo sapiens
ctgcttgcgagctttatccagcaccggcaagcctcgctcaaagacctcgacggcaaaaccttcctgctgcaacatgtagaccagcgtgtcggctatcccttgctcatcttccactaaccagaccgtttcccgttgcataaatcgcctcgcctggtgatagacgctggcgcgagtgagtttcccggcggtaaacacgccgatcgccccttacttacgaccaatctcatcaataccggtataacgcgacatcacgggaccatagcgcctcaccttcacgcactttttccagaatcaccgcaggcaacggcaaagtagccgaacgcgcctcgccgcgctggctggcgttttcaatcaccacccaactgaaagtgctgtcaccatcgatgccagcttcaatcgccacccaaaaatcagcctctggaagtaaacggcgggcattggctacccgatttcgtgcgccagcgcgcgtttcctcactgccaaagggctgttccggtacaccgttctcgacggcaacggatgcaatatggcaggatccttcgccgaagatctcgtgaaatgccttgcagaatggtcgcgaacgcaacgacgtgcgacgtagtgtcctgcgcatcttcccatacgctatccatcagttgctggcgggaccagacgcggcccggtgacttgagtgaacgttttcaacactataaactcataccgagtcagcgctaatggcgtgtcaaaccagctgatctgcgccgcgggttcattcaattcaaaatgtccaatacggatgacgggagacggcgtcgagaacttcttcacccgacgcagtaaggtgcgcaccctggcgcacacttcgcggggtgaaaacggtttagccacgtagtcgtcagcaccaatttccagcccaagcaggcgatcgacctcttcacttcgggccgtcaggaacagtacaggtaacgccggatggagcgccagtaactggcggcacaattcaaagccgctaatatccggcagaccaacatcgagaatcatgacgtcgggtacctgcttgcgagctttatccagcaccggcaagcctcgctcaaagacctcgacggcaaaaccttcctgctgcaacatgtagaccagcgtgtcggctatcccttgctcatcttccactaaccagaccgtttcccgttgcataaatcgcctctgttattgccgccacggcatgacaggaaccgcgctaatcgcgtttttcggcgaaccttctacaactttgtcggagtaagccagataagcgagcgcgttgcgtttggcatcataaaagcgcacgacctgtaacgacttaaagaccagggacgtgcgttttttgaatactacctcgccctgagctttgccgtttttaatacgatccgacagttcaatcggcccgacttgctgacaagaaatggccgcatcggaggtatcttccgccagacccaatccccctttaataccaccgggtttcgcccggctcacataacaggtgacatttttcacatcgggatcat

SEQ ID NO: 140043 - DNA, 2502 bp, Homo sapiens
  misc_feature (1)...(2502): n = a,t,c or g
atgaggtaccagcccttcaaagaactagggagaaagctgctccaagcagagaacacagggtctggtggttttcgtcaccaggtgatatcctgcaaacctgagattggggccttccaccagctatgtgacatctatctaagttataattatccccacttgccagacagggaaactgagactgaggccaataaagccttttgccaagatcacccaacaaagccaaaatcctgcccatctgtacgcatctgcatggggatagaagcttttgatgaatatccatatgtgtttctcaggagcaaggaaaatagtacaggggaccctgccaatcaatggcagcctccttatccactgactgtggcggccaacaccaatccgatggagttgcatttgaaaggacccgtgccataccccgtctggtttacgggcatcatgatccttcccccatcagccttgaagcccatgagttcagggaccatgctttgtgtccctccaggggcctgcagagaggaaaatggcaaagcgcagactacaccttgtctcagaaagagcaaggatgccctgcagtggaatagcacttaccagtgcattctgggacaaaaggaaaaaggcagggaggagaaagcagatggtggccataatatcaataatggccattccctgagggcctgcgatgagctagccatggttctaggccccagaggtactgtgctgattctaaaggtagatacagacaaccaaccaagtaaacacataggaaataaactcaagaatgatatatgctgttcagagcatgaaacaggatggtcctgcattgtccacatcttccaggactattgggggaccaatgctgagcacttggtcctgaaagattttcactgcagtggacagcctctcatcctcaaggaggctaagcctggtttttccacaaaacagcagatgagcttccagcagcaaaagaacacaagcccaatgcacatgaacttaaaacaacatcgcacatttactatctgctggctaaggcaagtcacacagccaaggtcagaggtaccacaacaattcaatatggaaaggatatcttgtctccatggtgctttcgataacaacatcatttgtgccgacgaaaaggtactgattgttgttgatagcgtagccgatgaactgatgcgtctgatggaaggccagcacgcggtgaaactgaccgcagaacaggcgcagcagctgcaaccggtgttgctgaaaaatatcgacgagcgcggaaaaggcaccgtcagccgtgactgggttggtcgcgacgcaggcaaaatcgcggcggcaatcggccttaaagttccgcaagaaacgcgcctgctgtttgtgganaccaccgcagaacatccgtttgccgtgactgaactgatgatgccggtgttgcccgtcgtgcgcgtcgccaacgtggcggatgccattgcgctagcggtgaaactggaaggcggttgccaccacacggcggcaatgcactcgcgcaacatcgaaaacatgaaccagatggcgaatgctattgataccagcattttcgttaagaacggaccgtgcattgccgggctggggctgggcggggaaggctggaccaccatgaccatcaccacgccaaccggtgaaggggtaaccagcgcgcgagtaacagatggcgcacgacgaacaatggcttaccccaacgttctgcaaacggcggcaacgctgtgtaaccagaacgccccccgcgacggatctccgctgtggctgggggtggatctgggcacctgcgatgtggtgtcgatggttgtcgaccgcgacggtcagccagtggcggtatgcctcgactgggccgatgtggttcgcgacggcatcgtctgggatttcttcggcgctgtcaccattgttcgtcgccatttcgacacgctcgagcagcaattcggtcgtcgttttagccatgcggcgacttcatttcctccaggtacggacccgcgtatttccatcaacgtgctggaatctgccggactggaagtgagccatgtgctggatgagccaaccgcagttgcggatttgctgcaactggacaacgccggtgtagtggatatcggcggcggcactaccggcattgccattgtgaaaaagggcaaggtgacgtactcggcggatgaagccaccggcggacatcacatctttttgactttcgccggaaatcgccgtatttcgctggaagaggcggagcagtacaagcgcggtcacggtgaagagatttggcctgcggtgaaaccggtgtacgaaaaaatggcggacattgtcgcccggcatattgaagggcagggcattactgatttatggctggcgggcggctcttgtatgcaaccgggcgtggcggaactgtttcgcaaacaattcccggcgttacaggtgcatttaccgcagcacagtttgtttatgaccccgctggcgatcgccagtagtgggcgagagaaagcggaggggctatatgcaaaatga

SEQ ID NO: 140044 - DNA, 1518 bp, Homo sapiens
ttagttcatgccgagacgaatcaggtccagtggtgccagtttcttttcacaaccttcaacaactacggtttttccgcgccggatttgctcagcggtcagaccttcagtatcaatcgacaggatcttgccagtgtgaccggtgccgctaaccataacacggctgccagtgggggatactggtttgattgcagcatcaacgccagactgaatctggtcgccagctttcaggcctttaggggccaggatgtaacggcgttcaccgtctttgtacagaaccagcgcgatgttcgcggaacggttcggatcgtactcaagacgttcaacaactgccgggataccgtctttgttgcgtttgaagtcaacaatacggtaagcctgcttgtggccaccaccgatatgacgagtggtgataatactattccttgtccttcccggaaaactttcatgaatgttggtacccaaaatggagcccatttcctcttgtaaacatctaacaaatacagcagcggcaacaccacgacaaatatcaacatcaatacctgaaaacttaccgtcagcatcggcataagagaacccaggtaatccatcactgatcccggcgccaaagcttgcatgcctgcagccgcgtaacctggcaaaatcggttacggttgagtaataaatggatgccccgacatagataataacttcagaatgagtattctccactcgagggagcatccagggaagtgggaaaggtgcagcacccgccggatgcggcaaaatacccatcgggatgccataaatcatttcgagggtttcgccgcgcataatttccgcaggcgttccctgagcaatcatttcaccgccgcgcagggcgaccagataatcacagtagcgtgccgccatattgatatcgtgcaacacggcaatgaccgtcaggccacgctcctgacttaaacggtgcaccagcgacagcacatcaacctggtgggcgatatccagcgccgaggtcggttcgtcgagcaacagacaacggctatcctgcgggggatcctctagagtggaggagcacagcccaagtttttgtttcatcccgcagaagagtttccctgccgaacgatcggaaaacggtgctaacccggtgctggtcagcagctcattgattcgcacttcccgctccgctttgtcgtgaccgaacaggcgagcgaaaaaatcgacgttttcatacaccgacaaggtgtggtagaggtttttgcccagcccctgcggcatccaggcgatgcgcgggcagacgtcgcggcgatgcttcgggtcgcgcatatcgccgcccagcaccatcacattgccctgttcaatgacgcgggcaccggaaatcaacgacaacaagctcgacttcccgacgccgtccgggccaatcagcccgaccatacagcgggccggaatatcgagagtgatattgttcagcgcaacggtttttccataatgatggctcacgcccgccagttgtgcgacaggcgggacgggcccagttcccat

SEQ ID NO: 140045 - DNA, 1257 bp, Homo sapiens
gccaccaagatactcagccgtttgaaggctttgaattctccccgcgttcaaaatctccccggccgacacaaacggcccgcactaattcccaatggactccgatccgcacttccgccctcttcacacgtgacacactcccaacaggaaggtgcccatttgtccccggcaactctgaacgttcccacagtctcgcgagcggctcaaaagcccgtcacatctccacaaaactccctaacccgcgagacccgtcccgtgtctctcgcggcaaaacctcgtcattacaccccctgcccggtcgctctcgcaacccgcaacgcgccatttgacacccccgtcaaacgtctcccacttcacccgctctcctttcggttggcggcgctgatggttaaccctgagctgcacaagggcaaaccttttgctccgttgctggaaaaaaacagcaaatccggtggtcgtaacaacaatggccgtatcaccactcgtcatatcggtggtggccacaagcaggcttaccgtattgttgacttcaaacgcaacaaagacggtatcccggcagttgttgaacgtcttgagtacgatccgaaccgttccgcgaacatcgcgctggttctgtacaaagacggtgaacgccgttacatcctggcccctaaaggcctgaaagctggcgaccagattcagtctggcgttgatgctgcaatcaaaccaggtaacaccctgccgatgcgcaacatcccggttggttctactgttcataacgtagaaatgaaaccaggtaaaggcggtcagctggcacgttccgctggtacttacgttcagatcgttgctcgtgatggtgcttatgtcaccctgcgtctgcgttctggtgaaatgcgtaaagtagaagcagactgccgtgcaactctgggcgaagttggcaatgctgagcatatgctgcgcgttctgggtaaagcaggcagcaaactggatatttcggtcaactggcaaggggcggcaatggcgtattccttcgatgaagtgattgttgacagtaatggcaagaaactggacatgcgctttggcggtaatttaacggcagcagaagagaagaaaacgggttgcctggtgtgtctggatagctgcccggtcggcatcgtcagcaatgcaacatacacttatggtgcggttgaaaaacgtggtgaagttaaattcaaaggcaatgcctcagttctcccggcggataacacgctggcaacggttacctttaaaatcgccgaataa

SEQ ID NO: 140046 - DNA, 835 bp, Homo sapiens
ctacttccccagtagttcacgccagtcgcttttctttaccatttcaccagaacccagactcaggtgaccataagcaccatcacgagcaacgatctgaacgtaagtactagcggaacgtgccagctgaccgcctttacctggtttcatttctacgttatgaacagtagaaccaaccgggatgttgcgcatcgccagggtgttacctggtttgattgcagcatcaacgccagactgaatctggtcgccagctttcaggcctttaggggccaggatgtaacggcgttcaccgtctttgtacagaaccagcgcgatgttcgcggaacggttcggatcgtactcaagacgttcaacaactgccgggataccgtctttgttgcgtttgaagtcaacaatacggtaagcctgcttgtggccaccaccgatatgacgagtggtgatacggccattgttgttacgaccaccggatttgtcagcgccgccaacgaagtccagattctggccttctttcagggtgacgtaagcttttttccagtcgctacgacgaccgatacgctgtccgtgacgtttaactttccctttaactaccagggtgttaacgacttcgacttcgacttcaaacagtttctgcacagcagctttgatttctgctttggtcgcgtctttagcaactttgagtacgatggtgttggatttttccatcgcagtagacgctttttcagaaacgtgcggggcacgcagcaccttcagcagacgttcttcacgaatcatgccagcatttccttaacttgcttaacaggcttggccgtcattacgactttggcgaaggcgaaccttc

SEQ ID NO: 140047 - DNA, 2257 bp, Homo sapiens
atgagggagtcaccaactcgtgatgacagcaagaacactgtgaacaccacaatccgcattcgcattcacaacagttataccgagcaactacagatcgtcaccaactcgtattgcacaaaacaatggcacgtgcaccacactgcaaaaccatacgcccacatacagcgaccagcaacaccagacgcccaactgaccaagatgcaggaggaagaggaagtggaaccagagccagagatggaggcggaggtggaaccagaaccgaatcctgaggaggccgagacagagtccgagtccatgaaccagcgcgatgttcgcggaacggttcggatcgtactcaagacgttcaacaactgccgggataccgtctttgttgcgtttgaagtcaacaatacggtaagcctgcttgtggccaccaccgatatgacgagtggtgatacggccattgttgttacgaccaccggatttgctgtttttttccagcaacggagcaaaagcgccgccaacgaagtccagattctggccttctttcagggtgacgtaagcttttttccagtcgctacgacgaccgatacgctgtccgtgacgtttaactttccctttaactaccagggtgttaacgacttcgacttcgacttcaaacagtttctgcacagcagctttgatttctgctttggtcgcgtctttagcaactttgagtatttgcacggagccagagcacacgcctgcattccaccgtcagcttgtattggcgaagtcttagagacatccagctttgacatccgtgtctctgtctatcgttcctcctgtgtgtgtgtgagacttagggagagctctaccggagatagatattttggaggcctcagcttgcagatgatgcgtaaagccacaggactgactgatatcacctcggataccccaggcaacacagatgaccagaggtggcacccggaacacgggctcactcagaggatgcaaaaagagcaggagctggtaaaggagcctgaaggagctgccagggatggggatggagaagcagaagcatggggtgaggtgaaagccaagagtagtggctgtgttgggaccagagcctctagccacctgttccgctgcaacgtgtgcgagttgcatttcaaggagtcgtcggagctgctgcagcacccgtgcacgccaagtggggagcggcccttccgctgcggcgagtgccagaaggccttcaagcggccctcgggacctgcggcagcatgagcgcacacacagcgccgagcggcccttcaagtgcgacctgtgccccatgggcttcaagcagcagtacgcactgatgcgccaccggcgcacacacaagaccgaggagcccttcaaatgcggcctatgtgagaagggctttgggcagcccagccacctgctctaccaccagcacgtgcacaccctcgagactctcttcaagtgccccgtgtgccagaaaggctttgaccaatctgccgagctgctgcggcacaagtgcctgcccggcgcggccgagcggcccttcaagtgccctgtgtgcaacaaggcctacaagcgcgcgtcggccctgcagaagcaccagctggcccactgtgcggcggcagagaagcccctgcgctgcacgctttgcgaacgccgcttcttctcctcttccgagttcgtgcagcaccgctgcgatccggcccgcgagaagccactcaagtgcccagactgcgagaaacgcttcaagtacgcgtcagacctgcagcggcaccggcgggtacacacaggcgagaagccctacaagtgccccaactgcgacaaggccttcaagcagcgggagcatctcaacaagcaccagggcgtgcacgcccgcgagcagcagttcaagtgtgtatggtgcggggagcgcttcctagacgtggccttgttgcaggagcacagcgcgcagcacagtgccgccgccgcggcagcggagggcgcctaccagcaaactctgcatcacccacgaagacaacagcaacagtactggcagctgctgtgtgccaggaacaatgttaagctctgtatgcacatcttattcagccctcacaaccaccccatgagggaggtaggactgctgggcccaccaccccaggccttcagctcatccctgctctgcaccgacactggcatcttcgtgtctgcccccagcagcactggggaggggagttactcaagggatggcccgaggggaatgcatatatttcagcggtccaggctattacaattatga

SEQ ID NO: 140048 - DNA, 603 bp, Homo sapiens; identical to SEQ ID NO: 123392
  misc_feature (1)...(603): n = a,t,c or g

SEQ ID NO: 140049 - DNA, 554 bp, Homo sapiens
gcaccaccgataccgaaaccttcgtaatcataagtgatagaaccgccgacgccgtcgccgttttgacgcagtgcgtcacgaccgttgttagttacgccactagtaaagccttcaccagatgggttgccgtttttaccctggtactgaacagcaaagttcaggccgtcaaccagaccgaagaagtcagtgttacggtaggtcgcgaagccgttaccacgctgctgcatgaagttgtcagaaccgtaggtgtcaccaccgaattctggcagtacgtcggtccaggaagttacgtcataaacaacgccgtagttacgaccgtagtccaaagaacccacatcctggaatttcagacctgcgaatgccacacgggtccaggagttgttttcgttttcagcgctgctgccctggatctgatattcccactggccgtaaccggtcagctggtcacgaacctgagtttaacctttgaagccaacacgcatgtaggtctggtcgccatgtacatctttgttgccagagaaatactgcaagcacgctactttaccgcacataat

SEQ ID NO: 140050 - DNA, 2124 bp, Homo sapiens
ttaccccaagtgggtgtcctccccgaaattatccgagaggttcacaaaaccccgagctttttttataacccgtgggggatttttttctcccaggggggggggcgagaatatttggagaaaaggagtgggtctttttcccataatggggcctggggaaccacgggtggttttttcaatctgagcgataaaatagagcggcgtgccatccgtgtggcgcaccagtgagacggcaagcaacgcccagacaacatcgccattgcggttgtagtagcgtttttccattgaataggtgtttatttcaccgcttatcagcttttcaacctgttggagatctttattgagatcctccggccaggtcagttgctgaaaggtgagtccgcgcactcttcctgactgtacccgagaaactggcagagcgctttgttggtttgcagccattgtccctcggtgcccactaacgccataccgatagcggaatattccatcgcgttccgaaagtgggtttcgctttcggaaatgtgtttgcgttccgcacgaaaggcatacatcaccatggtcatgatgttggcgggcagcaggatcagcaaaaacggtagccacggcatatggctcatcaggtacgtacgcggcgtagcaagcagggagggatccgcggccatcatcagcgacaccatcatcaccgtggtaaggaagatcaaaaaggcttccattcgtggcagacgcacggcgctccacatcaacagcacaataatgaaagtaaaaggccacggcagatacagcatcgaaagccagcttaacgtcagtgtgatggcccccgagtgcgcatcgggcgtttcgcccgggcgggggtgtgcccccccctccagttaggggcctccccacgccgcggcgatagagattacgtttaatgcgcgttaaaccaggttttggcttacgcggttcgtccaggcttgccaggacaatctccagcacacgctctgcgacatcgcggtgacgttgagccactgccagcaccggacactgtaagaagtcgagcagttcgttatcgccaaaggtggcaattgccaggtcagaaggcagtttgccgtcgcgacgcagcgtgacatccatcactccttgcaacaacgcaaacgacgttgtgaacagcgcctgcggcatcggatgcgtttccagccatttttcgaataactgggcagccgcctcccgctcatagctgttggcatacaggaaatgcacttcgcgcggatcatctttccaggcagtacggaaaccttgttcacgcaggaagctgacagaaagctccggtagcgcaccaagataaagcaccgtctcggcgggaaacttacgtaactcttccgccagcatttcggcatcatcctgatcggcaccaaccacgctggtgaagtgttcacgatcgagggcgcggtccagcgcgacaatcgggaacgggtcgttagcccagcgttgataaaaaggatgctcaggaggcaacgacgtcgaaacaataatggcatcaacctgacgctgtaaaaggtgctcaatgcaccgcatttcgttgtctggctgatcttctgagcaggcaatcagcagttgataacccccgttgcgcgcccggatatgtctgcgatggttgaaggcattgagctgacgctgaagtcgatgctggatgttgtgcgtaagtttggcgttgaagtgatcgccgaaactaacgtcccactggacccgaatgtgcatcaggccatcgcaatggtggaatctgatgacgttgcgccaggtaacgtactgggcattatgcagaagggttatacgctgaatggtcgtacgattcgtgcggcgatggttactgtagcgaaagccaaagcttaatttctgctttcgtaataattcacggccctgcttaatcatattgtcctgtacgtcgagaatatcgatatcgtactcgccaatacgcacgcgggtgcctgcgacagggatctcttccagtgcctcaagaatgacgccattaaccgtgcgggcatcatcttccggtagatgccagttaaaggctttgttgatttcccgcacgttggcggtgccatcgataatcaccgaaccgtcgttttgcggcgttatgaccgacttcat

SEQ ID NO: 140051 - DNA, 1419 bp, Homo sapiens; identical to SEQ ID NO: 138901

SEQ ID NO: 140052 - DNA, 3342 bp, Homo sapiens
atggtggaaggatgggttaccagcgcctgggcgaagaaacatcacccgcgctggtaccgtgaggtccgcaagccacggaaaaggttcgcggcacggaagcaaaagccgcccatcagcgctggcgcacaacgtaccgggtccgcaccggcttttgaagcaaatagcaggggcttcagaaaccgcttcaatattgagcgccacgataatctgatttgccactttgcaggtttgaccatcgccgttaccgcccacgagggtgatatttttaccgagcagttcaaacagcggtttaacacgttcaaataccgcttcatcaccgccaaccataatcgacaacgtcccttcacgcgcaccgatttcaccgccggagactggcgcatcgagataatcgccgcccagttcattcacctgacgagcgaaacgcttagtttcaatcggggaaatggagctcatatcaacaatggttttgcccttcagcgaggctttggtacaaccattttcaccgaacagaacttcttcaacctgagccatcacactgacgtaagctggctttcgatgctgtatctgccgtggccttttacctttcattattgtgctgttgatgtgaagcgccgtgcgtctgccacgaatgaagcttttttgatcttccttaccccggtgatgatggtgtcgctgatgatggccgcggatccttccctgcttgctacgccgcgtacgtacctgatgagccatatgccgtggctaccgtttttgctgatcctgctgcccgccaacatcatgaccatggtgatgtatgcctttcgtgcggaacgcaaacacatttccgaaagcgaaacccactttcggaacgcgatggaatattccgctatcgtggacgatgtaacaagcgccttcttcatcctggtgcggttcacacgcttcgctcggttgccagatagcggtaacccgctcatcggcaggtgtcacgatatgtgctttgacttcaaagaagtctttcgccacgaagttttcaatctcttcatcgcggcgcaccaccagcccaagcacgggcgtctgcacgcgtcccacggaaagtacgccctgataaccggcattgcgaccgagaatggtatacgcacgggtcatattgatgccgtacagccagtcggcacgcgctcgcgccagcgcagaaacgcacagcggtacaaactcactgttggaacgaagacggtcgatcgcccgctcaaccgcctgcgggttcaggtcgtttatcaagcaacgctgtacctgctggcgcttttccggtgccagttgcagatagtccagcacttcatccaccagcaattgcccttcacgatccgggccagtaacgtgcgctggcgcggaatgaattttacagatgttgccacgcaaatgaccaacaagtcgggtttgctggaaattactcaactgcagggcaaacttaacggtggacaggtttcactgccgggcacgctggacgcgacatcaataaatccgcggataaacttccagccacggctggaaaacgttgagattggtaccattctgaaggcgtttaactatccgatttcgttgaccggaaaaatgtcactggctggtgatttctccggtgctgacatagatgccgacgcattccgccacaactggcaaggacaggcacatgtcgaaatgaccgacacgcgcatggaagggatgaacttccagcagatgatcagcaaacgctggggcatcattgtgaagctggaaaagctggcgaacgccaccatgcgcgacagagtgggtaaaggtgattacgacattgcgattggcaactggagtccggattttgccgacccgtatatgtttatgaattactggtttgagtcagacaaaaaaggtctgccgggtaaccgctcgttctatgaaaacagtgaggtcgataagttactgcgcaatgcgcttgcgaccaccgaccagacgcagcgtacccgggactaccagcaggcacagaaaatcgtcattgatgacgctgcttatgtgtacctgttccagaaaaactaccaactggcgatgaacaaagaggtgaaaggctttgtgttcaatcccatgctggaacagataatatccgtcatcgcatttggcgcgctgctcgcgtcgtctatgcaatcattcctggttgtgagagcggacaccgtatcgccgcatacaagcgcgggagaagttgcgtgtagccgcattcatactcccttgacttataacgaaattctacggaaagcttttgggctggattacgaactggcgaaacagtttgcgatttacctcggcgtaaaactgaaagtgaccgtgcggcagaatatcagccagctgtttgacgaccttgataatggtaacgccgacctgctggcggcaggacttgtctataacagtgagcgggtaaaaaattatcagcctggccctacctattattccgtgtcacaacaactggtttataaagtgggtcagtatcgcccacgtacgctgggcaacctgacggcggagcaactcaccgttgcaccgggtcatgtggtggttaacgatctccagaccctgaaagaaacaaaattcccggaattaagctggaaggtagacgacaaaaaaggctctgcggaattaatggaagatgtcatcgaaggaaaactcgattacaccattgctgattctgtcgccatcagcctgtttcagcgcgttcacccggagctcgccgtagcgctcgatatcaccgatgaacaaccggtgacttggtttagcccgagttggagccgaggccaagcagtggtgatcgaggttcagggtgatgtcatcactgcgctgcagctcgttacagtgctgggcagcgtggatgttttcctgggtatagtgccaggcgctgaagttaattgggcgctgcggaaccaccagcagaccgttaccgtggcggttagtcagtgccgtccagcggacatgctgacggttaccgttgttctgcgggaagggatagttctcgaacatggcatcgacggtgctgcgccagatatcgatgatgttagcctgctggctgtcggcgtagttttcgcccggtccacgaccgtaatacgccacctgatcgtattcgccgttaattcccatggtgaaaccgatgcacggaatgatgtgcggatagtcgccgtaacgctcgccggaaagcgccacgttaacctggccatcggcagcgatgcgccagatgtaggtgcagcgcatcccgaagtcaaacaccggcggggcaataactgtgcggctgatgatcagcacttcaccatcgctctgttctacggcaaagtcgcgcagatgttcctgcagatcgtttaa

SEQ ID NO: 140053 - DNA, 2712 bp, Homo sapiens; identical to SEQ ID NO: 136709

SEQ ID NO: 140054 - DNA, 2280 bp, Homo sapiens
atggacgatatcccgcaagaggcccggcagtaccggcataaccaagcctatgcctacagcatccagggtgacggtgccgaggatgacgatgagcgcattgttagatttcatacacgcgttatcaatcacaagaaacgtaaaaatagcccgcgaatcgtccagtcaaacgacctcactgaggcggcatatagtctctcccgggatcaaaaacgtatgctgtatctgttcgttgaccagatcagaaaatctgatggcaccctacaggaacatgacggtatctgcgagatccatgttgctaaatatgctgaaatattcggattgacctctgcggaagccagtaaggatatacggcaggcattgaagagtttcgcggggaaggaagtggttttttatcgccctgaagaggatgccggcgatgaaaaaggctatgaatcttttccttggtttatcaaacgtgcgcacagtccatccagagggctttacagtgtacatatcaacccatatctcattcccttctttatcgggttacagaaccggtttacgcagtttcggcttagtgaaacaaaagaaatcaccaatccgtatgccatgcgtttatacgaatccctgtgtcagtatcgtaagccggatggctcaggcatcgtctctctgaaaatcgactggatcatagagcgttaccagctgcctcaaagttaccagcgtatgcctgacttccgccgccgcttcctgcagcacatatttgttcttcgggagcgccctgaaaccgtgttaatagatctcattcagaggacaaaggatgcagtaagagagctggacaatctgcagtatcgaaagatgaagaaactccttttccaggaggcacataatggaccagcagtagaagcacaggaagaagaagaggaatatggctggaatctggaccgagcctatgactatgtgaaagaaagacgaacggtaaccaagcccaacccaagcttcatgagacaactggaagagtatcaggggatcttgctggcaagacccaagagaactgcttacatttatggctccgtgtatcggcgttgtggttatgcagaccacaaggtagaaataaaacaccctggctgggcatccatcagcaggggtgtgctggtgtgtgacgagtgctgcagcgtgcaccggagcctgggacgccacatctccattgtcaagcaccttcgccacagcgcctggcctcccacgctgctgcaggcagagtgtgctgagcatgagggcgtttccccctcacccacatacacccccatctggaatctgcagcttccaaggggcagcacccccctaggcagagctctgctggtagcaggcgcagcaaacgctgctgaagtttacaacaaagacggcaacaaattagatctgtacggtaaagtagacggcctgcactatttctctgacaacaaagatgtagatggcgaccagacctacatgcgtcttggcttcaaaggtgaaactcaggttactgaccagctgaccggttacggccagtgggaatatcagatccagggcaacagcgctgaaaacgaaaacaactcctggacccgtgtggcattcgcaggtctgaaattccaggatgtgggttctttcgactacggtcgtaactacggcgttgtttatgacgtaacttcctggaccgacgtactgccagaattcggtggtgacacctacggttctgacaacttcatgcagcagcgtggtaacggcttcgcgacctaccgtaacactgacttcttcggtctggttgacggcctgaactttgctgttcagtaccagggtttcggtatcggtggtgcgatctccagctccaaacgtactgatgctcagaacaccgctgcttacatcggtaacggcgaccgtgctgaaacctacactggtggtctgaaatacgacgctaacaacatctacctggctgctcagtacacccagacctacaacgcaactcgcgtaggttccctgggttgggcgaacaaagcacagaacttcgaagctgttgctcagtaccagttcgacttcggtctgcgtccgtccctggcttacctgcagtctaaaggtaaaaacctgggtcgtggctacgacgacgaagatatcctgaaatatgttgatgttggtgctacctactacttcaacaaaaacatgtccacctacgttgactacaaaatcaacctgctggacgacaaccagttcactcgtgacgctggcatcaacactgataacatcgtagctctgggtctggtttaccagttctaa

SEQ ID NO: 140055 - DNA, 1848 bp, Homo sapiens
atgctgcaaaccaccatctgccgcctgaacggcgtggagtgcgaaagcccggtggtgatttgcaatgagcagcaccgctttattgtcgcggaacagctgcgtcaactgaacaaacttaccgagaacattattctcgaaccggcagggcgaaacacggcacctgccattgcgctggcggcgctggcggcaaaacgtcatagcccggagagcgacccgttaatgctggtattggcggcggatcatgtgattgccgatgaagacgcgttccgtgccgccgtgcgtaatgccatgccatatgccgaagcgggcaagctggtgaccttcggcattgtgccggatctaccagaaaccggttatggctatattcgtcgcggtgaagtgtctgcgggtgagcaggatatggtggcctttgaagtgggcaaaaggagtcgaccaacgccagcgtacaagccaaactccgggtccgccccgacccaccacggccccggcccgccctcgcccgccggccccaaacaacacgacatccacaaacttacgcccgccaccccaccagacacctacggaatccacgcggctaaccaccgggtgtcgacgaacgtgcgtgaaattgacgagtgcctgaacgaccaccatgctctgttcacgattcgacaaattgcctttgacatcttcggcggtgacttcaatcggccaggtgttatcggtttctggcgtactggtgaaccgaacgatattgttgttgcgatccaccagatcataacggctgcctgcaaggctacgccgtgcagcgacttcattcgggtcaagctgtttctgcattgcgctgccaggttgccaggtaaaatcgacggcaaaacgggtgtcattttcgccctgtttaccctggcgttgctccgcgctgaaggtcatcagcgggaagggggtataggccaattcatcgccataaatactggtcatagaccagtttaccgccaaggtgcggccagcggggtagccagctttctgcgcgtacatcccagccaattggcgggcgtgcttcataatcgttgtccagttcagaacaagaagcagaagcagaagcagaagcaagaagaagaagaagaagaagaagaagaagaagaagaagaagaagaagaggaagaggaagaggaagaggaagaggaagaagaggaagaaggagaaggggaacgggaagggggagaaggggaacgggaaggggaagaaggggaacatgaccggtttagtacacataagccccaggcaaaagatgaaacgatgaagtacatacgatctaagcctgacaaccgaatcccggagagacactatatcgcaggtagaccacgagaactcgtatcaactcaccgctatgtgtcagcccgatattacgaagcaacaacgtacaaggacaatgatgctccaaggacaaagacgaagagaatgaagaagaagaagaagaagaagaagaagaagagcaagaagaacaagaagacccaaaccaggagatacattacggtcgacattgaggccgccagcacggcgtgtaccgcaaacagcaacggtgaaatgaacaggaaggtaaattccagcggttcggtaattcccaccagcatggcggttaaggttgcgggaatcagcaagcccgccacttttacccgattttccggtgcggcagtgaagtacatcgctaaagaaatgcccacggcaccaaagatttttgagttaccgtgcagggcaaaaccgccttccgggaacaacgatttcagcggctcggcgctcaaactgaactcttgcagatgtgcgcccagtacatctgaatgccgccttcaacagctgccggaccaaagataa

SEQ ID NO: 140056 - DNA, 647 bp, Homo sapiens
gtcgacaccaggttactagtcccacatatcgtaggcatggttctaacctacataacaacagcaacccaatcctacacgtgaccaattacaattggccattctccacaatattagaggtatacgcaaaatatatggttaaattcaaagcgccacaagagaagctggttaggggcatacgacaacagccgctggcgaacccataccggacaaaattttataccccacattacatcacactgggtgtgttttgtcttgtggttacatggatcagagcaccccagtggacgctcttatacccttttctgacggtcgacaatccaatccattcggacaattacatggccacgtttatggacagggcagctggcagaacaagcccggccacaacaaagctttacacaagattaccacctagcatttttccctactctcgcatggggaaccccacactaccatcggcgctacggcgtttcacttctgagttcggcatgggtcagatagggaccgaactgtctcacgacgttctaacccagctcgcgtaccactttaaatggcgaacagccatacccttgggactacttcagccccaggatgtgatgagccgacatcgaggtgccaaacaccgcgtcgatatgaactcttgggcg

SEQ ID NO: 140057 - DNA, 2317 bp, Homo sapiens
atggcgcggcgtgcagcgctggcgcgtgcgattgcgctggagccggatctcatcatgtttgatgaaccttttgttgggcaagatcccatcaccatgggcgtactggtgaagctgatttctgagctgaacagcgcgctgggcgtgacttgtgtggtggtttctcacgatgtgccggaagtgttaagtattgcggatcacgcctggatcctggcggacaaaaaaattgtcgctcatggcagtgcccaggcgttgcaggcgaatcctgatccgcgcgtacgtcagtttctggttagtgcgtgggcgtcgtggggtggcgctcgggactcgccgcggccgagtgagatcaatctgctccttaacgcacgtgtccttttggccagagcgtcggtgaccccgcttggtgtggcggcggtctgccgctatcgatatcgccactgcagcttaaggctaccgtggaactttcggcgaattctcaggttctccgctgtggacccgtggaggaaccagtgggccacagtgattgcagagcggcgcggcttatccggcctacgggtaggtatatccggctttggtggaggcgcgctccaaatccaggttgaacaaaacatacacaaaaaatatagatctccgtcacatttttgcgttatacaggaagctcgccactgtgaaggaggtactgctatgacgtcactctctcgtccgcgcgtggagtttatctccaccattttgcagaccgtactcaatcttggtgatcatcaacctgattacaacgatattttgtcgcaacgtattcaaagtagccaaagggcgctgggactggaagtcaatctggcggaagaaaatgaactgacgatggactctcttaccgaaagcctggaatgggccgatgtggtggtgattggtcccgttaaaataggaaagcagccacacgttaatgcaatcaaaaatggctttattcgcttaatgaatatggctatccgcatttggtttagtactttccgtctgaaagacgacgttgttatttcatctgtgataacggcgcttgaacttggttatcgcgcaattgataccgcacaaatctatgataacgaagccgcagtagaaccgatggcggctgcttatgttcagccttctcgtcgcccgaccgatggtcgctacggcgaaaagggcccaacagctgcagtcacccgggtagaccgatcatcccagggcaccacacgggtacacgcacaccacgcggagttgcggcgcccaacagtacggccgcgaaacgcgcccaaaaacaccggctcgctttccggcaatttactggctgatttcgtacgcggaaatcctgaagaaagttttccgcccgacgtcgtggctggcattcatatgcatcgacgtatcgacgtattgactgacaatctgccggaagtccgcgaagcacgggagtggtttcgtagtgaaacgcgccgcgttgcgcctattacgctggatgtcatcgcagtgacaatgccgacaacatgttgcacattgaaaatatcgcccttatgccgggaattaattttaaccctggcaaacaggacgacgactcagcgtgctgagccaatgacccgcagattaattcaggtcctgtttgatgaactccctcagcagccacaacaacagctgcacctgcccgtttcttctcatcctaaaatccgcacgatggtggagatgatggcgaaagggcctgtcgagtggggggcattggggcaatgggctggcttttttgcgatgagtgaacgcaatcttgcccgactgatagtaaaagagacggggttgagttttcgccagtggcgtcagcagttacagctgattatggcgcttcagggattagtgaaaggcgatactgtacagaaagttgctcatacgctggggtatgattcaacaacggccatttattactatgttaagaaagcctgggaaaacggcaggtaccagcttataccatcggcgctacggcgtttcacttctgagttcggcatggggtcaggtgggaccaccgcgctactgccgccaggcaaattctgttttatcagaccgcttctgcgttctgatttaatctgtatcaggctgaaaatcttctctcatccgccaaaacagcttcggcgttgtaaggttaagcctcacggttcattagtaccgagtcaaacggaagaacgacactcgcacggacaccacgccaaggatcgtcgatcaagtggctgtgtacgaaccccggtagcccgacatgccctaccggacatggtggaccaccgtagacacatcgcaggccacccggaaaggcaccacg

SEQ ID NO: 140058 - DNA, 2168 bp, Homo sapiens
ggctctttcgccttttccagcgcgcgcacctttctttcggcatcacaagccaattggaaaccagtggagtcaatggtgtaaccgtcacgctcagcttggtacagctcacgttttacggtaacgttagtgagatcatcagacatcaatgtcaacttacacggcacggcaatcacccgctgccactgacggcaatccagggtatcgccctctttagtgacaatcaggctgcctatcgcttccgggctgaccagcgcacgttgcggccctttggtctgccagtagcccgccagccagtccggcgcgggggttttcacgacattgttatagttttcgacttcggcacagcccgccagcaacaagagcgcgcctgcaattgcgagttttttcatcattcgtcctgcatgagaagaaaagaggattgtggcattaaagccctgatgtcgccagcctttcaagaggctacattcatgtcatggcagcaattcaaacacgcctggttgattaaattctgggcccccatccctgcggtcatcgcggcgggtattctctctacttactattttggcattactggcaccttttgggctgtcacgggtgaatttacccgttggggcggccagctcctgcaactgttcggcgtccatgctgaagagtggggttactttaaaattatccatctggaaggatcgccattaacccgcatcgacgggatgatgatcctcggtatgtttggcggctgctttgccgcagcgctgtgggccaacaatgtagcggtaccgacatggtgtaatggctgcggcacaagtcatgaggtgcgggtcattaccgcaccgccttactacccgcaatggcaggtgggcgagaactattccgcctggcgctacaaacgagaagagggggccgccacggtgtggcgctgcccgctgtatgtgccaaaacagccgagcaccctgaaacgcctgttgcatctgggcagttttgccgtcagcagtttctttccgctgatggcgcaacgtcgctggaagccggatcgcattattggcgtggtgccaacgctgttttgcgcgccgggaatgcgcctgctggcgaaactctctggtgcgcgtaccgtgctgcatattcaggattacgaagtggacgccatgctggggctgggccttgccggaaaaggcaaaggcggcaaagtggcacagctggcaacggcgttcgaacgtagcggactgcataacgtcgataacgtctccacgatttcgcgttcgatgatgaataaagccatcgaaaaaggcgtggcggcggaaaacgtcatcttcttccccaactggtcggaaattgcccgttttcagcatgttgcagatgccgatgttgatgcccttcgtaaccagcttgacctgccggataacaaaaaaatcattctttactccggcaatattggtgaaaagcaggggctggaaaacgttattgaagctgccgatcgtctgggcgatgaaccggtgaattttgccattgtcggccagggcggcggcaaagcgcggctggaaaaaatggcgcagcagcgtggactgcgcaacatgcaatttttcccgctgcaatcgtatgacgctttacccgcactgctgaagatgggcgattgccatctggtggtgcaaaaacgcggcgcggcagatgccgtattgccgtcgaaactgaccaatattctggcagtaggcggtaacgcggtgattactgctgaagcctacacagaactggggcagctttgcgaaacctttccgggcattgcggtttgcgttgaaccggaatcggtcgaggcgctggtggcggggatccgtcaggcgctcctgctgcccaaacacaacacggtggcacgtgaatatgccgaacgcacgctcgataaagagaactcgaaactctatccagttgtgatggcaggtggctccggtagccgcttatggccgctttcccgcgtactttatcccaagcagtttttatgcctgaaaggcgatctcaccatgctgcaaaccaccatctgccgcctgaacggcggtcaggctcggcgtcggtgccgataccatactgacgtgacccggcgcgaggaacgcatcgataccgttatccggctgttccagcaaactgcgcaacgtcgggataagcgtaatgtgctggcagaagaa

SEQ ID NO: 140059 - DNA, 2544 bp, Homo sapiens
atggtggcgttttatcgccatgccgggcgcatgtggccgggaattgcgctgagctgttcgctgggaaatatcgccgcatccatcctgcttttttccaccagctcgctgaacatgacctggacgaccatcaatattgttgaagccgtggtcggggcagtgctgctacgtagattgctggccgtggtataaccccttgcaaaatctggctgactggctgcgtctggcactcggcagcgccattgttccgcctctgttggggggtgttctggttgtcctgctgacgcccggagacgatcctctcagggcatttttgatatgggtactgtcagaatccatcggcgctctggcactggtgccgctgggattgttatttaaaccacactatctgctgcgccatcgcaacccacggttgctttttgagtcgctgctcacgttagccatcacactgacgttaagctggctttcgatgctgtatctgccgtggccttttactttcattattgtgctgttgatgtggagcgccgtgcgtctgccacgaatggaagcctttttgatcttccttaccacggtgatgatggtgtcgctgatgatggccgcggatccctccctgcttgctacgccgcgtacgtacctgatgagccatatgccgtggctacctgtttttgctgatccatcgtagcccgccaacatcatggtaccatggtgatgtatgcctttcgtgcgggaagcgaaacacatttccgaaagcgaaacccactttcggtaacgcgatggaatattccgctgatcggttatggcctgttagtgggcaccgagggacaatggctgcaaaccaacaaagcgctctgccagtttctcgggtacagtcaggaagagctgcgcggactcacctttcagcaactgacctggccggaggatctcaataaagatctccaacaggttgaaaagctgataagcggtgaaataaacacctatgcctactcgtgcctggggctttgtgctgccttctatgtcggtccgctactctgttgttcttcggggccgccgtggatcattccccggattatgcctgatgaagcgcaacccttgccggatagtgccttgccgcgcgtcgccccactggcatggaaaacgggcaccagctatggctatcgtgacgcctgggcgattggggttaacgctcgctatgtcattgggatctggactggcagaccggacggcacgcccgttgttggtcagtttggctttgccagtgccgtaccattgttgaatcaggtcaataatatcttactgtcgcgcagtgcgaatctgccggaagacccgcgcccgaactcagtcactcgtggcgttatctgctggccgggcggacagtctttgccggaaggtgacggtaactgtcgccgccgcctggcaacctggctgctggacgggagtcagccgccaactctattactgccggagcaggaaggcattaatggcattcgtttccccatctggctggatgaaaatggcaaacgtgttgccgctgattgcccgcaagcgcgacaagaaatgataaatgtctggccgctaccgctggaacactggctgcccgcatcagaacgtcgcgctgtgcgcttaccaccggcctcgacaagttgcccgccatacggtcacgatgcccagctcccgctgcagctgacaggcgttcgcgatggcgcgattattactagcttcgtcgttagtcttgttgtatctcgctgctgcatcgtgcggagcccaaacaaggaccgagtaaaagggaacctccaaaatgcgctccaaagaacgaacagcggaggtgtgcaaaataaaaccgtaaagtatgaacagcggctcaacttgaataaaactcgctgggaacaatttaatgcctccataaaaggtaaaccgggaaacgtgcccggttcaatttctgcaaatagcgataacagccgtcaagtttctctcagcaccgacggtggttttgtattgcatagcggtggactgactttcagtaatgatagttttagcgactccgatacactggcggtagttcaggctccaggtgctcaaggagcgcgaataaattatggcaacagtactatcgatcgatggggttatggtgtcaccagcgctctttctccttatcatgaaaaccgtatcgcgctggatatcaacgatcttgagaacgatgttgaattaaaaagtaccagtgcagtagctgtaccgcgtcagggttcagtcgtctttgctgattttgaaaccgtgcaagggcaatcagccattatgaacatcacacgaagtgatggtaaaaatattccatttgctgcagatatttatgatgagcaaggcaatgtcattggtaatgttggacagggtggacaagcatttgttcgtggtattgagcagcagggaaatatcagcattaaatggctcgaacaaagtaaacccgtaagttgtcttgcgcattatcaacaaagcccagaagcagaaaaaatagcacaatctattattctgaatggaattcggtgtcagattcagtaa

SEQ ID NO: 140060 - DNA, 2339 bp, Homo sapiens
  misc_feature (1)...(2339): n = a,t,c or g
gtcaggcgctcntgctgcccaaacacaacacggtggcacgtgaatatgccgaacgcacgctcgataaagagaacgtgttacgtcaatttataaatgatattcggggataattatggcgcagtcgaaactctatccagttgtgatggcaggtggctccggtagccgcttatggccgctttcccgcgtactttatcccaagcagtttttatgcctgaaaggcgatctcaccatgctgcaaaccaccatctgccgcctgaacggcgtggagtgcgaaagcccggtggtgatttgcaatgagcagcaccgctttattgtcgcggaacagctgcgtcaactgaacaaacttaccgagaacattattctcgaaccggcagggcgaaacacggcacctgccattgcgctggcggcgctggcggcaaaacgtcatagcccggagagcgacccgttaatgctggtattggcggcggatcatgtgattgccgatgaagacgcgttccgtgccgccgtgcgtaatgccatgccatatgccgaagcgggcaagctggtgaccttcggcattgtgccggatctaccagaaaccggttatggctatattcgtcgcggtgaagtgtctgcgggtgagcaggatatggtggcctttgaagtggcgcagtttgtcgaaaaaccgaatctggaaaccgctcaggcctatgtggcaagcggcgaatattactggaacagcggtatgttcctgttccgcgccggacgctatctcgaagaactgaaaaaatatcgcccggatatcctcgatgcctgtgaaaaagcgatgagcgccgtcgatccggatctcaattttattcgcgtggatgaagaagcgttctcgcctgtccggaagagtccggggattacgcggccatgggacgtacgggagatgctgttgtgccattgtccctcggtgcccactaacgccataccgatagcggaatattccatcgcgttccgaaagtgggtttcgctttcggaaatgtgtttgcgttccgcacgaaaggcatacatcaccatggtcatgatgttggcgggcagcaggatcagcaaaaacggtagccacggcatatggctcatcaggtacgtacgcggcgtagcaagcagggagggatccgcggccatcatcagcgacaccatcatcaccgtggtaaggaagatcaaaaaggcttccattcgtggcagacgcacggcgctccacatcaacagcacaataatgaaagtaaaaggccacggcagatacagcatcgaaagccagcttaacgtcagtgtgatggctaacttccctactctcgcatggggagaccccacactaccatcggcgctacggcgtttcacttctgagttcggcatggggtcaggtgggaccaccgcgctactgccgccagacaaatgctttgtctaatctgccgaactttaacctaaaaagtggtgctgatacccagagtcgaactggggacctcacccttaccaagggtgcgctctaccaactgagccatatcagcacgctaaatttgatgcctggcagttccctactctcgcatggggagaccccacactaccatcggcgctacggcgtttcacttctgagttcggcatgggaattcggtggtgacacctacggttctgacaacttcatgcagcagcgtggtaacggcttcgcgacctaccgtaacactgacttcttcggtctggttgacggcctgaactttgctgttcagtaccagggtaaaaacggcaacccatctggtgaaggctttactagtggcgtaactaacaacggtcgtgacgcactgcgtcaaaacggcgacggcgtcggcggttctatcacttatgattacgaaggtttcggtatcggtggtgcgatctccagctccaaacgtactgatgctcagaacaccgctgcttacatcggtaacggcgaccgtgctgaaacctacactggtggtctgaaatacgacgctaacaacatctacctggctgctcagtacacccagacctacaacgcaactcgcgtaggttccctgggttgggcgaacaaagcacagaacttcgaagctgttgctcagtaccagttcgacttcggtctgcgtccgtccctggcttacctgcagtctaaaggtaaaaacctgggtcgtggctacgacgacgaagatatcctgaaatatgttgatgttggtgctacctactacttcaacaaaaacatgtccacctacgttgactacaaaatcaacctgctggacgacaaccagttcactcgtgacgctggcatcaacactgataacatcgtagctctgggtctggtttaccagttctaa

SEQ ID NO: 140061 - DNA, 469 bp, Homo sapiens
cgctgcgcgatatcgcagacgctatcacccctgcacttttgcacgaagtgattgctattttgcatcacgatttgcggaccaaatttggtattgccgaaccgcgcattctggtctgcgggctgaatccgcacgcgggcgaaggcggtcatatgggtacggaagagatagacaccattattccggtgctcaatgagctgcgggcgcaggggatgaaactcaacgggccgctgcctgccgataccctgtttcagccgaaatatcttgataacgccgacgccgtgctggcgatgtaccacgatcagggtcttcccgtgcacggcaccgcgcttgaactggcgggacgtggcaaagccgatgtcggcagttttattacggcgcttaatctcgccatcaaaatgattgttaacacccaatgaataatcgagtccaccagggccacttagcccgtaaacgcttcgggcaaaacttt

SEQ ID NO: 140062 - DNA, 720 bp, Homo sapiens
atggagcagaataagtttgctgcaccaagatctgtgtccaggaaaggtaaggtgactcacgatgcggttcaggcaagtaggtgctccaaatgcctgcatttctgcctgaaggtgatcatagagggccttgctacaccacaatctcatgggagcatggccacaagtgccagcagctgcagagatggttcccgcttagccagaccccaaatagctgctatatcaccagcattttttcacctccacggaggaagagtggaaaggacaaagagcagtgatgacccctcacaaccatcagtcagaatactgccacttggccccaccaaggtgcaaaggcgtcaaaccacaattttttttaaagctgagcacattgtcttcctgaataagatagaggtttctttgcatgctgttttgggaagatggcagatttttcttacaggcctatctaagggttccaggaaaagggagccatcaactgaaaatcaagttgcattatcatttgagtttgatggcctgaagccgaatatcttgataacgccgacgccgtgctggcgatgtaccacgatcagggcttcccgtgctaaaataccagggcttcgggcgcggtgtgaacattacgcgggcctgccctttattcgcacatcagtggaccacggcaccgcgcttgaatggcggacgtgcaagccgatggtaccagactcgattgtatcctgtatactgtaa

SEQ ID NO: 140063 - DNA, 621 bp, Homo sapiens
ttagatggctgtgtgcagttcactctcaccacgacgttcaccagctttcctactgacttcacggacgtttggacacaccacctggttttcggcgtaaatccctgacggggactgatacacggaactgcattgacggaccatgtgggtaaaacggaaactattcttccgactaaatacgcaaatatctacagcattaatactagcaaagacaggtttctcacgaaacctgcgtttgctgaagtcgtgctcttccttcatccacgagagcttcaaacctgttcgtttttcctcagtcagaacatgctggttaaggtaggtcatcaacggcattggttcaccgaagttgacgtaaccctgaccgagattacgcagcttgcttaaaccgcgcagcatctgcggcaggctctctttctctttcgtcgcgccgcgcagttctttggcgtaagtacccacttccatgacgtgctcataaccgatatagatcggaatcagcgtaatcggacgcgtgccgccacgcagcatcgcctgaatggtcatcgacagcgtaccagttttcggatccagcaaacgccccgtacgggaacgaccgccttccacgaagtactcggtgatgttgatcat

SEQ ID NO: 140064 - DNA, 5631 bp, Homo sapiens
atgcaaaaagaatatgcttactggatggacgggttgaaaacctgcaagccggacaacaggaaaaacgcgttgtcaaacttcggatggtacccttctcaaccgctactgggacgatcgcgatacgccacgacagagtcatgggtggaagatattgccaccgccaaaagcaatccgaatcgcctgccactgaaatttaccgcgacctgcgctctgccgctgcgtctggctggatttcagctcgcgctggatggacaacccgcagcagttaaataccttagcaccaccagcatcgtaccggtcgatctgaacagcctgatgtttaaaatgaaaaaatcctcgcccgcgccagcaaagctgccggagataacgcgatggaaaccagtacgaaacgctggcaaatgcccgtcaaaaagggatcgaaaaaacctgtggaacgatcaacaaggctggtatgccgattacgacctgaaaagcataaacgcgtcggcacactctgcgtcgggcgatccacacgctccatcgtcataccatcgtactcaatggtgtaccgtcacgctcaacctcgtacagctcacgttttacggtaacgttagtggatcatcagacatcaatgtcaacttacccggcacggcaatcacccgctgcactgacggcaatccaggttcgcgtgaagcggttaatatggacgagcgcaaaatcgactttagcctgatctccacgaacgcgcaccgcgcaacgtcgcttcagttgggttgtatattcctggcggcccgccccgctcttctcaacggtattaatgctggcgactccggcgagtatgcgggctgtaaaaaagtggtgctgtgctcaccgccgccgattgccgatggatcctttatgcggcgcagctgtgcggtgtgcaggacgtgtttaacgtcgcggcgcacaggccattgccgcactggcgtttggtacggaatctgtgccaaagtggacaaaatcttcgggccgggtaacgcctttgtcaccgaagcgaacgtcagatttagcgcagtgcgtgggatctccaaccagtacggcccggagcacctgatcattcagacccgcaaccccgtgaactggtcgatagcatcaccagcgccggttcggtatttcttgggactggtcaccggaatcggcagcgtttcgtttcacttcctgaccaccgaaaatcaatacttctttgtggcccttcagcattatactgcgctggtggtcacctgccccatggtgttctgcatgtttttactgtgttgcgaaaacgcttcgatacaacgcgaatcgcaatcgaaacaatcgggccagcacaatcaaaatgatcgacagttgccaactgtaatagaacatcagatgaacaggccgatgatcgacgcaccttcacgcacaacagtaatcagtcgccggaagaagaagaagcaacctgttcggaatcgtagattgaacgtggcaacccgcgacggacatttacagggatggctttatcgaaggataatgaaggatgaaactgccggaaggcgattaaacgccatcggcagcaaatcaaataattacttcgccggaatttctttcagcagttcatcagcagtgtccagtaatgacctacgctttcgatgtgaacttgctcatcggagagcgctgataggtttcacgtaccagtgcatcaccggagaattagcgtccgctgcaagccaggatatggaccgagctcaacattttggaccagtacagcatcagttttccgccactactgctcggaaccggattgccgcaatacccttgatcatcgtacttacgctacgattcaccgtcgctggccattcagcatggcgaaaagcgtccagcgtacatcgagaaccattcatcatcgccacgacgaactaccggaccaagcggttttttgagataacttccggctggaaggcggagatgctatccattagaggccattgtcacccggatgcttttgacgaaagtgaaactgagccggaggatgaagatgtcgatgagccaacacctgaaaatcatgaagaaaaaatgatgaggacgttaaccgtaattgaatcctgttccgggtgctggttgaataagtttctacacgcgacacgggcacagtggtgtttcgttcataatcggcgagaaaatgccggaaacgccctggcggttaacttcaacgccaacgaggattttgttgtaacactgtactggagtcagccatgctcgcgcctgctagctacaccagcggcggttggcgtaccgtatactcataggtccagccattctgacgggcggcgtagtgaaaaccggcactttaaccagtttatccgtggcggcatcgccttcgccacgcctccggtgccagaaatgttcgatgccatttgctggacgctccctgctctggcgaaggcgtggtgcgtaaagatcccgagcgctaaaaaactggtcaccagaaagcaatcaggaaatcgcagctacacacgggagcttatcgacagcgcctttcatgcattacgtcctggtgcgttatgtcccgctggtgcgtcacgaagcattgcgcctcaggttcgactgcccgcgagcgtggaacttgacgatctgctacaggcggcggcattgggttacttaatgccgtcgaacgctatgacgccctacaaggacggcatttacaacttacgcagtgcagcgtatccgtggcgctatgctggagaacttcgcagccgtgactgggtgccgcgcagcccagctcttctcctacgatggtggcgcgaagagcacggcgatagcatcgaactggttactgatgatcatagcgagaaaacccgctacaacaactactggacagtaatctgcgccagcggtgatggaagccatcgaaacgttgccggagcgcgaaaaactggtattaacctctattaccaggaagagctgaatctcaaagagattggcgcggtgctgagttcgcgacggcaaaaagtgaataaaatcgagatttcccgcctggacacgctgcttgatgaaaatgctggcaacggaacaaaaatcatgggcggcattgtgccgattttgcgaagcatcgcgcatggggcgcgactacgacatgacgcagattttcacggtacattagtggaagccgatcctttccacgccgtgacgctcgttgccaatacgacacccaaccgttgcaagccctcgaagcgccggtcgaaccatggttttgacaagccgcagagagcaataaccgccacggaaggaaatgcgagtgatttcaccgtcccggcacaaccgatccgccaaaaagaggcgtaccaatgtcgatatagtccccgcgcggacaatcacttcgtcaatgactgccaacgggagttgttgtactgtgggcgcaacaacatgcccagagctttaccaaagtcctgcccggccccaccagcaggggatgcggattcggaaaacgcgcgacgaaatcgaccaagcgttgatgaccgtcagtaccgcggcgtaacgcacaggcagcgaggcggaagcgccagcacgcccccaccagatccgtttcatcaatcgggatcgcaccggcaaattgcgcagcggcagttgtacgccctcaagccagattgtgcgccagagagcgaaagggtatgcgcgcccgcgccaatcaccgtggcgcgccggtttgcgccggaaactgtacgttcatctcacgcaggcgcggatggtctgcagcgcagttgccagcagcgggccaatatcggcaaaacagaacggggcgacgatcaacgttacgagggcgagaaaatttgccataaccagatgccaccaaactgcgtttgcaaaacagcctgcaaatgtttggcgaaaatacatctgtccatcccgttcccatcaacccgcctgaacggcgagcattgcagtggcactgatcaaactccagacggcagcgtctgttgtaaacgcagaaaacgcttcgccagcaagcgacgaatcgtcaaggggccagccaggcaccgtacattgcgaagccaaaaaccagcatcagcgagtgaaatggataaatcgcagcgcgatccagcatccctacgtgtaccgcacaggccatgcacgggtcaaaggagtgaatggtacgaccacttccagcggtttattcggatcggcaaccggtgtacccaccagcgctgctctgagagagcataccgcgcggcgcttcgaggaagccaacactttgaattcacccgttgccggaatgttcggcttcacaaaggtggtgtgacgcctttggcgatattggtgatcagtgcactgtattggttttgcaggattcctgcaattcacagcagtgaacggaagctgccgtttttactgtcggtcgggaatccggcacgctcaggtagttcaccgcacctttaccgcgtgtcagccattcgggtagaacgcggcaataactgcggtatcaaccttataaacctgctcacaaagtcgctcagtttgtcgatgaaagacttgatgtacatcaggcgctcaggtagtgcgctacgcaatcaggttcacttccggcggcagtttcatcgccggatgaccccagtggatactgggtgccttgtaccctatcccgaaattggatccgctcgaatcattggcaaggccacaaattgtgttgttaaacacctggcgcgagctggctacagcgtgaccgttttgaaatgctgctggtcaccgccgatgaagcctggcatacagccgtccgctggtggattttggtatgcgccagccgattcagtttcaccgcgtatcccagcgcagaaccgtaaacagataggcatcagcaattgtaaatctttgccgcagatcccagtgctcaatccttcagtgcctcgttcacatattgcagttcttctccagctgcgcgcgaactgtcggtttgtactcttccggtgtatagggcgaaacagagcgggaaatactgtttaccggtgccagaactggcggtcggggacgctgtcggcaagatactgcataatcgctacgcttccgtcagcaaagtaccgtcatccagcagcaatgcaggcacctgcccctagggttaacggcaaagtaatcgtcaccgttttcgagacgttttttcataaatccacactgacgaggccgtggtcgcggcctgctaccgttcaagactggagctttcacgcggcaattgcggcgggcgtcccgattattcccgtgtgcgtcttacaacttcgaataagattaatcttaatcgactgcacaacggtctgtgaggtcgaaatgctgccgccaatgacgtcactactacgtttacgatcactttcgcgatacttcgctgtgaacctggaagctcacttcgtgttcgccagtggtacgcgaacgccgttcggcagacgaacttcgctcttagccacttcaacgccagcgcagttacagcgtcagcgatgtcgcgagtaccgatggaaccgaacagttaccttcgtcgccagctttagacgcgatggtaacagtttccagtgcattgttttctcagcgcgagcattagcagctgccagaacttcagccagtttagctccagttcagcgcgacgagcttcgaagaattcaatgtttttcttggtag

SEQ ID NO: 140065 - DNA, 1857 bp, Homo sapiens
atgtggtggaacgctggcgcgagcgtgcgatggttgtctgaacggcgaatttgccgcgcgatcacaggtccggtgcataaaggcgttattaacgacgctggcattcctttaccggtcataccgagtttttcgaagagcgttcgcaggcgaaaaaggtgtgatgatgctggcgaccgaagaacttcgcgtggcgctggcaacgacgctttaccgctgcgcgatatcgcagacgctatcacccctgcacttttgcacaaccgaaatatcttgataacgccgacgccgtgctggcgatgtacccgatcagggtcttcccgtgctaaaataccagggcttcgggcgcggtgtgacattacgctgggcctgccctttattcgcacatcagtgggacacgggcagcccttgaactggcgggacgtggccaaccgatgttggcagttttatacgcccttattctgccatcaaatgattgtaaaaccaatgcataatcgaatccccagggcaacttatcgcggggcagtaaaatccgccattggtttaggctgctgctgtctgaaggcatcggcgacacgctgcgcgtatcgctggcggcgatccggtcgaagagatcaaagtcggtttcgatattttgaaatcgctggtatccgttcgcgagggatcaacttcatcgcctgcccgacctgttcgcgcaggaatttgatgttatcggtacggttaacgcgctggagcaacgcctggagatatcatcactccgatggacgtttcgattatcggctgcgtggtgaatgcccaggtgaggcgctggtttctacactcggcgtcaccggcggcaacaaaaaagcggcctctatgaagatgggtgcgcaaagaccgtctggacaacaagatatgatcgaccagctggaagcacgcattcgtgcgaaagccagtcagcggacgaagcgcgtcgaattgacgttcagcaggttgaaaaataataacgtggaaaagcaggatacggcgttattcgcgctgtaccagcgaagattgcgctgcgtaagaaaagtcaggcgctacgtcatggcggctgtcagtgctggatgcggcggcggtgtttgtgccgtcagtgcttacatgccgctcaacagattgcccaacgcgcaggaggccaacaatgaatacaccagcttcgaaaactgcattaagtgcaccgtctgcaccaccgcctgccgcgtgacgctgcgtaataacgatccgaaactcccttatctggtcaaagctggattgaagatgaaaagggtaacaagatcacctcgccgttactgtgctgccgccagtgcaacgcatcgattcaatgatgaacgggcaggtaaagtgcagggaatgccggatatcaacaaattgccagccgatcgtgaaacatgttctactttaacgtgcgcgagatcccgccaaaatcaaacaaacccataccctgcaaatcgcgctgcaaacgcgtatcaagttgttctggcgaccaaggcgctggaaaaggtcagtatgaaaagtccgtggcagcacaaggtgagctcacccgcagcggtcaggcatttaccgtcaataacccaacgccgtacacgtgattatcagcaacgccagtgcgcagaaaaacggatgccgctgttcttccagtgcaatggcaacagctgccaggtggatgagagcagagccgcaaagctgaatgacggggggagttatgagtcaaaagttgtagtgggcgcaggctgctggttacaactttatgctgggcagcgagaaattcctcttaccaactggaacgagtacgagtttgaccgtgacgctacctatgcgcgggtaatggcggtaaagaagggctga

SEQ ID NO: 140066 - DNA, 2088 bp, Homo sapiens
atgggcattgtggcatctgcatctgtacaggctgcagaaatatataataaagacggtaataaactggatgtctatggcaaagttaaagccatgcattatatgagtgataacgccagtaaagatggcgaccagagttatatccgttttggtttcaaaggcgaaacacaaattaacgatcaactgactggttatggtcgttgggaagcagagtttgccgcctggaccgatatgttcccggaatttggtggcgattcctcggcgcagaccgacaactttatgaccaaacgcgccagcggtctggcgacgtatcggaaaacgacttcttcggcgtatcgatggcctgaacttaacctgcaatatcacagatgcacatctgcggcgcgcgccatgctgctctccgggcgaccggtgatgcagattaacgagaggacagcagtgcgccgacagatgactgtgtatctgcgcgtagagcggatccacgagatagatccgttagtatctttgtcacacagcatgagtgtgatccccatagatgtggagcggccaatcgccgccgccccctgcacccccgggctctggcgaacaaaaacgccgctgcgcgtgccctcgacttatcccttacggctaccgggtcgggcgcgagtagtgtgtcatcgcacatttcgacttcatctttgcaaggactgggttttcatgttttctgggctgttaatcattctggttccactgattgtgggttacctcattccgcttcgccaacaagctgcgttaaaagttattaatcagctattaagctggatggtttaccttattctcttttttatgggtatcagtctggcgtttctcgataaccctcggccatatcttgccgacagcgtccccgaccgccagttgctggcaccggtaaacagtatttcccgctataaaaccatcgaatggctgaattacatcgccaccgagctgcataaaggtttcacacctctgtttcgccctgatacaccggaagagtacaaaccgacagttcgcgcgcactcggagaagaagctgcaatatgtgaacgaggcactgaaggatgagcactggatctgcgggcaaagatttacaattgctgatgcctatctgtttacggttctgcgctgggcatacgcggtgaaactgaatctggaagggttagagcacattgcagcatttatgcaacgtatggctgaacgtccggaagtacaagacgcgctgtcagcggaaggcttaaaaggatcccgtcatttgagtgccggggcgcggcggttgatcctcggtatcatcgtcaccttctcgctgattctggcgttaatctgcgttactcagccgtttaacccgctggcgcagtttatcttcctgatgctgctgtggggggtagcgctgatcgtacggcggatgccggggcgcttctcggcgctaatgttgattgtgctgtcgctgaccgtttcttgccgttatatctggtggcgttacacctctacgctgaactgggacgatccggtcagcctggtgtgcgggcttattctgctcttcgctgaaacgtacgcgtggattgtgctggtgctcggctacttccaggtagtatggccgctgaatcgtcagccggtgccattgccgaaagatatgtcgctgtggccgtcggtggatatctttgtcccgacttacaacgaagatctcaacgtgacgccagatgaactgaaacaagtactggacgttgccgcagcattaaaagcactgcgtgctgaaaacatctcaaccaaagtctttaatagtggattaggtatttccgtattccgcgacaactccacccgtacccgcttctcttatgcttccgcgcttaacctgctcggccttgcacaacaagatctcgacgaaggcaaatcacaaatcgctcacggcgaaaccgtgcgtgaaaccgccaatatgatctccttctgcgccgacgctattggtattcgcgacgatatgtatctgggcgcaggcaacgcctatatgcgtgaagttggcgctgcacttgatgacggttacaagcaggcgtccggctttagtgaacctgcaatgcgatattga

SEQ ID NO: 140067 - DNA, 3024 bp, Homo sapiens; identical to SEQ ID NO: 139058

SEQ ID NO: 140068 - DNA, 1443 bp, Homo sapiens
ttattcccgccagaatacaatcggcaatgtcggacacaggagacccaatgctccggacactggtgtcgcttcagattctgcgtagcgcgtggcgactgtagaaagatagcgtgaatgaataacttgaaggtgcaccggtatcgctggaaatcgctgaacctgaagcctcgtatgggccgggaaatcccggaagtccgcaatgtgcaccaggtacatgcatggatggtaggcgagaagccggtgaagacgttgcatgtgcaggtgatcccgccacacgatcacgatgccttgttggatcagatccaacactacctgatggatcagtgcgctgttgatccacatccggctgccgttgagcgcaataaaggtcaggatgatgtactccagagacatggcgtaaacgccctgaagtgcaaaaataacgacgctaatcacgttaataatcacccacaacagccagttttccacatacttacgcgtcatcagaatcattgccacgatagataacaccatcatgcatgaatcccagaacgggaaagcgtccggttgcagttcaggcatcacaacctgtaatcctaatgcttgcatgatcatgactgccacgcgggtcaaaaatgcaaacaccggattgataaataccgtcatcagaccaatcgaaacaacgcaaaccgccaaccagctgagtgccttcggcaatggcaaccagcgaattttcaactccgcctcgttctgactggtttgtcgcgaccacgcataccaaccgtaaatattcgcggcaaagaaaaacacctgtaatagcaggctggcatacagctgaatgccagtttctgggtggtcgtcacacagattgtcatccttgacgccgtcttctcgttggatgcggtaattactgcagtagggatggttaaccatctgccggtgatgatggcggcggtagtgattgcgatggcggttatgttgctggcatccaaaccgctgacgcgattcgttaaccagcaccccacggtggtggtgctctgtctgagcttcctgtatgccgcgattggcttctcgatcatcatcgaagtgtttaaccagattgcgcgtcgcaactttattcgccaccagtcgactttgccgctgcgagcgcgtactgccgatgccatcctgcgtttgatgggcgggaaacgtcaggccaatgttcagcacgatgccgataacccgatgccgatgccgatcccggaaggtgcatttgccgaagaagaacgttacatgattaacggcgtactgacgctggcgtcgcgttctagtctgttcccggtatgtcgcggtgaactggatgaaatcatcggtattgtacgtgctaaagaactgctggtggcgagtcacatctgtaaggctagtctgctgcagtctactcgtggctatgtctgctgatgcttgtgcttgatgcagttggcccat

SEQ ID NO: 140069 - DNA, 4120 bp, Homo sapiens
  misc_feature (1)...(4120): n = a,t,c or g
tcacgcgcaggtcgattttgtcgggtccgggcaaaaaaacggattttgctcgacatgcgaccagtctttgatatccagcggaatgtcgcccatctgggtcaggcagccacggatttcaataccaaatttctcggcgagatattttttggcaatagctcctgccgccacgcgcatggcggtttcgcgggcggaagaacgtccaccgccgcgataatcgcgcagaccgtatttttgttcgtaggtgtaatcggcatggcctggacggaaaacgtccttaatcgcactgtaatcctgagagcgctggtcagtgttttcgatcaacaagccaatgctggtgccggtagtaacgccttcaaaaacaccggagagaattttgacctgatccggctcgcggcgctgggtggtatagcgcgatgtcccagggcgacgacggtcgaggtcatgttgcaggtccgcttccgtcagcggaatgccatcgccgccgttatcaaactccagccaggtgaacggaacatccggatattgttccataagatgtaccatgctgttgccgacttcacaaatcaacacgccatcatcagcaaggtaatctgccgcgttaccgagaatgcgacgcgtcagtttcaggccgtcagtgccagatgccaggcccagttccggctcgtggcggtattcgtttggcaggtcggacatatcttccgcatcgacatacggcgggttagtgacaatcaggtcgtactgcactttcggcaagtcgcggaacagatcggaacgaatcggaatgacgttgtggatcagaccgtgttcttcgatgttctgttcagcaaccgccagcgcgtctggagagatatccaccgcgtcgacttctgcatccgggaaggcataagcacaggcaatggcgatgcagccgcgtttcgcttttttcagctggtcggtcgcgctggcctttgcaaggtcaaggtccttatgtgctcgttctgcggaagcaaggccgtcagcaatttctttttgacgtttttcgatggctgccattaatggcggccatacgtacttcatgcagaacagaacgaacaggacaaacgcgatggctacgcgacagcgaacatcacgtacagacccagacctacagcgatcatcgggatagcatccaccagacccataacgataaagaacggcatacatgttaccgaacagtcgcaaaccgagtgaaactggtttggacagcaggcttaccccttcaaggattaagttgacaggaatgaacgcccagtgattgaacggctgcagcgtcaactctttcgtgaagccgccgatgcctttcattttgatgctgtagaacagaatcaggataaatacgcccagtgccatagacagcgttacgttcacgtccgcagacggaaccacacgcagtgcaggcagacccagtacatgttcagcaatgtacggcagcaggtcgataggcagtaaatccatcaggttcatcaggaatacccagacgaagatcgtcagggccagcggagcaatcagcttgcttttgccatggtacatgtctttcacgctaccattaacaaagccgatcaccagctcaatcgcggtctgaaacttacctggcacaccgctggtcgcctttttggacgctacggaataaaaccaggaacaacagacccagcaccaccgagaagaacatggagtcaatattgattgtccagaaggtggctggggggttttgtggatccaccagacgagaatgtacgcaggtccagaatcacccagtttcgcagcaacctgcggcattgtctggttaagaatgcgtgcgccctgagaaccacccactaccagcacacgaaccggaccttcacgtccagccaaacgttgctgcggcaacggcagcgccaacacatcggtacgcaccgggttacccactacttccgcattagggaaagcacctggaaacgcctgcatcactttggtggcaatcttcgccagccatttattggttaagcccgcaataccgttttgttcatgaagtacaaccggaatgcctaacgaccacgcggccagaccacctggacctgacacgtagcctcccataccgagcaccacgtcaggtttgtacgctttcataatcgcccgcgcctgacgccaggcgttgaagatacgcagcggggcagctatcagtgcttttataccttttccacgcagaccagagatacgaatgaaatcaatttcgatgccatgttttggcactaagtccgcttccatacggtcggcagtccccagccagcgaacttgccaaccaaacgcctgcgctttctccagacgcgtttcataatcaatacgcaacagcatcatgatggctgtcgacataatcagtaagctcgaaccaccgtaactgatcagcggcaatgtcagacctttggtcggtaacatccccgccgccgcgcctacgttaaccagcgcctggaagctaaaccagatgccaatagaacaggcgagaaaaccggaaaaacggtggtcaatttctaatgctttacggccaatcgacatcgcgcgaaaagcgacgaagaataccattaaaagtgccagcaccacaccgacataccccagttcttcgccgataatggcgaaaataaagtcagtgtgcgcttccggcagatactccagtttttgtaccgagttacctaaaccttgcccccaaagttcgccgcgaccaaacgccatcagcgattgcgttaactgatagccgctgccaaagggatcttcccacgggttccagaatgcggtaacacggcggatacggtacggttcggcgagtatcagcaacacaaccgctgaaatgcccataccgataatggcaatgaactgccacaatttcgctcccgccaggaacaacatcgccagcgtagtcacaaacaacaccaccaccgtaccaaggtctggctgtgccagcagtaacactgccaacaccagaatcacgcccatcggtttcaggagccgggtgatatgcaactcatcatcttgcagggtaatcagcccctgacgttgcatctcatttgccagcgcatcaatacgtcccggcaactcgtcgcgatcccagcgcagganacagtcccgtttcagcattgggtaaagcacattgacgtgctccatcaatacgtcgcgggagatgtagcgatgggtagagtccgtggagtagggcacgttgcgcatcagatccaggtagcagttgagttgctcggttaactgctcgcgggtgagtgagcgctgacgtgatgccagtagcgcagtacagcacaggttcatggcgtttgccgcgcctgcgttgttaatgcgtaccatcagatcggcagcaatattattgaccgtcggcgttaaccatgccggacgcaccgcttcgatgggatcgatagattcacgccagtcaggtacatgctggttaaggtaggtcatcaacggcattggttcaccgaagttgacgtaaccctgaccgagattacgcagcttgcttaaaccgcgcagcatctgcggcaggctctctttctctttcgtcgcgccgcgcagttctttggcgtaagtacccacttccatgacgtgctcataaccgatatagatcggaatcagcgtaatcggacgcgtgccgccacgcagcatcgccagttttcggatccagcaaacgcccgtacgggaacgaccgccttccacgaagtactcgacggaataaccacggctgaacagttcgccgagatactcccggaaaacggtggaataaagtttattgcctttaaacgtacggcgaataaagaacgcccccagacggcggaaaatcggcccggcaggccagaaattcaggttgatcccggcggcgatatgcggcggcaccagcccctggtgatacagcacgtaagaaagcagcaggtagtccatgtgactgcggtggcaaggcacatataccagctcatgaccgtcgtgggccagctggcgaacgcgctcagcgttatggacgttgatgccctggtaaagtcggttccaggtgaagcccagaatacactcagtcaggcgaatcatctcgtaagagaaattcgccgcaatctcttccatcagtgcaatcgcgttctgtgcg

SEQ ID NO: 140070 - DNA, 2853 bp, Homo sapiens
  misc_feature (1)...(2853): n = a,t,c or g
tcaccgcgtatgcccagcgcagaaccgtaaacagatagcatcagcaattgtaaatctttgcccgcagatccagtgctcatccttcaggcctcgttcacatattgcagcttcttctccagctgcgcgcgaactgtcgtttgtactcttccggtgtatcagggcgaaacagaggtgtgaaacctttagcagctcggtggcgatgtaattcagccattcgatggttttatagcgggaatactgtttaccggtgccagcaactggcggtcggggacgttgcttaaacccgcgcagcatctgcggcaggctctctttctctttcgtgcgccgcgcagttcctttggcgtaagtacccacttccatgacgtgctcaaaccgatatagatcggaatcagcgtaactcggaacggtgccgccacgcacatcgcctgaatggtcatcgacagcgtaccagttttcggatccagcaaagctccgtacgggaacgaccgcctccgggatcggcatcggcatcgggttatcggcatcgtgctgaacattggctgacgtttcccgcccatcaaacgcaggatggcatcggcagtacgcgctgcagcggcaaagtcgactggtggcgaataaagttgcgacgcgcaatctgttaaacacttcgatgatgatcgagaagccaatcgcggcatacaggtaactttcggaatgtggaaaccgaaaccttctctgagctcgttgtggtggtttcggttttttttggtggttgccagggccattgctttgtgttttggactccttaggcttggctgctatagtctgcttatttcgccgtaatgctgttaggcgtgccggatatcttcgtcgagtcaaatcgttccggtgaaatgccgtatcgccgctgtgtaggtcacgcccaggggcatattcgtccctcttatgcgagctgattcccttgattctggggttcacccgttcattgcgccactgtttgacgttatatgagcgnctctgccgcaggaagtcgaatccctggcgcagcaggtgggtaaccaaaacacgccagcactgagctgaacctgagccacatcctgatcccgcgtcgccgatcatgactgacgaacaggcccgtgtgaaactggaacagattgctgctgatatcaagagtggtaaaacgacttttgctgccgcagcgaaagagttctctcaggatccaggctctgctaaccagggcggcgatctcggctgggctacaccagatattttcgatccggccttccgtgacgccctgactcgcctgaacaaaggtcaaatgagtgcaccggttcactcttcattcggctggcatttaatcgaactgctggatacccgtaatgtcgataaaaccgacgctgcgcagaaagatcgtgcataccgcatgctgattaaccgtaagttctcggaagaagcagggggctggatgcaggaacaacgtgccagcgcctacgttaaaatcctgagcaactaatggttaaaacccaacgtgttgtgatcactcccggcgagcccgccgggattggcccggacttagttgtccagcttgcacagcgtgagtggccggtcgaactggttgtttgtgccgatgccactctccttaccaaccgggcagcgatgctcggtttgccgctcaccctccgcccttattcccccaactcccctgcacaaccgcaaactgcgggcacattaacgctacttcctgtcgcgctacgtgcacctgtcactgcggggcagttagcggttgaaaatgggcattatgtggtggaaacgctggcgcgagcgtgcgatggttgtctgaacggcgaatttgccgcgctgatcacaggtccgggggcataaaggcgttattaacgacgctggcattccttttaccggtcataccgagtttttcgaagagcgttcgcaggcgaaaaaggtggtgatgatgctggcgaccgaagaacttcgcgtggggctggcaacgacgcatttaccggtgcgcgatatcgcagacgctatcacccctgcacttttgcacgaagggattgctattttgcatcacgatttgcggaccaaatttggtattggcgaaccgcgcattctggtctgggggcctgaatccgcacgcgggcgaagggcgggcctatgggtacggaagagatagacaccattattccggtgctcaatgagctgcgggcgcaggggatgaaactcaacgggccgctgcctgccgataccctgtttcagccgaaatatcttgataacgccgacgccgtgcggccgatgtaccacgatcagggtcttcccgtgctaaaataccagggcttcgggcgcggtgtgaacattacgctgggcctgccctttattcgcacatcagtggaccgcggcaccgcgcttgaactggcgggacgtggcaaaagccgatgtcggcagttttattacggcgcttaatctcgccatcaaaatgattgttaacacccaatgaataatcgagtccaccagggccacttagcccgtaaacgcttcgggcaaaactttctcaacgatcagttcgtgatcgacagtattgtgtctgccattaacccgcaaaagggccaggcgatggtcgaaatcgggcccggtctgggcggcattgaccgaaccggtcggcgaacgtctggaccagctgacggtcatcgaacttggaccgcgatctggcggcacgtctgcaacgcatccattcggtagggatcactgaagccatgtcccgactgtgccttctgtgtcgcgacacaagggtggtcatccactggtagtggccgaaagcacggctttgagaatagcgatgggcacagatgctgtgtaccggatgcg

SEQ ID NO: 140071 - DNA, 3432 bp, Homo sapiens
atgcgtttaatccgcatttctacaaccatcatcattcataaaagccgctgcgcggcttttttacgggaaaaatctatgtccgtttacaccactgcccaactgctggcggtcaatgagaagaaattcaaattcgatccgcttttcctgcgtatctttttccgcgaaacctatcccttcagtacagagaaggtttacctgtcgcaaattcctggcctggtcaatatggcgctttacgtctcgccgattgtctccggcaaagtgatccgctcccgtggcggcagcacgtctgaattcacgccgggttatgtgaagccgaaacacgaagttaacccactgatgactctccgccgcctgccggatgaggatccgcagaatctctctgacccggtctatcgccgtcgccgcattatccttcagaacatgaaggatgaagagctggcgattgctcaggtcgaagagaaacaggctgtttcggcggtgctcagcggtaaatacaccatgaccggggaagcgttcgagcctgttgaagtcgatatgggccgcagcgctggtaacaacattgtccaggccggtggggcggcagggtcaacccgcgacaaagaaacgtatgacccgaccgatgacattgaagcatacgcgctcaacgctagcggtgtggtcaacatcattgtgttcgatccgaaaggctgggcgctgttccgttccttcaaggctgttgagaagaagctggatacgcgtcgtggttctaactctgagctggaaactgccgtgaaagacctgggtatggctgtttcatacaaggggatgtttggcgatgtggcaatcgtggtgtactccggccagtacgtcgaaaacgacgtcaacaaagaattatctgccggacctgacaatggtgctggggaataccaggctcgtggcctgcgtacctatgtctgcattcgtgatgctgatgcccagcgcgaaggtatcatgctcgacacgctacccgcatactggggcgtcggcgatccgcgcgcgatccaccatagtatttctgcacccggcggtgctccccgtttaacgggtgatcagactgccgctctgcgtgattctctaagcgataaacctgcaaaaaatattattttgctgattggcgatgggatgggggactcggaaattactgccgcacgtaattatgccgaaggtgcgggcggcttttttaaaggtatagatgccttaccgcttaccgggcaatacactcactatgcgctgaataaaaaaaccggcaaaccggactacgtcaccgactcggctgcatcagcaaccgcctggtcaaccggtgtcaaaacctataacggcgcgctgggcgtcgatattcacgaaaaagatcacccaacgattctggaaatggcaaaagccgcaggtctggcgaccggtaacgtttctaccgcagagttgcaggatgccacgcccgctgcgctggtggcacatgtgacctcgcgcaaatgctacggtccgagcgcgaccagtgaaaaatgtccgggtaacgctctggaaaaaggcggaaaaggatcgattaccgaacagctgcttaacgctcgtgccgacgttacgcttggcggcggcgcaaaaacctttgctgaaacggcaaccgctggtgaatggcagggaaaaacgctgcgtgaacaggcacaggcgcgtggttatcagttggtgagcgatgctgcctcactgaattcggtgacggaagcgaatcagcaaaaacccctgcttggcctgtttgctgacggcaatatgccagtgcgctggctaggaccgaaagcaacgtaccatggcaatatcgataagcccgcagtcacctgtacgccaaatccgcaacgtaatgacagtgtaccaaccctggcgcagatgaccgacaaagccattgaattgttgagtaaaaatgagaaaggctttttcctgcaagttgaagggggatcctctagagtgacctcagcagagacaacccccgggaaaccccgggaggaaaaaggggggaacctcaacaaaggggcccttccgggccaaattagacagacgggggatgggcacacaacagacaagggtaatgacgaaggagcccagctccggggcgagtatatgaccgcctttgaagatgagcacggcacttacatcatgaactcgaaagatctgcgcgccatcgcccatgtagaacgcctgaccaaaatgggcgtgcattcgatgaaaatcgaaggtcgtaccaaatctttctactattgtgcacgcaccgcacaggtttaccgcaaagctatcgatgacgccgctgcgggaaaaccgttcgataccagcctgctggaaactctggaaggtctggcgcatcgtggctataccgaaggtttcctgcgtcgtcatactcacgacgattatcagaactacgaatacggttattcagtttctgaccgccagcagttagttggtgagttaaccggtgagcgcaagggggacctcgcggcggtagcggtgaaaaataaattctccgttggcgacagccttgagctgatgacgccgcaaggcaacattaattttacccttgagcacatggaaaacgccaaaggcgaagctatgccgatagcaccaggcgatggttatactgtgtggctcccggtcccgcaggatcttgagctcaattacgcgctgctgatgcgtaatttctccggggaaaccacgcgtaatccccacgatgcaatgaagattattacttgctataagtgcgtgcctgatgaacaggatattgcggtcaataatgctgatggttcattagacttcagcaaagccgatgccaaaataagccaatacgatctcaacgctattgaagcggcttgccagctaaagcaacaggcagcagaggcgcaggtgacagccttaagtgtgggcggtaaagccctgaccaacgccaaagggcgtaaagatgtgctatcgcgcggcccggatgaactgattgtggtgattgatgaccagttcgagcaggcactgccgcaacaaacggcgagcgcactggctgcagccgcccagaaagcaggctttgatctgatcctctgtggcgatggttcttccgacctttatgcccagcaggttggtctgctggtgggcgaaatcctcaatattccggcagttaacggcgtcagcaaaattatctccctgacggcagataccctcaccgttgagcgcgaactggaagatgaaaccgaaaccttaagcattccgctgcctgcggttgttgctgtttccactgatatcaactccccacaaattccttcgatgaaagccattctcggcgcggcgaaaaagcccgtccaggtatggtcggcggcggatattggttttaacgcagagcagcctgtcagaacaacagttgccgcgccgaaacagcgcgaacgtcagcgcatgtggtag

SEQ ID NO: 140072 - DNA, 2537 bp, Homo sapiens
atgtccacacgaaagccaaacaagacaacacgaatgtgcatgcagctgccctgcctgtttaaggtcgacctctacgacggactcccccctttctacgttttgcgcctaaccctattggggtacggttacttctatttgatgcacacatttctaccgctcctacgggtcacacactgggtgactaccactactgctgtgactacgacactctctggacgcgacttacacacgacgacacacacgatccactggttggcgccagtctggaattggcgaaatgggcgccttggatggcgggtattatttctacccgttaacggcttcttgttgccgggtattatcaacgaccggcattattggttggcagctcttcaagttaccaaattcttggctacttggattggcccggcattaagtttaaaggcccaaggcccccggaacagccccggccgaaaacaaccccggtctggaacggcggcccccttggaactgggggctattggtcctatgcttcccccggggcaattcccggatttttacacggaaccaaagccttggttggaaccggtccttcccgtggggaaaccttggccattggttgtcccacgaagcggtttctccaacgccgatggccggaggccactatttgtgggccgttatccccgtggggttccaataggagatccaaccccccaggaaaacaccggcacttcggcgtggaaaaacggtcactccaaccaccacccaccaacacacaacacccacctgccagcatgcaaagttgcccatgcattgtttatgtctgactctcaacaggcatcccaccctcctcagctgtcactcatctgccagtggcacaagtccagccgtcgtgcccaaacagcctaccgtgtgcatctgtgcacattgcagtgcagtgccttgccttgccagcacagtgttagctataatctacacttcaacacagtgtgcatatctacccccatgggactgcgacacactgtgttcccatatcaccactcccctcgtacctaccagcccctcaggccgcggcccgtcgccatgggcgactggcccggtaggcccacccatccacaaccggaatgtgctaggcctgcgcctgcagaccccgacggacgagctggtggagcactcaccgtcgaggcatcctgttgtgtttccactgatatcaactccccacaaattccttcgatgaaagccatttcggcgcggcgaacaagcccgtccaggtatggtcggcggcggatatgggtcaaacgcagaggcagcctggtcagaacaacaggttgccgcgccgaaacgcgcgaacgtcagcgcatcgtgattgaaggcgacgtggaagaacagatcccgcatttgctgaaaatcttcgcaaagtcatttaattacagggatgctagaacacgttttcgtcaagtctggcgataccccttctcgtctccggaactgatgaacggtgcgcaggctttagctaatcaaatcaacaccttgtcctcaatgatgccgacggcgcacaggcaatccagctcggcgctaatatgtctggaaattaaacggcaaaccggacgatcggatgatcgaagattagccggtgtcatggctgacactattcgccagcacggcgcagacggcctgggctgctgccaaacacccgtcgcggcaaattactggcggcaaaactggccagacgcgtcacgcactggcgaaacgcacacgtggagtggcaggctccggctgtggcgattacccgcacggcaacccaggcgcgccagagcaacagcgtcgatctcgacaaagcccgtctggtggtcagcgtcggtcgcggtattactgatagccaaactctgagactatattacattcgactcccgccgagcttaatgggaatgcgcctgacggtatttcttctaccaatttgtgggttccaccgcgttggtcccccaacactgctatccgtattagcaacgaaccgaaaccgtaacgccaaggttttcgcacataaaaatgcccctaagtttagatcgcacacggcaagcgaacaatggaaatcaagtatcgcccacaacaagggcgtgcacccaagagtcacaagccacacgcacgcaaggcattcactcatggagacagatatcccccacaacatacattcagggcacgcctctccagcggacattacccgccacagggcccaagttttcaacagtgtcccaaaaatggcgtcaccaatcggggatagggtcccaacgttacacacacaacacaattccccagccaacacaggcaaggcccagtcgttgctgacttgtggccctgctgctgagtcttgttgccggctgattccccggcagatggtatccctagtatttcgattgaaagcccgactcctcctgataactactgaattgcccaaagggttggtgcccgttgccacgattagcggtactggaaattttggaaacacacagtctgcaaacccgtaccgaccctcggaaaacacggacctatccctttcctaa

SEQ ID NO: 140073 - DNA, 1293 bp, Homo sapiens; identical to SEQ ID NO: 138554

SEQ ID NO: 140074 - DNA, 1281 bp, Homo sapiens; identical to SEQ ID NO: 131822

SEQ ID NO: 140075 - DNA, 1835 bp, Homo sapiens
atgcagtggttcctcaaagtccgggagctggaaggttttcccggcaacggattctttgcttggccacaggaatgtttccgccgaaaaagggcgggaaaacatgtggcccctttttctgggaccgttgacgaatctgtagatgccacccgttgtcaggataaaggcggctgccagtgcggcgataaatgcctgacccacgcgctgtggcgtgatttgagcgaccgtctcaccggttttctcaacaacattactttaggcgaactggttaataaccaggaagtgctggatgtgtctggtcgtcagcatactcacgacgcgccacgcacccgcacacaagacgcgatcgacgctgaagaagcggtagatatcgcccgtaatcagattgccgatctggtcggcgctgatccgcgtgaaatcgtctttacctctggtgcaaccgaatctgacaacctggcgatcaaaggtgcagccaacttttatcagaaaaaaggcaagcacatcatcaccagcaaaaccgaacacaaagcgcgtaacggcattatcgaactgaaagacttgaagcagcgatgcgtaagaaacatctcgtgtccatcatgccgtaaatacgaaatcgggtgtgcagatatgaggtatgggaaatgtcgtgtcgggattatatacgtgatgaccagaggtgagagagaaacacgaacacatgcgaagtggtaccgaatcgtaaacgagcgtacgcttcccacgacatggaattgtcgatatcgccggtcggtaaaggcgcatcgaaaggcgaagttaacccggctgacgatattgaagttatcaacaccgaactggcgctggcagacctcgacacctgcgaacgtgcgattcatcgcgtacagaagaaagccaaaggtggcgataaagacgcgaaagctgagctggcggtcctggaaaaatgcctggccccagttggaaaatgcaggtatgctgcgcgcgctggatttaagcgctgaagagaaagcggctattcgttacctgagcttcctgacgctgaaaccaacaatgtacatcgccaacgtcaacgaagacggttttgaaaacaacccatatcttgaccaggtgcgtgaaatcgcggcgaaagaaggttctgttgtggttccggtttgtgctgctgttgaagcagacattgccgaactggacgacgaagaacgtgacgagtttatgcaggagcttgggctggaagagccgggcctgaaccgtgtgatccgtgccggttataaactgctgaacctgcaaacttacttcaccgctggggtgaaagaagtgcgtgcatggaccattccggttggagcaaccgcgccgcaggcagcgggcaaaatccatactgattttgaaaaaggctttatccgtgcacaaaccatctcgtttgaagatttcatcacttacaaaggtgaacaaggcgcgaaagaagcaggcaaaatgcgtgcagaaggtaaagattacatcgtgaaagatggcgatgtgatgaacttccttttcaacgtctaattaatttattgtctcatgaggtttcgctaaatctcatgaagagcgcaaaagtatataaaatccacgcaattgcgtggatttttcatttcgccgagtcgtaatcattcttgtaccatcatacacttttgtgcttattgcctatagtgaaccgcgagaataattaaagacataagtgttcagatggcggatatgtcattagcagtgatataacgcaaccctttgtatcactacacatcagccacctacgcagttggtcgtaattcatccaccggcgccgagctagatttcgtaatcagcggaggtacgtg

SEQ ID NO: 140076 - DNA, 1605 bp, Homo sapiens
ctagaggatcccctcgcagccggttaaggcgaggatttgttcggtgcgacggaagctcgcgcccatcacaatggtttcatagtggtgttgcttatagtagtcgtagatattgcgcaccgatttaacgcccggatcttcttccaccacatacgggtccatcggcttgcgtgcctgataccagtcataaatacgcccgacaaacggcgaaatcagaaaaacgcctgcttccgcacaggcccgtgcctgtgcaaaagaaaacagcagcgtcaggttgcagttaataccttctttttccagctcttctgccgcgcgaattccttcccaggtcgaagccagcttgatcagaatgcgtgatttctcaacgccttgttgctgatacaagtccaccagatggcgcgccttctcaatactcttttctttatcaaaagagaggcgtgcatcaacttctgttgacacgcgaccgggtacgattttgaggatttcagcaccgaaattgaccggcagtttgtcacacgctgcgaccacctgttggtcctgggtcttgccattttttttaccccaggcgatagcatcgttaccgccgagcacgaagccgtgccagatggcatggttgtatggaatgcgtttgcagacgtagaaaatcaccccgagcgaataaaccacgccgcctaccgccagtaaggtaacgctgcccgccgcgagcttaactgccatttcataaattaccaccagcgacagccagcccatcgccagataggtcaccagagataaaattttgaatcggtgcgcgatggtcagtttaaacagaatacccagcaatgccaggctccagataacaatcatcaacccgcgcgctaacggagaatccagccccaccagcaaaaacggcgtgtaggttccggcaatcaacaggtaaatagcgcaatggtcaaatttcttcagccacatttttgcccgttgatgaggaatggcgtgatagagcgtcgaagcgaggaacagcaagatcatactgccgccatagaggctgtagctggttatcgctgtggcgctggcattaagatccaccggctgaaccagtagcaacaccagcccaacgataccaaacaccaacccaatgccgtgactgacgctgttggctatttcctctgcggtgagctcctttctgaggcgctctagaggatccccgaaattgaccgtctgagcgatgttgacacgactcccgtcgttgttaacggcgttgttttcgcgctggggtataatggtaacctgacggcgcttgatctgcgcagtggtcagattatgtggaaacgcgaactgggttcggtgaatgatttcatcgtcgacggcaatcgcatctatctggtcgatcaaaatgaccgggtgatggcgttgaccattgatggcggcgttacgctgtggacacaaagcgatctgctgcatcgcctgctgacttctccggtgctgtataatggcaacctggtggtcggtgacagtgaaggttatctgcactggattaacgtcgaagatggtcgtttcgttgcccagcaaaaagttgatagttccggtttccagactgaaccggttgccgctgacggcaaactgcat

SEQ ID NO: 140077 - DNA, 2253 bp, Homo sapiens
atggacaatcatattgccctggacttcctgctggccagtgagtgtgggagtgtctacgtctacgccaccactcatggtcgtaatatggcgggtgctcgtgcgttgtggcgcgccaccggaatgaccgacgccgatttcggtaagccgattatcgcggttgtgaactcgttcacccaatttgtaccgggtcacgtccatctgcgcgatctcggtaaactggtcgccgaacaaattgaagcggctggcggcgttgccaaagagttcaacaccattgcggtggatgatgggattgccatgggccacggggggatgctttattcactgccatctcgcgaactgatcgctgattccgttgagtatatggtcaacgcccactgcgccgacgccatggtctgcatctctaactgcgacaaaatcaccccggggatgctgatggcttccctgcgcctgaatattccggtgatctttgtttccggcggcccgatggaggccgggaaaaccaaactttccgatcagatcatcaagctcgatctggttgatgcgatgatccagggcgcagacccgaaaattaacattatcaatcacggggaagacgttgcccaaatcgatgctttcgttgcaaaaaccaggctggatcgcgttaaagacaaagattatatcaatgtcaatctcacctacgaacttgataagttaacaaaagggaatcagcaactcggtagtgaagcagcttgccgacaccctgagttagcaaacgatgaagttgctctgcaagaagtgaatgctgcattgttcaaagagtatttaccgttattacaaaaaagtgagccgaccattaaacaaccggtaagatggaagaacgcactcggcgaactaaatgccaatctggatatcagtattgccgacccagccaaatcttcatcatccacaaacaaagatatcaaatcgctcaattttgatgtgaagttaccgcttaatgtcgtcacagaaaccgcaaaacagcttaatttatctgaaggaatggatgcggaaaaagcgcaaaagcaggctgataaacaaatcagcgggatgatgacattaggtcagatgtttcagttaatcacgattgacaacaataccgcctcgctgcagctgcgttatacaccggttttgaaaagtggagtgggtttgctgatgtttttcttgcgtgaaacgggagccttcaacgaaattgacaatggtggtgggatgcaggacctgcaggcgatgaaggactccttctgcagcgccacagcgataaccagctacagcctctatggcggcagtatgatcctgctgttcctcgcttcgacgctctatcacgccattcctcatcaacgggcaaaaatgtggctgaagaaatttgaccattgcgctatttacctgttgattgccggaacctacacgccgtttttgctggtggggctggattctccgttagcgcgcgggttgatgattgttatctggagcctggcattgctgggtattctgtttaaactgaccatcgcgcaccgattcaaaattttatctctggtgacctatctggcgatgggctggctgtcgctggtggtaatttatgaaatggcagttaagctcgcggcgggcagcgttaccttactggcgtgtgtgccagctttctggcgatctatttgtatctacttggagcaatattccagatttgaatgcgccctacgtaaacatttatcactgacggaagagtctctctggcaaaaatgtgaccaaaaacttattgccgcaattccacatattccagaatggcggcaaccattaattgctttgttattacccgaaaaaccagaaattgcacatgaaattgcccagcgtctactggggcaaaaaaaattaccctcgcttgagtggttaaaaatagtggcgactgatgagcacattcttgcctcattagaaaaatatcacgaaccatatgccatttttgatgattactattgtggtgcgatatggtcagccaccgtattacaggagcaaggtgttgcagccctgccccgatttgctccctatgccgcaagtgactactgcgccgatgtgttgcgtcatatcaatcatccgttcgcattgacactgcttatacgtgtagccgggcaaactaaacgctgtcacgatcggatgacgaaagccattgctgcgttcccacatgcagcaatggcggcactgacggaattcttgggcaaaaagaagagaacagttggcgcattatgctaa

SEQ ID NO: 140078 - DNA, 1944 bp, Homo sapiens; identical to SEQ ID NO: 138535

SEQ ID NO: 140079 - DNA, 1491 bp, Homo sapiens
atggacccatcccgcgtggaagctttcttgattgttaaggacgtcactcacgacaaaaaatggctggatcgcgcgattcgcgtggcttccgtgattatccacgacgtcgccagaaataatcattatcgcgttaacgaacacttcgatacccagtggaatccgctgccggattacaacaaagataacccggcgcatcgcttccgcgcgttcggaggtacaccaggccactggatcgaatggggccgtttaatgctgcacatccatgctgccctggaagcccgttgcgaacaaccaccagcatggctgctagaagatgccaaaggtctgtttaacgccaccgtgcgcgatgcctgggcacccgatggcgcggacgggattgtttataccgttgactgggaaggaaaaccggtggtccgcgaacgtgtacgttggcctatcgtcgaagcaatgggtacggcctacgcgctctacaccgtcactggcgatcgccagtatgaaacctggtatcaaacatggtgggagtactgcattaagtacctgatggactatgaaattggttcactggagcgcaaaccatcatcaataaaaccgatggaagggaatatcatgcgaattggcataccaagagaacggttaaccaatgaaacccgtgttgcagcaacgccaaaaacagtggaacagctgctgaaactgggttttaccgtcgcggtagagagcggcgcgggtcaactggcaagttttgacgataaagcgtttgtgcaagcgggcgctgaaattgtagaagggaatagcgtctggcagtcagagatcattctgaaggtcaatgcgccgttagatgacctgcaggcatgctggctcccgcgcgcgtttcgggtctttcataaacccggcatcgcttttcagcgactcaagcgcagcacgtccatagcgaccgctctgctcgagcatgtagatagttacctgaagaatattggcgcgtttgtggtggtcactcgttcgccgttgacgcgctttaaaaatatgagcgatggcatcaatgacctggtgaccgagctaagcgggaataaaccgcttgagagcgcgcgtcaggtgttcccactgacggggcgttatgcgcgccagtttgccctcgcaccgtctggcgctggtggcgacgccgcacataccattcacccgctggcggggcagggggtaaatctcggctttatggatgctgcagagctgattgccgaactgaaacggttgcatcgtcaggggaaagacatcgggcagtacatttatctgcgtcgctatgagcgtagccgcaagcacagtgcggcgttgatgctggctggtatgcagggattccgcgatctgttttccggtaccaatccggcgaaaaaactgctgcgtgatattggtttgaaactggccgacacgcttcctggcgttaagccgcaacttatccgccaggcaatgggattaaacgatttgcctgaatggctgcgttaa

SEQ ID NO: 140080 - DNA, 1919 bp, Homo sapiens
atgaacaaagcgcactttgttagcaatctcggggcaactaaatgttgccccctttcgtttttaccctaccgctggcgtcgggtcatcgcctttgtagtcgcgttttacttccgtcacctcatcgaccttctcgttgtgcagatgcacttcaagctggttaaaggcaatgttgatgtcgttttcacggcacagctgatcgatagtacggttcagctcatcgacagtacgactacggtcacgcagttcacgcacatacagacgcagctcatgatccaacgtgctggcaccaaatgccgtaaagaagacttccggcattgtgtaggtatcctagaacctgaatggtacccgattatcgttgttagagtcgtcgtagacgtaagccagtttgaagtacggagtcagagcctgatcttcgctgtaggtgaaggtataacctgcatctacacccagttcataacgcatgctgtcgtaagactgaccgtcaactttcatgtcgttgctcagctgtcatcaccagactggaacagaccagaaacgctgcccgtaaggagtcacgtaaccagcatcacccagtttgaagtcgtaaccggctttcaaaccgaagccccaagcgtcggagttggtgctaccgtcaacgtaagtaccgttgctcatggttgcagacaggtcgttgttgaagtgagagtagctcaagctaccatcaacaaagacgttgttcgcgaagtgagcagaagagtagatgtaggcagtctggctgtcttgatccacctgaccagaacggtcattcatgtcacctttagcgaagcctgcagccgcaccgacgatccacttagcgttgttaccgtcaattttggtatcaacaccgaccatgatgccgttaacatcctgatcatagttgatggtgccgttgtcgccgttgaagttaccaccgaagtagcttacccatgcgccgccgttatcagccaggccatgacgagagttggtcagacgagtaccaacggtgtctggacgatatcgtcagtgaatgcatttcagataagaacaggggcagcgagatcactggcccccccctggtcattaaccgagaaggtcttttgcggaacgacgatggaacgcatgcgggctgctttagaggcgatcatgccatttaccgaatcttccagcgctacgcaggcaccttacttaccctgtggccgggaatgcggcttggctgtaaggcagtttttcggccgaggcgagggcatcgaaactgtcgcgtacctatttcgaataattcgggtcgtcagaacaagagttctctccatcggcggtttctccaggactcgaatttcatcaacgccagtgaaaatagcgactcttcgccaaaacagatcggattgtcacgctgccatgattgctgacacatatcgtcaagtgaccccaacagacccattttcccggcacccattttcacgtgtcttgcgtggtcttttctttatcatctttaaagatacgaaagcgcacaacggcatcggcatgatcggcggcgtcaaccgccgcgccgattatttgaatctgctggaaaaagtatttggcgatcgtgtttccagcccgcaatggcaggctacgttgaaagcgatcgttccgtcttatggacgcaagctgaacggtgatgtagcggcaacagaacgcgagttgcagtacaccagcgaagtggtggggttgaactacgacaagccgcaggcagcagataacaaccggcagcacaaagtccgcgcggcgcgttctcgacgccaaaaccgaccagatcgcgggtcccaaattgcagattcaactgctggcgcgcggtgtcgatttcaaactcccacagcgggcgacggcgcaggccgcgacggcctttcaaatttaaaccgggaccaactttgtccaaggccacagaa

SEQ ID NO: 140081 - DNA, 3222 bp, Homo sapiens
atggagctggggcgcgggattaaaggactgatcggccatacccagccgcgtcgtctggcggcaagaacagtggcgaaccgtattgcggaagagctgaaaacggagccgggcggttgcatcggttacaaagtgcgtttcagcgatcacgtaagtgataacacgatggtcaagctgatgaccgacggtatcctgctggcggagatccagcaagaccgcctgctgatgcagtacgacactatcattattgacgaagcgcacgaacgcagcctgaatatcgattttttgctcggctatttgaaagagttgctgccgcggcgtcctgacctaaaaatcattatcacttccgcgactatcgacccggaacgcttttcgcgccactttaataatgcgccgattattgaagtctccggtcggacctatccggtggaagtgcgctatcgcccgattgttgaagaagccgatgacaccgagcgcgatcagttgcaggcgatttttgacgccgtagacgaactgagtcaggaaagccatggcgacattctgatctttatgagcggcgagcgggaaatccgcgataccgccgatgcgctgaacaagctgaacttacgccataccgaaatcttgccgctttatgcgcggctttcgaacagcgaacaaaatagggtattccagtcgcacagcggacggcgcagtcagatattactggcgggaaatctggcgcaggcccgaatgatgatcgagcgttttaagccggggctaatcttgctcgataactatcttcctgacggtagagggattaatttactgcatgaactggtgcaggcgcattatcccggcgacgtggtgtttaccactgcagccagcgatatggaaacggtgtctgaagccgtacgttgtggtgtatttgattatctcattaagcccattgcctatgaacggctggggcaaacgctaacccgtttccgccagcgtaaacatatgctggaaagtattgatagcgccagccagaagcaaattgactgcagatgtttaatcggaaaaactttccaaagggccggccccataaagctgctgacggcgtactgcgtggtgcttccggtggtcactgcgataccgcgattgcctctgcgctttccatcatcgtcggcgccgctggtacgcggtcgtattccgactctggtggataacgtactgacctgcatcaccccaggctccagtgtcgatattctggtcacagaccacggtatcgcagtaacccggcacgtccggtaccgagatcgattgtatcatgtcatatccactggttgcgccgctgttggccataatcatcgccaggatagcggcaatgataagaataatgcctcccgaggcatcactgctaaagaatcgatgcagatgtttcactttttatttctctttcagagatcccctttcgcggctatgcataaagagctgattgttgccagttcctactctaaaaactttggcctgtacaacgagcgtgttggcgcttgtactctggttgctgccgacagtgaaaccgttgatcgcgcattcagccaaatgaaagcggcgattcgcgctaactactctaacccaccatcacacggcgcttctgttgttgccaccatcctgagcaacgatgcgttacgtgcgatttgggaacaagagctgactgatatgcgccagcgtattcagcgtatgcgtcagttgttcgtcaatacgctgcatgaaaaaggcgcaaaccgcgacttcagctttatcatcaaacagaacggcatgttctccttcagtggcctgacaaaagaacaagtgctgcgtctgcgcgaagagtttggcgtatatgcggttgcttctggtcgcgtaaatgtggccgggatgacaccagataacatggctccgctgtgcgaagcgattgtggcagtgctcccgcaatggcaggctacgttgaaagcgatcgttccgtcttatggacgcaagctgaacggtgatgtagcggcaacagaacgcgagttgcagtacaccagcgaagtgctggggttgaactacgacaagccgcaggcagcagatagtacgccgaaaccgcagttgaaaccgcaacccgttcaaaaagaagtggcggatattgcgttgtaatgatacgccacatccggcatggtatgccggatgtggcgtatgggggtggagcacttcacagcggtgtaggcctgataagacgcgccagcgtcgcatcaggcaaccggctcggacgttggatgtcggatgcggcgtaaccgccttatccaaccacacaaaactagaatgtgactttctggtgacacggaacaccgaagattcttcacatttgaaacctaaagtctgtgccagtctatatccggtggctttgattccctccttcttatttgcatagtggttatgcgaccatgtggttgctgctctcttccggtcagccaggatttcactttccagccggtcgagcatctgcaccagcaccggcgggaacaccacactgccaccgtcttcgccgccggactgctgaagggcatccgccaggctgcggcgctgcgttttcgccagctcaccggtggcagtttcgaccctgatgagtggcgtgaagctccccggctgataaatcgtctggatgcggctcctgtcgttctgtatcgtggtcagccggtcgccgtcccagccgtaccaggtcaatgctccagatctggcatcatcccaagtctgcaataatcccatagggtcaatttgttgtagtggatttaaaggatactgatataaattccatccccctttcaaccccatcgggtcctgagtaatataccgcccctgcaacggatcgtagtaccggtgacggttatagtacagccctgattcctcatcatgctgctgccctggcagacggtacggctgatacacatgatgcgggttctcctcattaagctggttgccccattcatcatattccgcgctccacgccgtattgccgtcttcgctgataagcgccagcggcagtccccggtggtcgcagtgataaagatgagcgcgtgttgtcatatccggcgtccaccgtgtctggccagttgctccaccgtcagcccgcactgcgcaagccacgccccggctcttcacgtggcatccaccgccgcgctcgtgcgccgcgcatttcgttcctccagcctgtacagcagccgcaccagcttcagaccgggtagacat

SEQ ID NO: 140082 - DNA, 2005 bp, Homo sapiens
atgattgaaatagaatcacgcgagctggcagatattcccgttcttcatgcttatcctgtcgggcaaaaagataccccgttaccgtgcgtaattttttatcacggctttacttcatccagtctggtgtatagctattttgccgttgcgctggcgcaggctggtttgcgggtgatcatgccggatgcgcccgatcacggtagccgttttagtggtgacgcagcgcggcggttaaatcaattctggcaaatcttgctacaaagtatgcaggaattcactactttacgtgcggcaatagccgaagaaaactggctgcttgatgaccgtctggcagtcggtggcgcgtcgatgggcgcgatgacggcactggggattaccgctcgccaccccacggttactctacagatccttcccattctgacggttaccgtcgcgttgttgaccctggatcgctatctgggcacccatttctttaccaacgatatgggtggcaacatgatgatgtacatcaacctgatttgggcctggggccacccggaagtttacatcctgatcctgcctgttttcggtgtgttctccgaaattgcggcaaccttctcgcgtaaacgtctgtttggttatacctcgctggtatgggcaaccgtctgtatcaccgtgctgtcgttcatcgtttggctgcaccacttctttacgatgggtgcgggcgcgaacgtaaacgccttctttggtatcaccacaatgattatcgccatcccgaccggggtgaagatcttcaactggctgttcaccatgtatcagggccgcatcgtgttccattctgcgatgctgtggaccatcggttttatcgtcaccttctcgggggggcgggatgactggcgtgctgctggccgtaccgggcgcggacttcgttctgcataacagcctgttcctgattgcgcacttccataacgtgatcatcggcggcgtggtcttcggctgcttcgcagggatgacctactggtggcctaaagcgttcggtttcaaactgaacgaaacctggggtaaacgcgcgttctggttctggatcatcggcttcttcgttgcctttatgccactgtttgcgctgggcttcatgggcatgacccgtcgtttgagccagcggattgacccggaggttccacccccatggctgttgaggatcctgacttccgcagcagtgaaagagttcttcggttccagccagctgtctcagtttatggaccagaacaacccgctgtctgagattacgcacaaacgtcgtatctccgcactcggcccaggcggtctgacccgtgaacgtgcaggcttcgaagttcgagacgtacacccgactcactacggtcgcgtctgtccaatcgaaacccctgaaggtccgaacatcggtctgatcaactctctgtccgtgtacgcacagactaacgaatacggcttccttgagactccgtatcgtaaagtgaccgacggtgttgtaactgacgaaattcactacctgtctgctatcgaagaaggcaactacgttatcgcccaggcgaactccaacttggatgaagaaggccacttcgtagaagacctggtaacttgccgtagcaaaggcgaatccagcttgttcagccgcgaccaggttgactacatggacgtatccacccagcaggtggtatccgtcggtgcgtccctgatcccgttcctggaacacgatgacgccaaccgtgcattgatgggtgcgaacatgcaacgtcaggccgttccgactctgcgcgctgataagccgctggttggtactggtatggaacgtgctgttgccgttgactccggtgtaactgcggtagctaaacgtggtggtgtcgttcagtacgtggatgcttcccgtatcgttatcaaagttaacgaagacgagatgtatccgggtgaagcaggtatcgacatctacaacctgaccaattcacccgttctaccagaaccctggtttaccaatgccgggttgtccgggtga

SEQ ID NO: 140083 - DNA, 3549 bp, Homo sapiens
atggtgggtgaaggaccctaccttatctcagatctggaccagcgaggccggcggagatcctttgcagaaagatatgaccccagcctgaagaccatgatcccagtgcgaccctgtgcaaggttagcacccaacccggtggatgatgccgggctactctccttcgccacattttcctggctcacgccggtgatggtgaaaggctaccggcaaaggctgaccgtagacaccctgcccccattgtcgacatatgactcatctgacaccaatgccaaaagatttcgagtcctttgggatgaagaggtagcaagggtgggtcctgagaaggcctctctgagccacgtggtgtggaaattccagaggacacgcgtgttgatggacatcgtggccaacatcctgtgcatcatcatggcagccatagggccgacagttctcattcaccaaatcctccagcagactgagaggacctctgggaaagtctgggttggcattggactgtgcatagccctttttgccaccgagtttaccaaagtcttcttttgggcccttgcctgggccatcaactaccgcacggccatccggttgaaggtggcgctctccaccttggtttttgaaaacctagtgtccttcaagacattgacccacatctctgttggcgaggtgctcaatatactgtcaagtgatagctattctttgtttgaagctgccttgttttgtcctttgccagccaccatcccgatcctaatggtcttttgtgcggcgtacgcctttttcattctggggcccacagctctcatcgggatatcagtgtatgtcatattcatacccgtccagatgtttatggccaagctcaattcagctttccgaaggtcagcaattttggtgacagacaagcgagttcagacaatgaatgagtttctgacctgcatcaggctgatcaaaatgtatgcctgggagaaatcttttaccaacactatccaagatataagaaggagggaaagaaaattactggaaaaagctggatttgtccaaagtggaaactctgccctggcccccatcgtgtccaccatagccatcgtgctgacattatcctgccacatcctcctgagacgcaaactcaccgcacccgtggcatttagtgtgattgccatgtttaatgtaatgaagttttccattgcaatcttgcccttctccatcaaagcaatggctgaagcgaatgtctctctaaggagaatgaagaaaattctcatagataaaagccccccatcttacatcacccaaccagaagacccagatactgtcttgcttttagcaaatgccaccttgacatgggagcatgaagccagcaggaaaagtaccccaaagaaattgcagaaccagaaaaggcatttatgcaagaaacagaggtcagaggcatacagtgagaggagtccaccagccaagggagccactggcccagaggagcaaagtgacagcctcaaatcggttctgcacagcataagctttgtggtgagaaaggggaagatcttgggaatatgtgggaatgtgggaagtggaaagagctccctccttgcagctctcctaggacagatgcagctgcagaaaggggtggtggcagtcaatggaactttggcctacgtttcacagcaggcatggatctttcatggaaatgtgagagaaaacatactctttggagaaaagtatgatcaccaaaggtatcagcacacagtccgcgtctgtggcctccagaaggacctgagcaacctcccctatggagacctgactgagattggggagcggggcctcaacctctctggggggcagaggcagaggattagcctggcccgcgctgtctactccgaccgtcagctctacctgctggacgaccccctgtcggccgtggacgcccacgtggggaagcacgtctttgaggagtgcattaagaagacgctcaggggaaagacagtcgtcctggtgacccaccagctacagttcttagagtcttgtgatgaagttattttattagaagatggagagatttgtgaaaagggaacccacaaggagttaatggaggagagagggcgctatgcaaaactgattcacaacctgcgaggattgcagttcaaggatcctgaacacctttacaatgcagcaatggtggaagccttcaaggagagccctgctgagagagaggaagatgctggtataatcgttttggctccaggaaatgagaaagatgaaggaaaagaatctgaaacaggctcagaatttgtagacacaaaagggtacctcctttctctcttcactgtgttcctcttcctcctgatgattggcagcgctgccttcagcaactggtggctgggtctctggttggacaagggctcacggatgacctgtgggccccagggcaacaggaccatgtgtgaggtcggcgcggtgctggcagacatcggtcagcatgtgtaccagtgggtgtacactgcaagcatggtgttcatgctggtgtttggcgtcaccaaaggcttcgtcttcaccaagaccacactgatggcatcctcctctctgcatgacacggtgtttgataagatcttaaagagcccaatgagtttctttgacacgactcccactggcaggctaatgaaccgtttttccaaggatatggacgagctggatgtgaggctgccgtttcacgcagagaactttctgcagcagttttttatggtggtgtttattctcgtgatcttggctgctgtgtttcctgctgtccttttagtcgtggccagccttgctgtaggcttcttcattctgttacggtctagtgcccaaagggcaaaggaggagctggggacgctcgcccaggaagctcagctcaccagagcccgtccttcccacgatgcccaccacttcgtggccgcggatggtcaggttgatgccgtgaagcacgacgtgcttccccacgtgggcgtccacggccgacagggggtcgtccagcaggtagagctgacggtcggagtagacagcgcgggccaggctaatcctctgcctctgccccccagagaggttccagggatagggctgctccaagagagagccctgggctggcatggggaccgtacctccagctgcctggatgtagtggtggtagaccctccaactcaaggagccttcttccatctcctcctgctgtgtgagctgatgctccggcactgggtcaggctggcgtccagcttccaggccactgcccggattggcttggagacagaggcacagttcacggctgtagagaggatactgcagtacatgaagcagactgagaggacctctgggaaagtctgggttggcattggactgtgcatagccctttttgccaccgagtttaccaaagtcttcttttgggcccttgcctgggccatcaactaccgcacggccatccggttgaaggtggcgctctccaccttggtttttgaaaacctagtgtccttcaagacattgacccacatctctgttggcgagtcaagccagaacctcactgacttctgcatgcgcttttga

SEQ ID NO: 140084 - DNA, 3672 bp, Homo sapiens
acatataaagccacaacgggttcgtaaactgttatcccattacatgattatgaggcaacgccatgcatccacgttttcaaaccgcttttgcccaacttgcggataacttgcaatctgcactggaacctattatggcagacaagtacttccccgctttgttgtccggggatcaagtatcatcgctgaagagcgcaacggggctggacgaaaacgcgctggcattcgcactacttccgctggcgacggcctgtgcgcgtacgacattgtcgaattttaatgttggcgcaattgcgcgcggtgtgagcggaacctggtatttcggtgccaatatggaatttattggtgcggcaatgcagcaaaccgttcatgccgaacaaagcgcgatcatcctcgcctggttgagtggtgaaaaagcgcttgcaaccatcaacggtagagagtcgacttgctgtctgcagtcgatgttcactttagatagacactctggtatgtttctggtgtcaaaatcctttccaagtcagttctttaccaacgatatgggtggcaacatgatgatgtacatcaacctgatttgggcctggggccacccggaagtttacatcctgatcctgcctgttttcggtgtgttctccgaaattgcggcaaccttctcgcgtaaacgtctgtttggttatacctcgctggtatgggcaaccgtctgtatcaccgtgctgtcgttcatcgtttggctgcaccacttctttacgatgggtgcgggcgcgaacgtaaacgccttctttggtatcaccacaatgattatcgccatcccgaccggggtgaagatcttcaactggctgttcaccatgtatcagggccgcatcgtgttccattctgcgatgctgtggaccatcggttttatcgtcaccttctcggtgggcgggatgactggcgtgctgctggccgtaccgggcgcggacttcgttctgcataacagcctgttcctgattgcgcacttccataacgtgatcatcggcggcgtggtcttcggctgcttcgcagggatgacctactggtggcctaaagcgttcggtttcaaactgaacgaaacctggggtaaacgcgcgttctggttctggatcatcggcttcttcgttgcctttatgccactgtatgcgctggggcttcatggggcatgaaccccgtcgtttgtagccagcagattgacccgcagttccacaccatgctgatgatttgcgccagcgaggaagcgcagcggatgcagcaggcaagtgaagacgaatttaatcgcgcgttaaatatcgcttttgataatcgcctgggcttatgcaaggttgagagcgcgcgtcaggtgttcccactgacggggcgttatgcgcgccagtttgcctcgcaccgtctggcgctggtgggcgacgccgcacataccattcacccgctggcggggcagggggtaaatctcggctttatggatgctgcagagctgattgccgaactgaaacggttgcatcgtcaggggaaagacatcgggcagtacatttatctgcgtcgctatgagcgtagccgcaagcacagtgcggcgttgatgctggctgactcctttgtacgaacaacacacgctttgcggcgctcgcatggtggatttccacggctggatgatgccgctgcattacggttcgcaaatcgacgaacatcatgcgagcgtaatgacgataacacctgtagccgttccctgtatgccgatctgaaaaatggcactgcacagaacattcgtgccaaatttgtctttatcggcgcgggcggtgcggcgctgaagctgttacaggaatcggggattccggaagcgaaagactacgccggtttcccggtgggcggacagttccttgtttcggaaaacccggacgtggttaatcaccatctggcgaaggtttacggtaaagcatccgttggcgcaccaccgatgtcggttccgcatatcgatacccgcgttcctggacggtaaacgcgtagtgctgtttgggccatttgccaccttctcaaccaaattcctcaaaaacggttcattgtgggatctaatgagttccaccaccacctctaacgtgatgccgatgatgcacgtcgggctggataatttcgatctggtgaaatatctggtgagtcaggtgatgttgagtgaagaggatcgttttgaagcgttgaaagagtactatccgcaggcgaaaaaagaggactggcgtttgtggcaagcggggcagcgcgtgcagattatcaagcgtgatgccgagaaaggtggcgtactgcgtctgggtactgaagtcgtcagtgaccagcaaggaaccattgccgcgctcctgggggcatcgccaggggcgtcaaccgccgcgccgattatgttgaatctgctggaaaaagtatttggcgatcgtgtttccagcccgcaatggcaggctacgttgaaagcgatcgttccgtcttatggacgcaagctgaacggtgatgtagcggcaacagaacgcgagcgaaagacgcttcacgttatcttcaacgatctccgacctgaacaatgtgaagcaggtaaatccccttcgcgtgtgcagcttcagacatggacgaacggcggcatgttaaatgcgccgcttagcctgcgtctgacattggtggaaaaactggcgtcgatgctggatcccggtcatctggcactgacgcagatcgcgcagcatctggcgctgctgcaaaaaatggatcaccgccagcactctgctttcccggagctcccccagcaaattgccgccttgtatgagtggttttcagcccgttgtcgctggaaggaaaaggcgttaacgcaacgaggcctactggtgcaggcaggtgatcagagcgagcaaatttttacccgctggcgtgctggggcgtataacgcctggtcgttgcctgggcgctgttttatcgttctggaggagttgcgctggggggcatttggcgatgcctgccgtctgggaagcccgcaagcggtggcgttgttgctgggtgatttgctcgagaaagcgacacaacatctggcagagagtatcaatgcggcaccgaccacgcgtcactattaccatcagtggtttgcctcttcgaccgttccgacgggcggggagcatgctgattttttaagttggctgggaaagtggaccacggcagataaacaacccgtttgctggtcagtgacccaacgctggcaaactgtcgcgctggggatcgccacgactctgttcagcgcagcgtctggcgggggcaatgctcgaggaaatcttctctgtaaatttggcatttcgagtcctttgggatgaagaggtagcaagggtgggtcctgagaaggcctctctgagccacgtggtgtggaaattccagaggacacgcgtgttgatggacatcgtggcccccatcctgtgcatcatcatggcagccatagggccgccagtggaatttagagccccggttaaagcagccgaaggtgtggatgccagaaatcgaaaaatcggttcacatggagtccgtaagtgcaataaaaagagaggaaaagagatattggacagaatgaagcatataaagtacaaaatgtttcgaggtgatgacacgttgtccttgcatcttagtgaaatcggaggatatatcagaccgtatcaataa

SEQ ID NO: 140085 - DNA, 975 bp, Homo sapiens
ctaagtggaaaaacagaggataatgacagacaatttgcaggtattggggtaccgagctagcgcaccgatgcgatgctggagaaagtgaaattcttccgtccgcattttacttaacatgcgacgcagacgatgacaccctggtttctttacttgatccgtaccgccgacaataagctttataccgggatcaccacggatgtcgaacgccgctatcagcagcaccaaagcggcaaaggggcgaaagcactgaccggcggtagcgcccgttctccgctgattaaaaaagcgctggcagaacagttgccgggcattccgattgcaggcggcgatgactttggctccgtcaccgccgggctggcacggtaacggttccatcaacggcatggtccgtgctggagcatgaaggcggaatcgctgcaactctgtcgcgccgactgtcaacgccgattccagccgatgtcgtttggcggtcattttcgccattaccgcttgtctgtctgctggcgttatcgcttcattcggcctgaacacaaaacggcgttcacagctcgctttccagtcgataaccgcctgggtcagatggtcgccaaaccctttcacttgcttaacgccacgacgggtaacatctgcggctgtttcaataccaaaagaccgtaacgccgctttacgcgcagggccaacgccgggaatagaggcaacatcaataaaaaatccctccagaaacttctgcttctgccgttcccttgcagtgtcatgaagtgttggcgcattcccacggatgacaccatcagattgatttagagctgaagactgtgggccatagagcagacaaggacgataaagggtaagatggaaaacgcaccaagacgctggcagggagatcagagaaggtgcagcatgttctaaggaaggggccaaggagggagggcaatatcgaaagccaagagggaaccagccaggcaggtggacagtcat

SEQ ID NO: 140086 - DNA, 489 bp, Homo sapiens
acgcttaaaccgggacaaccgtcgcccggccaacatagccttctccgtccccccttcgcagtaacacttgaagcgcaaagcgtgaaagataagccgtcgctgattatctgccgtacggtgattggctttggttcgccgaataaagcaggtaaggaagaggcgcacggcgcaccactgggggaagaagaagtggcgctggcacggcaaaaactgggctggcaccatccgccatttgagatcccaggcgtgataaatctctttagggatctcaaatggcggatggttttccgcgccattatcgacgccatcctgtacgccattgtaaatggcgctacccagcatcgtcagtagcagcaatgtggtgctgagatagcgccacaggccggaacgatccgggatcggatgaaggccaatactatcgtttgttccagccaatgtcagcgccctggcggcatggaatgcacaatatgccgcgctgtaacggcaaag

SEQ ID NO: 140087 - DNA, 909 bp, Homo sapiens
atgtttacatcagtggcgcaagccaatgctgcaggttatcgaacaaattcgtcgcgctcgtccacactgctgatgtgcacggctctcattatacactacgagccaatgttacctatcccgatggacccagatcccgagatttatcacgcctgggatgcccgtgaaaaaggcgaaaaagcgcagcagagctggaatgagaagtttgccgcctataaaaaggctcatccgcaactggcagaagagtttacccgacggatgagcggtggtttaccgaaggactgggagaaaacgactcagaaatatatcaatgagttacaggcaaatccggcgaaaatcgctacccgtaaggcttcgcaaaatacgcttaacgcttacgggccgatgctgcctgagttgctcggcggttcggcggatctggctcccagcaacctgaccatctggaaaggttctgtttcgctgaaggaagatccagcgggcaactacattcactacggggtgcgtgaatttggcatgaccgctatcgccaacggcatcgcgcaccacggcggctttgtgccgtataccgcgacgttcctgatgtttgttgaatacgcccgtaacgccgcgcggatggcggcactgatgaaagcgcggcagattatggtttatacccacgactcaattggcctgggcgaagatgtactcgctataattaacgggggtaccgagctgaccgtcagtaactcccgatcatcaataacggaaaatgggttaaaccgaccgcctgcgttagccagtaaatcagcagccactccgcgcccagcaatacgggccagtatccgcgcgggcattgcagcattagccccagacgcagaccaaacggaaataacagcaccgccatatcagggcgctcaaccagatgcaggctga

SEQ ID NO: 140088 - DNA, 910 bp, Homo sapiens
caatgccaacgtgcgtaacccgcagggcgcgctggaagatggcactcaccgctggcagatccagaccaatgatgagctaaaacccgccgctgaatatcagccgttggatgtgcgcaacgccgggatgaccaacgccaaaccggctattttactgatgatccgcaaactgccggaagccaatattatccagacggttgacagcatccgggcaaaattaccggagttgcaggaaaccattccggcggcgattgatctgcaaattgcccaggatcgctcccccaccattcgcgcctcgctggaagaagtcgagcaaacgctgattatctcggtggcgctggtgattctggtggtgtttttattcctgcgctcgggtcgcgccactattattcccgccgtttcggtgccggtttcgctgattggtacgtttgcggcgatgtacctgtgcggattcagtctcaataacctttcgttaatggcgctcaccatcgctactggtttcgtggtggatgacgccatcgtggtgctggaaaacattgcacgtcatctggaagcgggaatgaaaccgttgcaagccgcactgcaaggtactcgcgaagtcggttttacggtgctgtcgatgagtctgtcactggtggcggtgttcctgccgctgctgttgatgggcggattgccgggccgactgttacgcgaatttgccgtgacgctttctgtcgccattggtatatcgttgctggtttctctgacattaacgccaatggttgtggatttgtcgccaacgcaatgttatcagaggatcccgttattacctaataactggtacggtaaatatagagatcccaattaccccggttatcggaattttgacaaggtcttcaggaattaccgactggatcgaaaaacgctgttgtaa

SEQ ID NO: 140089 - DNA, 3687 bp, Homo sapiens
atggtgaaagaggtgctggatacgatgattgggctggcgcagtcgggtatgacaatgttgtgtgtaacacatgagatggggtttgcacgaaccgtcgctgaccgggtaatttttatggatcgtggggaaatagtggagcaagctgcacctgatgaattttttgcgcatcctaaatcagagcgtacgagggcatttttatcgcagttccctactctcgcatggggagaccccacactaccatcggcgctacggcgtttcacttctgagttcggcatggggtcaggagcagcccccctcagttctccagcgcccacggcagatagggaccgaactgtctcacgacgttctaaacccagctcgcgtaccactttaaatggcgaacagccatacccttgggacctacttcagccccaggatgtgatgagccgacatcgaggtgccaaacaccgccgtcgatatgaactcttgggcggattagccaaccttcgtgctcctccgttactctttaggaggagaccgccccagtcaaactacccaccagacactgtccgcaacccggattacgggtcaacgttagaacatcaaacattaaagggtggtatttcaaggggtcgactcaccctgccccgattaacgttggacaggaacccttggtcttccggcgaaatcgggcgtaaatcgcaacaccactatgaaccatttgtgatgggcgcgagcttccgtcgcaccgaacaaatcctcgctttaaccggctgcgatcgactgactatcgcaccgaatttactgaaggagctgcaggaaaaagtttcgccagtggcattcgtctgttcgccgttgatcaacgcaaactggaagatcttcttgccgccaaactataaaccagccacggagtgttatatgtcccgaaaagaccttgccaatgcgattcgcgcactcagtatggatgcggtacaaaaagccaactctggtcatcccggcgcgccgatgggcatggctgatattgccgaagtgctgtggaacgattttcttaaacataaccctaccgacccaacctggtatgatcgcgaccgctttattctttccaacggtcacgcgtcgatgctgctctacagtttgctacatctgaccggttacgacctgccgctggaagaactgaagaacttccgtcagttgcattcgaaaaccccaggccacccggagattggctatacgccaggcgttgaaaccaccaccggcccgcttggacaaggtttggcgaacgccgtcgggctggcgatagcagagcgtacactggcggcgcagtttaaccagccagaccatgagatcgtcgatcacttcacctatgtgtttatgggcgacggctgcctgatggaaggtatttcccacgaagtctgttcgctggcaggcacgctgggactgggcaagctgattggtttttacgatcacaacggtatttccatcgacggtgaaacagaaggctggtttaccgacgatacggcaaaacgttttgaagcctatcactggcatgtgatccatgaaatcgacggtcacgatccgcaggcggtgaaggaagcgatccttgaagcgcaaagcgtgaaagataagccgtcgctgattatctgccgtacggtgattggctttggttcgccgaataaagcagctcccagcaacctgaccatctggaaaggttctgtttcgctgaaggaagatccagcgggcaactacattcactacggggtgcgtgaatttggcatgacccgtatcgccaacggcatcgcgcaccacggcggctttgtgccgtataccgcgacgttcctgatgtttgttgaatacgcccgtaacgccgcgcggatggcggcactgatgaaagcgcggcagattatggtttatacccacgactcaattggcctgggcgaagatggtccgacgcaccaggctgttgagcaactggccagcctgcgcttaacgccaaatttcagcacctggcgaccgtgcgatcaggtggaagcggcggtgggctggaagctggcggttgagcgccacaacggaccgacggcactgatcctctcaaggcagaatctggcccaggtggaacgtacgccggatcaggttaaagagattgctcgtggcggttatgtgctgaaagacagcggcggtaagccagatattattctgattgccaccggttcagagatggaaattaccctgcaagcggcagagaaattagcaggagaaggtcgcaatgtacgcgtagtttccctgccctcgaccgatattttcgacgcccaggatgaggaatatcgggagtcggtgttgccttctaacgttgcggcttgcgacgtaaaacgcgaggtggtgcatgatttacgtctctcgccgattactcatcacctgtttgctgctggtatctggggattacgcagcggtgccgtcacgctggaaacctcgcaggtattcgccgcgctgatgggcgatgcgccgcgcagtatgacgatggtggtcaccgaatggcgtttaccacgcgtgctgatggcgctgttgattggcgcacgactgggcgtcagtggcgctatttttcagtcgctgatgcgtaacccgctcggcagccctgacgtaatgggctttaacaccggggcgtggagcggcgtgctggtggcgatggtgctgtttggtcaggacctgacggctatcgcgctgtcagcaatggtgggcggcattgtcacttcgctgctggtctggctgctcgcctggcgcaacggcatcgacacctttcggttgattattatcggtatcggcgttcgcgccatgctggtggcctttaatacctggctgttgctgaaagcgtctttagaaacggcgctaacagcaggtttgtggaatgccggatcgctcaacggcctgacgtgggcaaaaacctcgccttccgcacccatcattatattgatgctcattgccgccgccttactggtacgccggatgcgcttgctggaaatgggcgatgataccgcgtgtgcgctgggcgtcagcgtcgaacgttcgcgtctgttaatgatgctggttgcagtgcctcggcggtatttaccttatcgtcttgttaattcaggagtctcgcaaaaaatgaccgaatcagtagcccgtttgcgcggcgaacagttaaccctgggatatggcaaatataccgttgcggaaaatctgactgtagaaatacctgatggtcacttcacggcaattatcgggccaaatggctgcggtaaatccacgttactgcgtaccttaagccgcctgatgacgcctgctcatgggcatgtctggctggatggcgagcacattcaacattacgccagtaaagaggttgcacgccggattggtctgttggcgcaaaatgctaccacgccgggcgatatcaccgtgcaggagctggtggcgcgtggacgttatccgcatcaaccgctgtttacccgctggcgcaaagaggatgaagaagcggtaacgaaagcaatgcaggccacgggaataactcatctggcagatcaaagcgtggataccctttctggcggacaacgcagcgagcgtggatcgcgatggtgctggcccaggaaacggcaattatgctgctcgacgaacccacgacctggctggatatcagtcactgtggggataatccggccttatcggcttcagctttaa

SEQ ID NO: 140090 - DNA, 2637 bp, Homo sapiens; identical to SEQ ID NO: 124732

SEQ ID NO: 140091 - DNA, 5348 bp, Homo sapiens
  misc_feature (1)...(5348): n = a,t,c or g
cttccgagctggaaacacgcagtaagttgtaactaatgcgggcagcttccatgttcggcatcaccagaatattggcggaacctttcaaagagctgtccggcatacggtcgttgcgaatcgcttccaccagcgctgcatcgccgtgcatttcaccatcaatcatcagttctggtgcacgttccctgaccagttccagcgcctgacgcattttgctcgacgacgggcagtcagaagaaccaaagttggagtgcgacaacaaagcaacgcgcggctcaataccaaaacgacggacagtttctgccgccatcaaggtgatctccgccagctcttctgcatccggttcatcattaacatatgtatcaggcaataaaggtgttaccaccgtcgtggcgttaagcaagtgaaagggtttggcgaccatctgacccaggcggttatcgactggaaagcgagctgtgaacgccgttttgtgttcaggccgaatgaagcgataacgccagcagacagacaagcggtaatggcgaaaatgaccgccaaacgacatcggcacttccgcccagcgtgccagcccggcggtgacggagccaaagtcatcgccgcctgcaatcggaatgcccggcaactgttctgccagcgcttttttaatcagcggagaacgggcgctaccgccggtcaggtagataacgtccggtttttcctgggcgttatccagggccagttgcacctgttccagaatccgcgtcagtggctggctgagggcgctttccagccctcgctggctaatcagcgtagccagttcattgctgataaacggcagtgaggcgcgggtttccgctacgcttgaaagagcaattttgcactcttctgcgctacgcaccaggcgatagcttaaacgctgacgccagacttttgtatgttgaggaccggtagttttctgattgaacccagcgatctcggcgtggtcaatatgtgcgctgaacgcaatctgccgttcgtcgccgggcacgcgctgatctgctacaacgcggtgccccctgaaaatattgctcaaacagggcatgatgcgctggtgtatgccagtggagctttcccagagactggctggtgaatctgcttaatcagtacgatgagctggccgttcgtaaccagtttcaagtgtaactcgtgagattcggtcttctgccgttggcttattccgcccggtgcttttccgcgcgttcggaagaccgcccgaaagatgagtgtgaaacctgttgcattaagtatccgaacgggcgcaacgtgctgtcgcaggaaatccatcaagtgtttgtactcaatggcattcagtccatgagcggctacgtttacaacctcggtaacgagctggcatccatgcagggcctggttgatgtggtccgcctgtcaccgcagggttcttcagcgcgagaagcattctcccactctctcgatctcgcccgtctggctgaaaagcgcggctatcatcgctactggctggcagaacaccacaatatgactggcattgccagtgctgccacgtcggtattgatcggctatctggcggcgaataccaccacgctgcatctggggtctggcggcgtgatgttgcctaaccactcaccgttggtcattgcagaacagttcggcacgcttaatacactctatccggggcgaatcgatttggggctgggtcgtgctccgggtagtgaccaacggacaatgatggcgctacgtcgtcatatgagcggcgatattgataatttcccccgcgatgtggcggagctggtggactggtttgacgcccgcgatccaatcttagagccgacacataacgggcgtcgattgtgctctacagttnggcacccgaggatgggctatacgccaggcgttgaaccaaccaccggcccgcttggacaaggtttggcgaacgccgtcgggctggcgatagcagagcgtacactggcggcgcagtttaaccagccagaccatgagatcgtcgatcacttcacctatgtgtttatgggcgacggctgcctgatggaagaaggctggtttaccgacgatacggcaaaacgttttgaagcctatcactggcatgtgatccatgaaatcgacggtcacgatccgcaggcggtgaaggaagcgatccttgaagcgcaaagcgtgaaagataagccgtcgctgattatctgccgtacggtgattggctttggttcgccgaataaagcaggtaaggaagaggcgcacggcgcaccactgggggaagaagaagtggcgctggcacggcaaaaactgggctggcaccatccgccatttgagatccctaaagagatttatcacgcctgggatgcccgtgaaaaaggcgaaaaagcgcagcagagctggaatgagaagtttgccgcctataaaaaggctcatccgcaactggcagaagagtttaccccgacggatgagcggtggtttaccgaaggactgggagaaaacgactcagaaatatatcaatgagttacaggcaaatccggcgaaaatcgctacccgtaaggcttcgcaaaatacgcttaacgcttacgggccgatgctgcctgagttgctcggcggttcggcggatctggctcccagcaacctgaccatctggaaaggttctgtttcgctgaaggaagatccagcgggcaactacattcactacggggtgcgtgaatttggcatgaccgctatcgccaacggcatcgcgcaccacggcggctttgtgccgtataccgcgacgttcctgatgtttgttgaatacgcccgtaacgccgcgcggatggcggcactgatgaaagcgcggcagattatggtttatacccacgactcaattggcctgggcgaagatggtccgacgcaccaggctgttgagcaactggccagcctgcgcttaacgccaaatttcagcacctggcgaccgtgcgatcaggtggaagcggcggtgggctggaagctggcggttgagcgccacaacggaccgacggcactgatcctctcaaggcagaatctggcccaggtggaacgtacgccggatcaggttaaagagattgctcgtggcggttatgtgctgaaagacagcggcggtaagccagatattattctgattgccaccggttcagagatcgaaattaccctgcaagcggcagagaaattagcaggagaaggtcgcaatgtacgcgtagtttcccctggcctcgagcgatattttcgacgcccaggatgaggaatatcgggagtcggtgttgccttctaacgttgcggctcgcgtggcggtggaagcaggtattgccgattactggtacaagtatgttggtctgaaaggggcaattgtcgggatgacgggttacggggaatctgctccggcggataagctgttcccgttctttggctttaccgccgagaatattgtggcaaaagcgcataaggtgctctggagcctctcctgccagaaataaaacttgtggcacaggcttctcattggagcccccacagtccatttggttgtaatgaatgtgcctctcttgtgtaggttgcaatcgttttgcagcctctgctaccaagcttggtggcggtgttcctgccgctgctgttgatgggcggattgccgggccgactgttacgcgaatttgccgtgacgctttctgtcgccattggtatatcgttgctggtttctctgacattaacgccaatgatgtgtggctggatgccgtctggtgggcgtggtgctgcttggcaccattgcgctgaatatctggctgtatatctcgatcccgaaaaccttcttcccggagcaggacactggcgtgttgatgggcgggattcaggcggatcagagtatttcgtttcaggcgatgcgcggtaagttgcaggatttcatgaaaattatccgtgacgatccggcagtggataatgtcaccggctttacaggcggttcgcgagtgaacagcgggatgatgtttatcaccctcaagccacgcgacgaacgcagcgaaacggcgcagcaaattatcgaccgtctgcgcgtaaaactggcgaaagaaccgggggcgaatctgttcctgatggcggtacaggatattcgcgttggtgggcgtcagtcgacgccagcagtacacgttggtaccgagcggcatctggtcgttcgcggaaagcgtgaccgcacgggaagggccgtcgaggctaccttttgccgagttaacgttagcgccggtaatggcggtgcgcacggtttcgctggtcaggccgagggcggcaatcgcctgagcgttaagtttgacgcgaacagccggacgctgaccgccggaaagcgtcaccaggccgacgccggaaatctgcgagattttctgcgcgacgcgggtttccaccatatcttccacttgcgtcatcggcatggcggttgaggtgacggcgagcgtcatgatcggcggatctgccgggttcactttgctgtaaaccggcgggttagccaaatcgctcggaaacaagttggtcgcagcgttaatcgcggcttgcacttcttgctcggcgacaatcgagcggtaatgttacctggaactgcaaagtgataactacggcaccgccggaactttgcgacgacatctgtttcaggccagacatctgcccgaactggcgttctagcggcgcggtaacggcaaaggtcatgacatccgggctggcacttgggtagagcgtgaccacttgaatggtcgaatagtccacttccggaagcgccaaaacgggcagggcgcgataaccgataatcccggcgagtaagatcgccaccatcagcagcgtggtggccccaggacgcataataaacaggcgcgacgggccgcctgtgctgctcgggggtaacacctgcatcaggagcgtgctccttttttcgcgtattcgcggctggtggctttcttcttccggagtagtggcgctctgggcttccaccacttccactttcgccccttcggtcaggcgatcaatgccgtctgtcaccacgcgatcgcccgcagaaatacctgcacggatcaccactttctgactgtcctgaatgcccggcgtcaccagatgtttgctgaccttgttttcgctattcgcgccccaaaggggtcgagctcagtccgatcacgggctacgttccgggtacagttttcggccatttccaaaatgagcgggcataggtgtacggggggagaagagagacccataatgagtgccagaccgcggctcgcaagagtcagcgagctatatccccggcgagaggagatgtgggcgcactccaaagcaatgaagctatcatccatgaagtagcagtccatgaggaagtccat

SEQ ID NO: 140092 - DNA, 1176 bp, Homo sapiens; identical to SEQ ID NO: 121857

SEQ ID NO: 140093 - DNA, 1443 bp, Homo sapiens
atgagcctgaacgacgcgggcacgctggtgagtaacttctggatgtcatacatggtcggcatgtgggcgttcagctttattcttcgcttctttgatttgcaacgcattctgaccgtactggctggtctggctgcgattctgatgtacgtctttaacaccggaacaccagcacatatggcgtggtcaattctcgctctgggcttcttctccagcgcgatctataccaccatcatcaccctgggttcacagcagaccaaagggcgcagaatcttgtggaaaacaccgcaacgcagcgccgcctttacgtatcgtttccagggtcatttgtacctggcccttgtccatacaacaggtctccttgccttgacgttagtctccttgagtttacggtggtatatccgggtaattaccgggccgttggaagatgaaactgaattcccgtctcgtcagcaaggccgattgggctcggagtctcaagtcgactctaggtaccagctaatgaccatgtattacgaattccgagctcgggtacccggattagaacgaatgtggcaacataattcagtgtcagggaaaaaaggactggctgcactctgtttactggctgtgctgggcttagcggctgcgatcaacaagagaatgcggcggcaaaagtggaatacgacggactttcgaacagccaaccgctgcgtgtcgatgccaataaccatacgtaacattccggtgaccgttgaacgccagttgtatcggcttatccctggtgaagaagagatgagctttattctgcaaccggtgaccagcaatgagattgacagcgatgcgctgtatctcgatgaaatcacgcttaccagcgagcaggatgcagttctgcgctacggtcaggtggaagtaccgctgccaccgggagccgacgttgagcgcacaacatggggcatttcggtcaataaacccaacgccgcgaaacagcaggggcaattgctggaaaaagcgcgaaatgaaatgggcgaactggcctatatggtgccggtgaaagaactgacgggaacggtcactttccgccatttgctgcgcttctcgcaaaaagggcaattcgttctgcctcctgctcgttatcatctgcgacggtcgcatagccttcgccatggcaggcgtcatacccgcaaaggcgaaagaggtacgattaacatagtgaacggaacaccaattcacgaacgttcccgaaatatcgataacagacgctctctggggcattgggagggcgatttagtctcaggcggtgtggggacggtgattggcgtggtgaccggggtaattatttttaccgtcatcaactatggcctgacgtatatcggcgtaaacccatactggcagtacatcatcaaaggggcgattattatcttcgccgtagcgctggattcactgaaatacgcgcgtaagaaatga

SEQ ID NO: 140094 - DNA, 1800 bp, Homo sapiens
tcacgccaagggtctccaatggccaccagagtagctcgatacagtgtcgattggggctttctcaaaccctgtgttaaaccgggtgccctcggggtttttctcacaggatttgctgtaaacccaccttcgcctgcaccgatgtaaggcgttgaggcaaacccgatgcttaccattgatatagtaggggagtgggggtagctggcctctgcacaactgtgttagagcgttagctgtaacccgccttcgcctgacgcggatgtaacggtttgccgccaccgccacggggtgcgcggcagatacactgcaaccagcagaaacagcaactgtgaccggggagtgatcgcagaagtgcgcgaatgcaacagccgggaaggacggtgctactaaccaacgggacgcagcgttgaaaggtagcattatcgtaccgaattgccccggggtacgggcaaccttcggtacttggcggcttaaggctcggagcctcgaatccgagctccgggggtagtggacgtaggtgttatttgaaactttcagtcttttttcattgatcaactgagtcctctccgggttgccattgtggcgatgcttcttgctccggccgaaccgtgctgatgccatgtagctcaagtacctgactgcgtaatacagcccgtctgcgtctggtttttcaggacggtttttcctgaggtagcctgagtttaacggcactccttcctgacactgctgagcgcgaggagatacgagctggtttgtcagccaaaatgagcattcggcgatagctactgcgctgaatcgcagtccttcgacgatctcacgtgaagtcagcgtaatcggggcagacgctattacaaagctgttgatgctaataacgagccaacagaatggcgaaaaggccaaaaccgtgcttactggatcaaaattaccattgcgaaagcttgttctggaaaagctgaatatacagcatctgcgacggtcgcatagcctcgccatggcaggcgtcatacccgcaaaggcgaaagaggtacgattaactagtgaacggaacaccaattcacgaacgttcccgaaatatcgataacagcgctcttgtaacggtattacgctaatgcacgaatatttgatatgcttactgggcacaagccgaagtgcgacacgcttgttgacactaatgcaggaaaaacgcgaagaatttggtggagggtgcagtagacacccgcactgcacctcacgataacctacgtactggttttgatatttgccaatggctggaatattacgtatgctttttacgcagcacccgtagtgcctgacacttgttgtgtttgggggggaaggtcgggcatccattgagtcgagagagcctagaaccagatgttcccttatgaaaggacctacgaaccggatgttaccctgcctgttacagcatctgctagtatgccgcctacgcctgcaacggatgaccggtttgccgcctccgcgaactgcacggttggcgatgagctgttgcatgtattgcttaccacgtgcgctggcgtatctaagagggggtggggtccgtattgtccagttggttgctcgacgacgacgccatgggcgagtgattgacgcagctatcgcccggaactgcgtccgcgggaaacagtatagccggagatccccgatttgacctatgccgtgtgggcagttatgtgtagaactctcgctcctgttccgggttctctccccttgggtttcatcgggggtgtagtgccaaggtgatcgcgcgctacaggggccccttcttactgcgttctttgccat

SEQ ID NO: 140095 - DNA, 2852 bp, Homo sapiens
atgaaaacgttaattgcccggcataaagctggtgaacatatcggcatatgttcagtctgttctgcccatccgttggttatcgaagcggcgctggcatttgatcgcaacagcacgcgcaaagtgctgattgaagcaacgtcaaaccaggtcaatcaatttggcggttataccggaatgacaccggcagactttcgcgaatttgtttttacgattgccgataaagttgggtttgcacgcgaacgcattattctcggcggcgatcatctggggccaaactgctggcagcaagaaaatgcggatgcggcgatggaaaaatccgtcgagctggcagtggtcattgacctgtggtcacgtgccgttattggctggtcaatgtcgccacgcatgacggcgcaactggcctgcgatgccctgcagatggcgctgtggcggcgtaagaggccccggaacgttatcgttcacacggaccgtggaggccagtactgttcagcagattatcaggcgcaactgaagcggcataatctgcgtggaagtatgagcgcaaaaggttgctgctacgataatgcctgcgtggaaagcttctttcattcgctgaaagtggaatgtatccatggagaacactttatcagccgggaaataatgcgggcaacggtgtttaattatatcgaatgtgattacaatcggtggcggcggcacagttggatcaactctctgctgtcgcagaagcggaacacgcaaggtagaattgaagatggaaggcagcatgacaaatgggtcgcggagcgcaaccgtatagaggatccccgtctggtcaccgtgcgtgaaggtgaagcccgtgaagtggtgctggcaaaaatgcacgaaaaacgcgttgaaaaagcgctagttgccgcactggtggtcgcactgctgattagcggtggtatcctgacctgggccggatttaacgatccgcaggagatcaacggcaccttaagcgccgatgccacacctgctgaagctatctcccccgtagccgatcaggactggcctgcctatggtcgtaatcaggaaggtcaacgcttttcgccgctgaaacaaattaacgccgataacgtccataatctgaaagaagcctgggtgttccgtactggcgatgtgaagcagccgaacgatccgggtgaaatcaccaatgaagtgacgccgattaaagtgggcgacacccctttactgtgtaccgctcaccagcgcctgtttgcgcttgatgccgagatggacggcatcgccacgctgaaagagatcaaagcgttaaacccggcaattccggtgctgattatgactgcgtactccagcgtcgagacggcggtagaggcactgaaaactggggcgctggattatctcatcaagccgctggatttcgataacctacaggcgacgctggaaaaagcgctcgcgcatacgcacagtattgatgctgaaacacctgcggtgactgccagccagttcggtatggtcggtaaaagcccggcgatgcaacacctgctcagtgaaatcgccctcgtcgcgccatcggaagccacggtactgatccacggcgattccggcaccggtaaagagctggtcgccagggcgattcacgccagtagcgcacgtagcgaaaaaccgctggtaacgctcaactgtgcggcactcaacgaatccttgctggaatctgaattgttcggtcacgaaaaaggggcgtttactggagccgataaacgccgggaagggcgctttgttgaggcggacggcggcacgctgtttctcgatgaaattggcgatatctcgccgatgatgcagataatacctttcatcgcaaaggaaaaagcagcttcatctgtccgtgactctagaggatcccctgagcgcgaggagatacgagctggtttgtcagccaaaatgagcattcgtgcgataggttactgcgctgaatcgccagtccttctaccttctcacgtgaaagttcagcgtaagggggggcacaggctattacaaagctgttgatgctaatatccgagccaacagaatggcgaaaaggccaaaaccgtgcttactggatcaaaatgtaccattgcgaaagcttgttctggaaaagctggagatgaaatggtctccagagcaaatatcaggatggttaaggcgaacaaaaccacgtcaaaaaacgctgcgaatatcacctgagacaatttataaaacgctgtactttcgtagccgtgaagcgctacaccacctgaatatacagcatctgcgacggtcgcatagccttcgccatggcaggcgtcatacccgcaaaggcgaaagaggtacgattaacatagtgaacggaacaccaattcacgaacgttcccgaaatatcgataacagacgctctctggggcattgggagggcgatttagtctcaggtacaaaaaactctcatatagccacacttgtagacacgaaaatcacgttatacgatcatcgttagactcaggggcaaagattctgtctcagtaaatcaggctcttaccgacaaattcctgagtttaccgtcagaactcagaaaatcgctgacatgggacagaggaatggacctggccaggcatctagaatttactgtcagctcaggcgttaaagtttacttctgcgatcctcagagtccttggcagcggggaacaaatgagaacacaaatgggctaattcggcagtactttcctaaaaagacatgtcttgcccaatatactcaacatgaactagatctggttgctgctcagctaaacaacagaccgagaaagacactgaagttcaaaacaccgaaagagataattgaaaggggtgttgcattgacagattga

SEQ ID NO: 140096 - DNA, 1254 bp, Homo sapiens
atggacgatatcccgcaagaggcccggcagtaccggcataaccaagcctatgcctacagcatccagggtgacggtgccgaggatgacgatgagcgcattgttagatttcatacacgggtcaccgtcgacagcgacacacttgcatcggatgcagcccggttaacgtgccggcacggcctgggtaaccaggctttgcagaactttcagcggtataccggcatacagcatgtgcatcgcataggaatggcggaacgtatgtggtgtgaccggaacagagaacgtcacaccgtcagcagcagcggcggcaaccgcctccccaatccaggtcctgaccgttcttttactctagaggatccccggcgaagatgccggatgctatcccggcgaaaatacgtcgctcaattccaccagaatcagtaccagcatcagcggtgtggcgtacagcaatccattcttacgcacaaagaaatgctgggtaccgagctcgaattcaatagcgtgcataaatcggaagatgacgtgctagaggatacccctaaatttgatgaaggtaaactgcccaccgatccacacctgatgctccgactggccattgaaactgttgctcatgactatgatgtcatagttattgacagcgcgcctaacctgggtatcggcacgattaatgtcgtatgtgctgctgatgtgctgattgttcccacgcctgctgagttgtttgactacacctccgcactgcagtttttcgatatgcttcgtgatctgctcaagaacgttgatcttaaagggttcgagcctgatgtacgtattttgcttaccaaatacagcaatagtaatggctctcagtccccgtggatggaggagcaaattcgggatgcctggggaagcatggttctaaaaaatgttgtacgtgaaacggatgaagttggtaaaggtcagatccggatgagaactgtttttgaacaggccattgatcaacgctcttcaactgtgcctaagcctgaatctgagcctggttccctggtcagaagttatagttttacttcctttggtgagaatacacaagaaaaccaccagggtggatggttaggtggcattactgagcaaaaaggtctcctggatcttacattttctcagtggctccctcagccattagcagttgctcccactacacacacatgtccacatcttcccatgcttctccaaacaatggcagcctttacagaattctatatccaggaatccttcactaagtga

SEQ ID NO: 140097 - DNA, 1363 bp, Homo sapiens
gccgccagactggggtgatttttccggcacatagcgtaaaactataattgccaaagtaaaacagtgtaaaaggtatgtaacagaccattgactggctgaatggtctgtcatactttgttaccctgcaaaggggagtaacttcattgccggtcgatcgtccattacgatgtgtgaaaaaacacatccggtcaccgggcaacccgaaaggaatacgcagacgtattccttttttgttgtaagtgagaccttgccggaaggcgaggtctatgcataaaaagcagcggctgacgtcttccgacgttggccgtttttttatgtgtaaggaacttctatgaatactgtcggcacgccgttgctatggggcggattcgctgttgttgtcgccattatgctggctatcgacctgttgttgcaggggcgtcgtggggcacatgccatgaccatgaaacaggctgcggcctggtcgctggtctgggtgacgctgtcgttactgtttaacgccgctttctggtggtatctggtgcaaaccgaaaggtcgcgccgttgccgatccacaggcactggcctttctcacaggttatctgattgagaaatcgctggcggtcgataacgtctttgtctggctgatgttgttcagctatttctctgttccggcggcattacaacgccgcgtgctggtgtatggcgtgctcggggcgattgttctgcgtaccatcatgatcttcactggcagctggctaatttcgcagttcgactggatcctgtatatcttcggtgccttcctgctgtttaccggcgtgaagatggcgctcgcccatgaagatgaatcaggcattggcgacaagccgctggtgcgctggctacgcggtcatttgcgcatgaccgacaccatcgacaacgagcatttctttgtgcgtaagaatggattgctgtacgccacaccgctgatgctggtactgattctggtggaattgagcgacgtgattttcgccgtggatagcattccggctatcttcgccgtgaccactgacccgttcattgtgctgacctcaaacctgtttgcgatcctcggcctgcgtgcgatgtatttcctgctggcgggcgtaacaaagcgtttctcgatgctcaaatatggcctggcggggattctggtgtttatcgggatcaagaggctgattgtgaactttaacctattgcaaacgcgcgcttgcttgggcgggggttgggcttttggggagacgttaattataaagcctggtgaatatcggatgaaaacagcggggggataattttatctgctaagccggacctgtattacatgacacgtttctcctctctccagaaagggcgggggggggatttt

SEQ ID NO: 140098 - DNA, 318 bp, Homo sapiens
tcaggagatgtgagcaacaagaaatagcacacaggctggtccccacagaatgagaaaaggcaaccaggacgaagcttccagcagcacaaatcccactgacgagaacccgggggctgtagggcagcaggtgaaggccaagaggagccaacaatttgatgacgagtgtggggaggatgtccgccaggagcacagccagaagcccaccgcgttcttccaatgcgcgccctgatggtccaacagagggagccggggctccgggacggtctcctccccctcggaatccgaaaagcgccgccgcgagcctgcacagcctcccat

SEQ ID NO: 140099 - DNA, 1269 bp, Homo sapiens
tcaggagagctggcagaggaagtcatgcagaggcaaagccaggagccccgacagggagatccccagtgtgtcagagatgcaggtggccgccattgcaaactcccggtgctcatcactggtctccagggcgatgttgtggaaggtgttcacgtaggctgcgcctcccaggagcccctcatacagaatgatcaggaagacgaggtagatgcttggcagaaagccgaaccacacgtctgccagcaggaacaccaggttgaggcactgcagcagggccagggcccaggtgaaacggatgcgacagcagcggagagaagagcgggaggcaaagacgccagcctggtacagcatctggtaccagcggtattgctgagcgtgactcagggaagtgttccagaaaaagaggagttcaaaaagtccctggttaatgaaatactcggcaaagtaaactacgaccaagggaacaatgtaccacagcagacccccagccatcatccgaaccttgaacactgtccacctttcccgaagggagaggctggagctggagcctggcttcgactccggggcctcggttcttatgaggggctgccgggctgcgctctctgcttcttcttcccctccagggtcctgggcctcaggagatgtgagcaacaagaaatagctggccagcagcagggcagggatacccagcatggacagcagggtctgctgaggggagaggccggcctgggtgaggcccaggtaggacagggcccccagcagcccagctcccccagtccctgaggaccaccaggagatcacggccctggggtagaaggcagtgagggagaggaaggtgacctccccaaggcctgatgagatgctagcgaagaccacaccacacaggctggtccccacagaatgagaaaaggcaaccaggacgaagcttccagcagcacaaatcccactgacgagaacccgggggccagacctgtagggcagcaggtgaaggccaagaggagccaacaatttgatgacgagtgtggggaggatgtccgccaggagcacagcatggctctggtttcccgatgtcctcttgtggctaaggatgtcgtgggcggcactcagcatcaccacataagagaagttgttgcaaaggcccagcagccagaagcccaccgcgttcttccaatgcgcgccctgatggtccaacagagggagccggggctccgggacggtctcctccccctcggaatccgaaaagcgccgccgcgagcctgcacagcctcccat

SEQ ID NO: 140100 - DNA, 569 bp, Homo sapiens
gaacgtgctggcaccaaagctggcaacaaaggtgcagaagctgcactgaccgcgcttgaaatgattaatgtattgaaagccatcaaggcctgaaattagtaaggggaaatccgtgaaacctgctgctagtcgccgcgctcgtgagtgtgccgtccaggcgctctactcctggcagttgtcccagaacgacatcgctgatgttgaataccagttcctggctgaacaggatgtaaaagacgttgacgtcctgtacttccgtgagctgctggccggggtggcgactaataccgcatgacctcgacggactgatgaagccatacctgtcccgcctgctggaagaactggggcaggtagaaaaagcagtactgcgcattgcgctgtacgaactgtctaaacgtagcgatgtgccatacaaagtggccattaaggaagcgatcgaactggcgaaatcgttcggcgcagaagacagccataagttcgtcaacggcgtactcgataaagcagcacctgtgattcgccctaacaaaaagtgatatccaggccggtagattcacggaagaccgttccat

SEQ ID NO: 140101 - DNA, 449 bp, Homo sapiens
tgtattgcaggaagtgggtaaaaccaaatctgacttgtacgccacaggatgattcccagtatccagggatggatacaaagacagcaagtgattacctgccacagacaaattggccaacaactcaattaccaccaggatatacttgtgcagaaccatatttattgcccagacattaataaaccctaaggccagcggtcgagtgacggatagcgcattgacgatatgcaggctgttggtcatcaccgtgatgttattaaagcgcgagagcagggaaccatctgcaaaacggtaggcagcttctgcaatcagctctttcttgtgggtgttgatgagtgttttatgatcgataggcggatcggattcctctttattcaacaccactccgccataagtacgaatgacggttccggcatgttccagaatgaccagatctttgcgaatggttgtgc

SEQ ID NO: 140102 - DNA, 440 bp, Homo sapiens
ccgcgagcgtgttgaagcagtgatgaatcagcatggattttccccttcccgctctggcgcgcttcggtatccgtaatgatttgatacagctcttcatcgctctgggctgcgcgtaaacggcggcagatggttttgtccgccagacgtttcgccaccagcgacagagtatgcaggtgcgttttagtttggtctgccggcaccagcagggcaaaaagtaagtccaccggttggttgtcgatggcatcgaaagctataggcgtttcgagctgaacgaaaacgccaacggcgcgcagagtatcttcttccagtttgccatgcggaatggcaataccattgccgataccggtactgcccattttttcccgcgtcaggatagcttcaaaaaccacctgaggcagctcgctaagttgtttcgccgcccgctcgctgatgacttccat

SEQ ID NO: 140103 - DNA, 706 bp, Homo sapiens
gccagtgcccaaagttggcaagccttccagttcgacctatagaggatcggttttaaatttgaattctgttaaggagtaaaaattgatccaggttgccgttgtcatcggtggtgggcaacctttaggcgcgttcttgtgccacggtctggctgccgaggggtatcgcttcccggttgtcgatattcagagcgacaaaagccgcaaatgtggcacaagaaattaacgccgaatatggtgaaagtatggcgtacggttttggtgctgacgccactagcgagcaaagcgttctggcgctctctcgtggggtagatgaaatctttggtcgcgtggatttgctggtctacagcgccggaatagcaaaagcagcctttatcagcgacttccagctcggcgattttgaccgttcgctacaggtgaatctggtgggttatttcctgtgtgcgcgtgaattttcgcgtttgatgatccgcgacgggattcaggggcgcattattcagatcaactcgaaatccggcaaagtgggcagcaaacacaactctggctacagcgcagcgaaatttggtggcgtcgggctgactcaatcactggcgctggatctggcggagtacggcattacggtgcattcactgatgctcggtaacctgctgaaatcgccgatgttccagtcactgttgccccaataaaaaaccaagctgggtatcaaacc

SEQ ID NO: 140104 - DNA, 2637 bp, Homo sapiens
atgcaggttggcgacgtcggtttccagcatccgcgcgcaggcagcccagttgtgatgattttgtgccagtgcctgacgaatagtttcacgctggaacgcttctgtcgcttcacgcaggttttgcttaacaacgggcaccgccgccacttctggcgtcggcaacgtcacctcaggaaaagcaaaatgttgcgcctcaagaatcacttcatcgccgctgcgggtggctctcgccagaactaccgcccgatgaatagcatgttccagttcgcgcacgtttcccggaaaactgtagtgttgcagtaaatttcgcgctccggcacttaataccacgcgggagagcccctgccgcaaacgacactgctcgcagaaataccccgccagcagaatgacatcatcgccccgctcacgcagcggcggcaccgaaagtggaaacacgctcaggcgatgaaacaaatcggcgcggaatcgccctgccagcacctcttcgcgtaaatcgcggttagtcgccgccagcacgcgcacatcgacccgcaaacaacggtcatcgccaacgcgctgaatatcgccatactgcaacaccctcagcagcttggcctgcagttcccacctgggtcgtccgaaggcgagtacaacgaagaattctctctgctgccggttgttaactacctgaaagacaaactgtctaacccggttcgtctggttaaagattacctcgacggcgttgacgttgctgaaggtgaactggttgttctggaaaacgttcgcttcaacaaaggcgagaagaaagacgacgaaaccctgtccaaaaaatacgctgcactgtgtgacgtgttcgtaatggacgcattcggtactgctcaccgcgcgcaggcttctactcacggtatcggtaaattcgctgacgttgcgtgcgcaggcccgctgctggcagctgaactggacgcgctgggtaaagcactgaaagaacctgctcgcccgatggtggctatcgttggtggttctaaagtatctaccaaactgaccgttctggactccctgtctaaaatcgctgaccagctgattgttggtggtggtatcgctaacacctttatcgcggcacaaggccacgatgtgggtaaatccctgtacgaagctgacctggttgacgaagctaaacgtctgctgaccaccagcctccactcccatggctgagcaagtgtgagcacatgcatctatatgtgcatagaaatgatcgccgctgaggcaagcaaagttaacaatatcggcctctgtcattgtgcggcggggagtcaacaggctgtcgcctggttgtagctcctcaaaatatttgcggaacggatgaatatcgccggagatggcacgtgacagattggcaccaacagtgcgaatggttccttcatcaaactgtttgcgtgctgacaggtttgccatggtgtagccgttttgatgagtcatccctgcgctaaaccagttgcccagtggtagcgagagatcgagagcgatatattttcctgtattggcgttgctgtcgccgttgttatagcgctgaagccggtccacctttgcatcgacttgtgttatattgtcatcttcagccatcatcatcacagtaaaaatcactgatatttccaaagaaggttcatttcttttgacttgaatgagctctgtgatgtcacaatgtcctatatgtgcttggtggatggatagtaaaattaattgatatcttctacatgttacacatttatcatcatcattcttctttctattgaactgattcgccaggcgcggcgggaatatccgcagctggatggcgtgttctgtacgaatgatgacctggcggtcggcgcggcgtttgaatgtcagcgtcggtgaaggtgtgctgatgacttccgctttactctgggcttctgctaccagcggtgttaatggctgagctggtgtgccgggggcgtcatcaggctgtgctgttgtgagttgctcagaagtcagttttgtgaagagcgttggtttctctgtcggtaacacggttgacggcgcatcagtcactttgggcgtattgtcaaaacccggcaacatcgcaaaaagggcgctcaggcttgcggtgacgtcttcattcagatcatccgctttttcgtcttttgtcgtatttttgtcagccaccgcagccaacgccatcgtctgagcggtggttaacggtgttgatgtggattgttcgtcgttgatgacaggcggtgtttcatccacagggatcagtaaattagcttgttgcgcgtcggaaacaatatcgctgatcagcggctcgccttttgtcgtgggcttatctgttgccaccagcaactggggggccgctttgtcggtagttgtctcgcctgctaatgcttcgctcaacaacgcgagaaaatcttgtgcagcatcgctggctttgccgccaggcaatgtggtggtgtcaacgtcatccatctttttctgatcgaggcggttttctgcaagcagtgccgccgtggattgccgttcctgcagtgtctgccaggcctgcaaacgttgttttttttctcgccaactgttcagggcaatgtcaactttctgcgtctgcaatatcagctttataccctggcgctgcatcgttatctgcgccat

SEQ ID NO: 140105 - DNA, 987 bp, Homo sapiens
  misc_feature (1)...(987): n = a,t,c or g
gcgggcggtgcgatttttgataacctcgcattaatcttcgccatcggtgtggcatccagctggtcgaaagacagcgctggtgcggcggcgctggcgggtgcggtaggttactttgtgttaaccaaagcgatggtgaccatcaacccagaaattaacatgggtgtactggcgggtatcattaccggtctggttggtggcgcagcctataaccgttggtccgatattaaactgccggacttcctgagcttcttcggcggcaaacgctntgtgccgattgccaccggattcttctgcctggtgctggcggccatttttggttacgtctggccgccgagatccccgtcaggccgccattctggagtatctgcaaaagcagggtaaatgctcggttgaagaattggcgcaatactttgacaccacaggcacaaccattcgcaaagatctggtcattctggaacatgccggaaccgtcattcgtacttatggcggagtggtgttgaataaagaggaatccgatccgcctatcgatcataaaacactcatcaacacccacaagaaagagctgattgcagaagctgccgttagttttatccatgatggcgattcgatcattcttgatgctggcagtaccgttttgcagatggttcccctgctctcgcgctttaataacatcacggtgatgaccaacagcctgcatatcgtcaatgcgctatccgaactggataacgaacaaactatcctgatgccaggcggaacgtttcgcaaaaaatcggcctcatttcacgggcaactggcagagaatgccttcgagcatttcaccttcgataaattgtttatgggcaccgacggcatcgatctcaatgcgggcgtaaccacctttaacgaggtttatacctggacgctggtggtggataccgagcaggtttttggtgcccacgctgccatcggcattgcgatagccctcaaaggtgtatccttccagcggcg

SEQ ID NO: 140106 - DNA, 1773 bp, Homo sapiens
atggatgcaaagtgcgatcgatcgcgctttccttggctgtggcccaccaagcgtcctcgtggatgttttgccacgtttgtgccaattggtatcccctacgaccaaactaaaacgcacctgcatactctgtcgctggtggcgaaacgtctggcggacaaaaccatctgccgccgtttacgcgcagcccagagcgatgaagagctgtatcaaatcattacggataccgaaggtactccggatgaagcacgttgtgaggagaaacagtacatggtactgatgatcgtcagcggacgttcaggttcaggtaaatctgtcgccctgcgtgcgctggaagatatgggtttttactgcgtggataaccttcccgtagtgttgttacccgatctggctcgaaccctggccgatcgcgagatttctgccgccgtcagcattgatgttcgtaatatgccggagtcaccagaaatattcgaacaggcgatgagtaacctgcctgacgctttctcaccgcaactcctgttcctggatgccgaccgtaataccttaattcgtcgttacagtgacacgcgccgactgcatccgctttccagcaaaaacctgtcgctggaaagtgctatcgacaaagaaagcgatttgctggagcctctgcatgggtttccggattacgacactgttggtttttcctgcaaacgacgtattgattatgtatgccgaataaagcattcacgccgcatccggcaagttgtattgctcaacttcgctaaatctggtgctttttcaacaacgcgcggaactgatgataagacccgacgttctctacttgtgactctggtgcgtattttctgtgtgcgcgtaattttcgcgtatgatatccgcgacgggattcatgtgcgcattattcagatcaactcgaaatccggcaaagtgggcagcaaacacaactctggctacagcgcagcgaaatttggtggcgtcgggctgactcaatcactggcgctggatctggcggagtacggcattacggtgcattcactgatgctcggtaacctgctgaaatcgccgatgttccagtcactgttgccacaatacgcgaccaagctgggtatcaaaccggatcaagtcgagcagtattacatcgacaaagtaccgttcaaacgcggctgcgattatcaagatgtgctgaatatgctgctgttctacgccagtcctaaggctgtcgtacttgcaccggacagtcgatcaatgtcaccggcggtcagcgggcgctttaaaccgcgggtcgtggtcgccatcgcgctggacgatcagcagcgcatcgtcgacaccttgtttatgaaaggactgaccgtcttcgcccgaccgcaaaaaattcccgcaattaccggccgccattctggagctactctgcaaaagcagggtaaatgctcggttgaagaattggcgcaatactttgacaccacaggcacaaccatgcgcaaagatctggtcattctggaacatgccggaaccgtcatccgcacttctggcggagtggtccccgactccccccctcatactcggcgagacccccgccggttttctatggccttcccctggttcgacaacattcgatcggcagaattccaccacgtaacgacactgctcgcagaaataccccgccagcagaatgacatccatcgccccgctcacgcagcggcggcaccgaaagtggaaacacgctcaggcgatgaaacaaatcggcgctggaatcgccctgcccagcacctcttcgcgtaa

SEQ ID NO: 140107 - DNA, 168 bp, Homo sapiens
ttaaaggtcttcatccttgtcatcttcaccttgagtagagagtgagaacatgcgatgtttggttttctgttcttgtgttagtttgctgagaatgatggtttccagcttcatccatgtccctgcaaaggacatgaactcatccttttttatggctgcatagtattccat

SEQ ID NO: 140108 - DNA, 261 bp, Homo sapiens
cttccagtgcaggctgacctttgctgagaacctgctcttgcagatttctttcatgatctcgttcaatgcgaatccccctgcttctgccacagtgaattcttttaggatgtctgtgatgtcacatagcactatgagtgagaatatgcggtgtttggttttctgcatttgtgatagtttgctcagaatgatggtttccagcttcatccatgtccctacaaaggagatgaactcatccttttttatggctgcatagtattccat

SEQ ID NO: 140109 - DNA, 3780 bp, Homo sapiens
atggatgaagctggaaaccatcattctgagcaaactatcacaaggacagaaaaccaaacaccacatgttctcactcataggtgggaactgaacaatgagaacacttggacacagggtggggaacatcacaaactggggcctgtcgtggggtgggaggacgtgggagggatagcattaggagaaacacctaagggcactggcagagttctacttggtgctggccacactgagttccaatgcaaagtcccagaatggctgagctctccttcccccaagcatacagattctctctccgcaccatgtggccactgcctggagatgagggaagggtggtgttggcatttcaagactgtctttgctatcctcttcagtgcctctgtcagcgatatgaagttaaaaccagttgttgaaagtgatacactaacaattgagtctggaccacttgctagtgaagataaaccactttcgtgtggtacaaactctggaaaagaacaagaaataaatgagactctgcctatcacaactgtagctcagagttcagttctacttcatcctcaagaagcagcagccaggattagaatgtcagcaaggcagaaacagataatggaaatagaagagcagaagcaaaagcaattggaattacttgaacaaattgaacagcagaaattaagattagaaactgactgcttcagggctcagctggaagaagaaaaaagaaaaaaaactcaaccgactggggtaggatgcagaaaatctcatcactacataaatcatttgcattcttttagttctctgcctgttaaagttgagtcaggaaaaattcaagaacccttttcagccatgagcaaaagtacagtttccacaagccattctataatcagccaaatgcatgataggcctttgctgccgtcagagaatatcacagcccagcaaggtaatatgaaggccctccaagaacagttagacctacagaagaaagttcttcaggcaactcaggaagctcaggaacagttgcttttgtgcaaacagaaagaagtggaacagcaaacgggcctctcggtattccttcccttggtaactccagattcatctgctttattgccttctgccaaagcagatttggggagaatccaggaatcttcaccaaccaagaataatattgcagtttcctcagaccatcatgtgatctcacaacttcaggataagcgtttgagtctttcacagcctatcctatcacagcaaaataattttaaatttctccaagagcagttgaatattcagaaggatagccttcaggctaggcgagaagcccaggaagtattgtatgtacataaacagagtgaattggatagaagagtatgttccgaacaggctgagccctctttcccatttcaggtagctcagcatacatttacttcactaccatctgctgatacaaaatctggaaaaatacaggagcaacattcatctaagagcgagaaaggacttgtttcatgccaatctgacatccccatatctcaggatgggtctttgagtttcctacagcagttcctacctctacatgatagtttgaagttgctccaagaacagttgactaaacagagggatactcttcaggctaggcatgaagctcaggtggaattacttttacatagacaaagagatttgggggacagtaagtctgggctggtgagctcttcatcctcaccagtggttgttcagcattcagttgcttcacaagcttctgctaaagctgagcctaggagaattcaggagctttatttatctgagaaggagaatgtggatgaatctgagagattccaggaatgtatatcaatcaagagtgacagtaccattcccttaagccatcctaagatcccaagatgtcaggaaagacttttgagagtttcacaacatatgctacctctacaagataatttggaggaacaccaagcatggctagacactgagaaagaagcctttcatttcagccagaaaacccaagaaaatacatcttctgaacaaactggttcatcttcattcataccccagttggtacagctttcatttacttcgttagcttcagctgagtctggcacaatcctggaacctctttttacagagagtgaaagtaaaattttttcaagccaccttcagatcccacaattgcaggataggcttttgaggatatcgcaacttatccagcctcaacaagataatttgaaggcacttcaagaacagttagctacacagagagaagccatcattctagctagacaagaagctcgggaagaattacttttacatcagagtgaatgggagggaagaatatctcccgagcaggttgacacctcttccttacccctagtaccacagcattcattcgcctcattacctcttaatgaatctgaaagaaaccaagaaccatgttcaattaacagtgataatatagtatcctcaggtcactcagagataccaacattgcctgatgggctgttgggtttatcacatcttgttttacctcaacaagataatttgattgcacttgaagaacacttgcatgcacagacagatttccttccttctattgagaaaacccagaaagaattggttttgtcaaaaccatgtaaatttgaggaaaaggtatcttctgagcattttatccagtctcaccatggtgatttgcaggcacttcaacagcagttagatacacagaagaaagccattcgatctatacaggaagtccaagaagaattgcttttgcaaagattaagtgaattggagaaaagggtatcatctgaacaagtttgctcctcttcatttgtatcccagcaagataacttgggacttcagaaacagttggatctacaaagagaagttctgcattatagccagaaagcccaggaaaaattgcttgtacagagacaaacagcattgcagcagcagatacagaaacatgaagagactttgaaggatttctttaaagacagtcagataagtaagcccacagttgaaaatgatttaaaaacccagaagatggggcagctcagagactggtttcctaatacacaagacctagcaggaaatgatcaagaaaatattaggcatgcagataggaacaactctgatgataatcatttggcttcagaagatactagtgccaagcaaagtgggagacatgagacatcaatcaacacatgtacgataagcattggtttggttcggaaaagtttcctctttgtggcaaagctgaactctggacttagcaggcttccctatggtcagtgtgcatttagagtctgccgaagatcatgtactctccactatgtcaaaactgcccatattttgtacaagttaattgcagaggttacaaggggatttggccacctccttaactttttcccacagcacatggcaagcacaaccccccagctggattcagggcacaaaggaaaagattgggagggaagcagagggagatgtgacactgacaaaaaagaaggcaaggtggccacagaggcagagactagagtcacgcagctgcaagtcaaggaatgccagcagccaccagggctgaagcggcaaggaacgggttctcccctggagcctctggagggaggctggccctgccaacaccttgatctgcaacttctttccagcttccagaactgtgagagaagaagttctgttgttctaagccatcaacttgtggtaatttggtatagcagccataggaaaccctatgcaaacagtgaactaaataatgagcggtatttgtag

SEQ ID NO: 140110 - DNA, 1150 bp, Homo sapiens; identical to SEQ ID NO: 138526

SEQ ID NO: 140111 - DNA, 1395 bp, Homo sapiens; identical to SEQ ID NO: 125221

SEQ ID NO: 140112 - DNA, 2433 bp, Homo sapiens
atgagaggcagaggcagctgtcagtgggtactgatgctgccatgtccggggacaaatgcccacaggatggcaggagggctgctggatgagatgtttaaccatgcaggcgctggacgcttccgtttcttgggcagcatcttggtcaatctctcttcctgcgtggcactgaaccgtttccaggctctgcagtctgtcgacatcctggagactaaagcacatgaactcttgcagcagaacagcttcttggccagagtgtatgctgttcttcccatcgtgccttcttgggaaatatcctatgtcagagtggacaaagtaaacccccagtctcctcctgtgaaccggagcagagggaattgtcatgttcccatccacatgtcagcagccaaattacacaatcaaactcctaaatgttctcatattacttcatgggtacccaagccatggtcaaggcctgtatggaatccttcaccaccctgtccagtatacagcctatatctaaggatttgcactgcagagaaaataacctccctcagttttcccaaggttaggctactcacaggtcgctggtatggcagggttctccaactaggagacctagaaaaagacctagaaggagcaagtgtaggactcccaagtcctggttgctacaccagttctttaagaacccaagagggccagtggatgtatgtggccagtcggtgcccactgtcaccatccccttctcctgttagcatgccagcagaaactgggtccgccttcacaccaggcttcgtccaggtcatagaacatccaaactctggaccgactttgcatgtccagttggataccccaagagcattcttcctctcagtcatggcacagaagctgctttctcaatgtaactcgcccatggtccttttacagtccagtgggaaaaaacagatggatgggtcctttctggtccttttccctggatgctctgctcctgttcttcacattgcattcatatgtggcctggcctgtagagatgatggccctgaatttgcttggctagtagcaaatcccatagagcccaagacctcacctggaaccagaaatttatcaacaccaaaagctggttggatcaggagaggtcgaaagactggagctgagagtgtagggaaggaaggaataaagaaaggaaaggaaaggaagggaaaagaacggaatggaatggaatggaatggaatggaatggaaaggaatggaactgaacggaacggaacggaaaggaaaggaggaagggaggaagggaggaatggaggaaggaaggggagagtgtaggctgctgtcttcccagatgccccagtgtttctcaagggacatggatgaagctggaaaccatcattctgagcaaactatcacacggacagaaaaccaaacactccatgtcctcactcataggtgggaactgaacaatgagaacacttggacacagagtggggacatcacacaccggggcctgtcatgggctctgtctccgctgccttccgcacaacacagccagctgaagtctgacgtgatttgtgaattggaggtcacctgtgacatgctgaccagtttgcccctacagctgtctgctggtagtgttcctgcactgggttgtgaacctcatggagggcacaaggtttccctatcctgcacacccttaccaacactcgttatttcttgtctttttgataacagccatcctaacaggtatgaggaaattgaaaagatatggtcctcgccgaatcagctaaattgtgaaagtcttagcaagaatctttctagcaccttggagagcttcaagagcagcttggaaaatgccactggccaggactgcacaagccagccgaggctggagacggtgcagcagcacttgtacatgttggccaaaagcctcgaggaaacttggtcatcagggaatcccatcatgacttttctcagcaatttcacagtaactgaggatgtaaaaataaaagatttgatgaagaatatcaccaagttgactgaggagcttcgctcttccatccaaatctcgaatgagactatccatagcattctagaagcaaatatttcccactccaagaggtttctgcatgacaggcatggtcccaaaaacttgggctcaaagcccgtgctccaagggagccaatgttctgtgggggatgacacagtaaatatgcaaacaaaagaaggtggctccctagcacggcccgcaactgtgcagggcgtccagctgctccgcgcacaagtggccgcgatcctggcccggaggctccgccgcacgctgcgcgccgggaagagcaccctcgccgacctgctgctgccagtcctcttcgtggccttggccatgggcttgttcatgcctactcaacgtgaagatgacaaggataaagacctttatgatgatccacttctagttagacaatag

SEQ ID NO: 140113 - DNA, 2034 bp, Homo sapiens; identical to SEQ ID NO: 123283

SEQ ID NO: 140114 - DNA, 1497 bp, Homo sapiens; identical to SEQ ID NO: 138868

SEQ ID NO: 140115 - DNA, 2634 bp, Homo sapiens
  misc_feature (1)...(2634): n = a,t,c or g
cggacgccagggggttttcccgtcccgcgcggttgcaagagcccggcccagcggccaagatcgcatgccggcagctgcctctagaggtcgatgtccgcattactgggggctcggaattcaaagtgaccttattactaagcgttattgtgtgaagggctctcgcttttgctcggggctccgaacctcgctggggtgaagattttaaggtgtatcccggcggctcatactctcaataaatccctgttagtaaatgctgctattataactcattcattgcctgagccagcagtcgcgcagctgcctcaagcgcagaggattgaaaaaatcttcagatatatatcatcactctgaacatacgcaattaacggcggaatctcacgattctaccgttttttattatttttcagaggagtagtgatgaataattctgaaggtttgaagtcgtttcagcaatcgcttgctgatctgccgcaatgggtatcagagcggcttctgcagcaaattaaccagttaactaactacgagccagtgatcggcattatgggtaaaaccggtgttgggaagagcagtctgtgcaatgccctgtttgccggagatatatcaccggtcagcgatgtggcggcctgtacacgtgagccattgcgctttcgcctgcaagtcggcgaccgctatataacgctgatggatctgcccggcgtgggcgaaagtggcgctcgcgataccgagtatgctgcgctgtaccgcgaacagcttcctcgcctcgacctggtactgtggctgattaaggccgatgaccgggcgctgacggtggatgaacatttttatcatcaggtgattggagaggtataccggcataaggtgctgtttgttatcagccagtcggataaggccgaacctaccagncggtggtccacctcaaatgtcgcaacggcccaagcggccggcccgggcctcacccccatcaacccattcgaggaggcatcggacccggccaccaccgccaaacacacagtacatcacagcaaggcacaactgcaacatgcaccatcacaaacaattggtacaagaagccccacaggacctgaacttttgattacggctgatgatcgggcactggcgactgatgagcatttttaccgtcaggtgattggcgaagcataccggcataagatgctgtttgttatcagccagtcagacaaagctgaacccaccagcggtggaaatatcctttccacagagcagaaacaaaatatcagccgcaaaatctgcctgctgcatgagctattccagcccgtgcatccggtgtgtgccgtgtcggttcgcctgcagtggggactaagggtgatggcagagcggatgattaagtgtctgccgcgtgaggccagcagcccggtagtagcgctactgcaacatccctttcgaacaacggtagcccgggagcaggcacgtgacgatttcggtgaaaccgtaggtgccatactcgatacgtggcccgcgctgtctgggatttcttcttctgagtgtttaattctgccctattattctccgagccctgtcgcaagtgcggcagggctttctttatttgttttacccatactgaggagtctgcttatgacccgtctggcttcgcgctttggcgctgcaaatcttattcgccgtgaccgtccgttaacccgtgaagagtatttcgcgtggtgccagcgtatcagtgagatcggacaagatctctctctcgcatggagcagatctgcatggcagaatatgaccgctgtcatcgagccgttttatcccaaggcgggcaatggccgacggccctatccgctggagaccatgctgcgtattcactgcatgcagcattggtacaacctgagcgacggtgccatggaagatgccctgtacgaaatcgcctccatgcgcctgtttgcccgattatccctggatagcgccctgccggatcgcaccaccatcatgaatttccgccacctgctcgagcagcatcaactggcccgtcaattgttcaagaccatcaatcgctggctggccgaagcaggcgtcatgatgacccaaggcactttggtggatgccaccatcattgaggcacccagctctaccaagaacaaagagcagcaacgcgatccggagatgcatcagaccaagaaaggcaatcagtggcactttggcatgaaggcccacattggtgtcgatgccaagagtggcctgacccacagcctggtcaccaccgcggccaacgagcatgacctcaatcagctgggtaatctgcttcatggagagaagcaatttgtctcagccgatgccggctaccaaggagcgccacagcgcgaggagctggccgaggtggatgtggactggctgatcgccgagcgtcccggcaaggtaaaaaccttgaagcagaatccgcgcaagaacaaaacggccatcaacatcgaatacatgaaagccagcatccgtgccagggtggagcacccgtttcgcatcatcaagcggttttcgtgcagcgatgcgacgtccaggggcgtgaaacacagtttaaggcgctgctctatccgttcggcaacatatctctgcacttgccttcctcggcatgattttgctgctgatgtgcacgatggatga

SEQ ID NO: 140116 - DNA, 634 bp, Homo sapiens
accccatcaatggcgaaagcgattggcgaaaccgaacgtcgccgtgagaaacagcagaagtacaacgaggaacacggaattacgccgcaaggcttgaacaagaaagtggtcgatatcctggcgctggggcagaacattgccaaaaccaaagcgaagggcagaggaaaatcgcgcccgattgttgagccggataatgtgccgatggatatgtcgcctaaagcgttgcagcagaaaatccatgagctggaagggttgatgatgcaacacgcgcagaatctggagttcgaagaagcggcgcaaattcgtgaccagttgcatcagctgcgtgagctgtttatcgcggcatcgtaacaggatagcgaagaagactgatgacaaacggaaaacagcctgatgcgctacgcttatcaggcctacattttctccgcaatatattgaatttgcgcggtttgtaggccggataaggcgttcacgccgcatccggcataaacaacgcgcactttgtcttcaataggaagccggaattttccttcggatttccgttaacctaaagcctgtaacgccttttccagcgcgttatgtaacagctggcggtcatgacgatacggaatatcgctggcctccagtacctcct

SEQ ID NO: 140117 - DNA, 537 bp, Homo sapiens
atgaggttttacggacagctggctgaagacccagggcagcaaaaagctggggaaacaacaaggcatactgaagactatatttctcagctgcctttgcagagacaagggatccccgaacttgcccttcagaaagatctttttattaacaagatttatggaaaagagttcaatgtctgcaggtcgactctagaggatccccgagttcatgtcctttgtagggacatggatgaagctggaaaccatcattctcagcaaactattgcggggtcagaaaaccaaacactgcatgttctcactcataggtgggaattgaacaatgagaacccttggacacaggaaggggaacatcacataccagggcctgtcatggcgtgggatattgggggagggatagcgttaggagatacacctaatgtaaatgacgaattaatgggtacagcacaccaacatggcacatgcatgaatatgtaacaaacctgcacattgtgcacatgtaccctagaacttacagtataataataaaaaaaatgtctgacc

SEQ ID NO: 140118 - DNA, 1019 bp, Homo sapiens
tttttctggaatcaaaaagctctttaataacataacactaaatttaagtcagaagtggttaattttacttttgcataatgattgaactcatagacatatctagtagaagtttgaataatttgagtttataacctggaatgagtaaaagttttaaagatcagatcaaaaaaacaaaagtttcaaataaaaagagaaggtttgtgactgcatttttagaagtgtgcattaatagtgatggtttaacatggaatactatgcagccataaaaaaatgatgagttcatgtcctttgtagggacatggatgaagctggaaaccatcattctcagcaaactatcacaaggacaaaaaaccaaacaccacatgttctcactcataggccttgcagtattaaaacatgtgctaacaccacgaataaaggcaactcacgttgcttttgattgcatgaagaattatttagatgcaatttatgatgttacggtggtttatgaagggaaagacgatggagggcagcgaagagagtcaccgaccatgacggttgactggattgttgctgacatcttggccatcaggcagaatgcgctaggacatgtgcgctacgtgctgaaagaagggttaaaatggctgccattgtatgggtgttactttgctcagcatggaggaatctatgtaaagcgcagtgccaaatttaacgagaaagagatgcgaaacaagttgcagagctacgtggacgcaggaactccatgctatagacagcccaggaataagaagctggagcctgcttctaagtccatactcacctctctgaaaggacccgcaaatgcctaccaccaccagccccatcctaatgggtcacctgtcaccatggtgactgctgcctccccaccagactgcgagctccacaggggccctaaaggaaacctggtctggctcaacgaaggcacctcccctgacctggcacaaaagctgggcaactcaccaaggcgcctgaaaattcctaaactttgcttggtcgcctga

SEQ ID NO: 140119 - DNA, 2255 bp, Homo sapiens
atggccctgcgcagtggggcgggctgcttcggccgggtctggcgcagggtgtcggggttcccggacgcctggccccggcgctcgagcagcctcctgtgcctgtccgccttctcggctgagcccgggcccgcgccgcccctgccccgccagccgcctcgcggtggcggtggctgtggcggccccagcggagggggccccccccagcctccccgccccccgcctccccgctgctgctgctgctgctgccgccgccgcttacaacttggaggcggcggcggcggcggcggaggaggaggcggcggcggccgccgggcgctgcagtgggacgcgcgcggctgtgagcctgcgggacatgccccccgcgccggctccttgctggcggccatgaagaggcagaacgtgcggactctgtccctcatcgtctgcaccttcacctacctgctggtgggcgccgccgtgttcgacgccctcgagtcggaccacgagatgcgcgaggaggagaaactcaaagccgaggagatccggatcaaggggaagtacaacatcagcagcgaggactaccggcagctggagctggtgatcctgcagtcggaaccgcaccgcgccggcgtccagtggaaattcgccggctccttctactttgcgatcacggtcatcaccaccataggatcattaaaaaagaagaaaccatcagatcttagaaatcagatctcatctgcagagtgtagaggacaatttgaaatcgggcttaggaagcactgcctctttgtagatgtcatggacacagccaagaaatggggcagaagtggggtttcttctgattctggggtacatcaaagagacacctcggaatgcggagacacccagcatggtgctctgaggaggggtgggaatcaggccagctgctggcgccaggcctctgtgagtctgcagggcatctggcaggaagagatgcctacttgtgaaatggactttggctgtcactggccctgtcagacatgtgaggtgcagcccactcaggaagggacatggatgaagatggaaaccatcattctcagcaaactatcacaaggacagaaaaccaaacatcgcatgttctcactcataggtgggaattgaacaatgagaacacttggacacaggaaggggaacatcacacactggggcctgtcattggggggacaaagaagcaaggagaagaggaacatgctgtcctcctggggggtggggggcacaaagaagcctggagaagtggaacagttttcggcagcaagagtgacagctggggaatatttatccaggagcaaatgtgggtcttatgtgaatgcaggaggtgtggagggataggcgtgggcgggaaccgggactgcctgtggctatggcaggccagtgccagttccaggtggacgcgggctccacaagccctgcactcggagcggcccgctggccccgggcaccacctccccgtggggcagggctcgggacctgcagccagccatgcccaagcccccccaccgcggtgggctgccaccaagtctcccggacgggtgccgcccccttgtccaggggccagtcccatcgaccgcccaagggctgaggagtgcacgcccgtggtgtgggactggcaggcagctccgcccttggccctggtgcgggatccactacaggaagccagctgggctcctgagtcaggagggacttggagaacttttgtgtccagagggaggattgtatatgcaccaatcagcactgtgtctagcttggggttggtggatgcaccaatcagcactctgtatctagctaatctgcccagtcaagaagacaaactaacgataaccatttggtgtggtaaacagtgtgatcaaggacaaggagctgtgggaacaccgaagagggatacctacctcaatacgattattggaaaagggtcaggcaagtctctggaaatggtagcagttgaaccaagtagaagtgtaggccatatgttgcttctggctgaacacacgactggggagcgtggaagggaaatgtgtggttggagtccccacgcagtccttactggggcactgcctactggagctatgagaagacggccacagtcctccagactccagaacggtagatccactgacagcttataccatgtgcctggaaaattctcagacactcaacaccagcccgtgaaaacagccacgaggggtgctataccctgcaaagccacagggacacagctgaccaagactatgggaacctag

SEQ ID NO: 140120 - DNA, 2221 bp, Homo sapiens
atggcagccataaaaaaggacgagttcatgtcctttgtagggacatggatgaagctggaaaccatcattctgagcaactatcacaagtacagaaaaccaacactccatgttctcactcatagtttttataccagcctgatgccaattctgctgctgaaggaaatcgcccaggcattacgccgcacgccagcgccgatggtttatatcggcaatctggggcgtgagttgagtttacctgcggctaatttgaagctggaaagcaagctggcaattatggagcagtatgttggtaaaaaggtcattgatgcggtcatcgtcgggccaaaagtggatgtctcggcggtgaaagagcggattgtgatccaggaggtactggaggccagcgatattccgtatcgtcatgaccgccagttgttacataacgcgctggaaaaggcgttacaggctttagtcttcttcgctatcctgttacgatgccgcgataaacagctcacgcagctgatgcaactggtcacgaatttgcgccgcttcttcgaactccagattctgcgcgtgttgcatcatcaacccttccagctcatggattttctgctgcaacgctttaggcgacatatccatcggcacattatccggatcacaatcggggcgaatttctttggccctcgcttggtttgggcaaggaattggacactttttggtcaagcctgcgggtattcgggtcccctgtctctgctgtttcacgggagttggttcgcaagttttccctgggggggactgtcgactctacaggatctctgcctgtttgcggagatatatcaccggtcagcgatgtggcggctgtacacgtgagccactgcgctttcgcctgcaagtcggcgaccgctatataacgctgatggatctgcccggcgtgggcgaaagtggcgctcgcgataccgagtatgctgcgctgtaccgcgaacagcttcctcgcctcgacctggtactgtggctgattaaggccgatgaccgggcgctgacggtggatgaacatttttatcatcaggtgattggagaggtataccggcataaggtgctgtttgttatcagccagtcggataaggccgaacctaccagcggtgggggacagttgtccacggcgcagaagcagaatatcagccgcaaaatctgcctgctgcatgagctgttccagcccgtccatccggtgtgtgctgtgtcggtccgtctacaatgggggcttaaggtgatggccgagcggatgattaagtgcctgccacgtgaggccaccagcccggtggtgtcgcaactccatccttcctttcgcacgacggtagtccgggaacaggctcgtagcgattttggtgaaaccgtcggggccgtactcgatagcatcagtgcctttcccctgatacccgccccggtgcgggccgtcattcaggccgtgcgcaccacggtggtatcttttgccgccagcgtcacgctgttattgttgccattaagatctaccccggtcgagaaatcgccaacctgcatactgcctgccagcgaaaccttcccactgttggttgtgatgctgaaccctgtcgcttcattgctaacgttaacatcacccgtattggatactagttgccccactcactcgttgagtgcagcacagccgaatctgatccagctatcaggaaacaacaatatctcctttgttgttaaccgtgccgttgtcaccaatgttctcaacaccatgcgcaccgcctgtaacagtcaggctaccatccagatttacaatgccgatattgcccgcgattttggtacccgtggaatcttttccatcaacagtggtttttccactgtctattcgcggagaattggacaccagtcccccgaagttactggggaggccatggcacttacgctgtcctctcagccttcgtgtattgacgatggcctggtcgccgtcaatctggataccgatggactccggatcggtgacgctcgtcaaaaagccatcaccgccggttacccggtggttgatactgatgacaaatgccggataaggcgtttacgccgcatccggcatgaacaatgcgcagatgaaaactcttatcaggcctacaactattgccgacctgtaggccggataaggcacttgtgccgcatccggcaatcaatgcctgatgcgacgctgtcgcgtcttatcaggcctacaactgttgccgacccgtag

SEQ ID NO: 140121 - DNA, 895 bp, Homo sapiens
ttttagggacatattattaatcattcgactttaagttctagaatacatgtgcagaacgcgcaggtttgttacataggaatacatgtgccatggtcctttgctgcacctatcaacctgtcaacccatcatctaggttttaagccctgcatgcattaggtatttggcctgatgctctcccttcccttgccccccaccccccacccctcaacaggccccagtgtgtgattgtgtgatgttccccaccctgtgtccaagtgttctcattgttccagttcccacctatgagtgagaacatgcggtgtttggtttttctgtccttgcgatagtttgctgacgatagtttgctgagaatgatggtttccagcttcatccatgtcccctacaaaggacatgaactcatcctttttttatggctgcatagtattccatggtgtatatgtgccaacatttttcttaatccagtctatccattggatgggacatttggggttggttcccagtttttgcttttgtgaatagtgctgcagtaaacataagggtgacagagtgagactccgtctcaaaaaaaaaaaaaaaaaaaaaaaagtggggggaaggattccacagcaagaaaacgctctaaaataaacaaaagtgcccgagggagtgagaaggtgctggctaccctgtggaaaccagaggatgacaggggtgacatttggcctgagacttcatcggaacatgctggttcacccctgtaatcccagcactttgggaagccgaggcggcgagaagatcgcttgagtgaggccaggaattcgaggctgcagtgagctatgatagcatcattgcactccagcctgagtgacagagcaagactcttgtctctgaaaaaataaaataaataaaatgaaat

SEQ ID NO: 140122 - DNA, 373 bp, Homo sapiens
aagtctataccgggctgaaaccccgcactatcgacgctcagtacaccccgatcaacgtcgtctgaagttcctttctctgacgcaccacgcctattccccgcttctggtggtgatcaacaaagcgaagtttgatggcttaagtccggagttccagcaggcgctagtttcatctgcacaagaagcgggtaactatcagcgcaaactggttgctgaagatcagcaaaaaatcatcgacggcatgaaagaagcgggcgtggaagtcatcaccgatctcgaccgcaaagcctttagcgacgcactggggaatcaggttcgcgacatgtttgttaaagatgtgccgcagggagctgatctgctgaaagccgtggatgag

SEQ ID NO: 140123 - DNA, 1218 bp, Homo sapiens
atgggcgcttttacaggtaagacagttctcatcctcggtggcagtcgtggtatcggtgccgctatcgtacgtcgtttcgtcaccgatggggccaatgtacgattcacctatgcggggtcgaaagatgccgctaaacgcctggcacaagagactggagcgacagcagtattcacagatagtgctgacagagacgctgtcattgatgtcgttcgtaagagcggcgcattggatatcctggtggtaaatgcaggtattggcgtctttggcgaggccctggaattaaatgccgacgatattgatcgccttttcaaaatcaatattcatgctccttatcatgcctctgttgaagccgcccggcagatgcccgaaggcgggcgcatcttaatcatcggctccgtgaatggcgatcgtatgcctgttgcaggcatggctgcttatgccgccagcaaatctgccctgcaaggcatggcgcgcgggctggcccgtgattttggaccgcgtgggatcaccattaacgtcgtccagccagggccaattgataccgacgctaatcccgccaacgggccaatgcgcgatatgttgcatagtttgatggctatcaaaagacatgggcaaccggaagagtcgctgctctatcatgcgggaattttgccacgtcagaaggcgattattctcggtagctttagcggcagcacgcccaatgattatgacgcaggttacaacctggagtcagtgtacgcgtttttgcgttcccgcctgtcgattccactcattaccggcctcgattttggtcatgaacaacgcacggttacgctgccaacgaacttatcggctttacgaaataacgcttccaagggccagacagacataaagggactgtctgacagcaccttcgtcacgccgaaggtagatattgataccagcgataagctgtacgccgacgcatggcttggctttaaaggtacggactggaaaaacgaaattaatgtccgcgattttattcaacataactatacaccgtatgaaggcgatgaatctttcctcgccgaagcgacgcctgccaccacggaattgtgggaaaaagtaatggaaggcatccgtatcgaaaatgcgacccacgcgccggttgatttcgataccaatattggcaccaaaatcgctgagtccgagcggtctggtctggaaaccaagaatagtccttacgcattgttggcctga

SEQ ID NO: 140124 - DNA, 354 bp, Homo sapiens
atggcaaatttctctgcgctaagtgaagtgcgttatgactacatcaaaatcgcgcgagaactgtttgtgatgctgcgtcagtcgccgtggctggcgtcgtcgccttcccagatgatggcgcaaccgggcatcagtcgaggaagccggaacgagccgcccagatacggcaaacccgccatctcccccgacgccgttggccggagttcattcaatcgccagactggccacgaccaggttttccccgacctggataagccgggcacgatgagacgcaagcgcagacttaatcgtgagtttagcctcacgtcattacggcacccccaggcctttacacctttatgcgttgccggactc

SEQ ID NO: 140125 - DNA, 5289 bp, Homo sapiens
  misc_feature (1)...(5289): n = a,t,c or g
tcagttatcttcaattctgagaaggcttaagctctcgtagcagtccagacagacgaccgcgtattctccgttttccagcagcaggccgtcatcgctcttctggtgctttacaaagggaaactcgttgacgggtaacgcccgaactcttttccgataagtcgtaatgccgcacaggtgacagttgtaatcgtgccaattgtatttacgatccgctgggttgacgctgggactttgggcctcatactttcgccactgattcaacatggaatggtaacaaaaggtgcaaactaacggctgaattgttcttaactgctctgcattgcgaagtgaattgtgtttgagcaacagtgggaaataaggacgcgaaccctctttactggcatagagcactctggctaacgttaggtccgagtgcaggccgcaaagatagcagtagattgatgtgctggcaggcgtcgaggacgatatggatggtgtggagggcggagtgttgatactcatggcgccgtggcgagatccgtttggtgaactggaggtcagcatgggcgagggaatgttgtatcttctgtgctctaggggaactcgttctgcatccatggtctcccactggctggccaagtaatccttgcagtccttgcaggccagcacgcgattgctgttaagttcgttgttgttgttattattgttgttattggtattattgttattattgttgttgttggttacagcgttggccttgagacagggaaagtgcatggcgtgggagttcatatgctcggcactggtggacagccaatccattttgtttgaggggcacagcactttgcaaatggagcaagatgacgatgttggttgcttgtccgtcgtttgttggccacacaacaccacactttgccagccaatgccaatgccaataccaataccaattgcaattccccaatgccccaaaggcaagttgcattcgctgtcgccgatgaaatgaaatttgcaaacctgagagaccgggcatcctgcttttgctttctggattatgccgtcaaaggtagaggcatcaatacccggcaccgcaacttcactcttcagtgcgattttcgtaatcgcaaaaccggcatccactttatccagcgacacatcggcggtggtatcaatcgatgttggcgtgaatcccgcttcccccagcattaatgaaagcgccattgagaaacatgcggcatgcgctgcgccaatcagttcttcagggttggttcctttttcgccttcaaaacgcgtgttaaatccatacggctgttggttcagcacgccactctcggtggatactgttcccttcccgcgtttgatatcgccttcccagtgtgcctgacctttcttatggattgtcattgttgctctcctgtgggcncagttcggcgcatcgtacggcttacgcggtagcagcggtttcacttcattcactaccacgctttcaccacggaacagaatgttaccctgagcgatacctttcgctgcctgcaacaggtctttgtcgtcacgaccaaacaccaccagcagtttgacgtaaggattctgcggatggttaatcatctcaatcaccggggcttttaccgccggatgatcgcgcaggaagtccggccgtttgtcgttggttgcaaagacaatggcattgcgatccggcagttggttatagagtaccgggaagttctgcccacgccagccagaacgcgaaccaaaccacgaggcgacaatggcagaggcttgttgcagcccaacatccggcgcacccgcaaagaccatcggcaaggtgttggtgcggttatcgctcgggtcaaagaatggcaccgggaagtgtgacaggtcattcttcacattcagggtctgataggtcagatccagtccactgtccgcccaacatccagccaaagcgtggtgctggccggtttttcgcacacgtccggcgtggtcagcgtgccggtaacggcagctggggttagtcacgcatagtgatttcccgatcgttcggaacgactttcgcccacggattgtgcgcagccagcagttcttccacggtcggaatagacacatcggaattacggaagatgtgttgaggatcttgttggtttccgcctgccctttccactcttcgcggctctgaccgttatcgagctgtttgtcgatccacggaatcaggctacccgccagcggcacgccaaagttatccaccggcagctcaccgctacgggttaaggttgtgactttgcgttcgatatcgagaatagcagaggacggggtcgcgagttcatctgccacatggccatacagatggcccatctgggttaataactcacgcatatgtcgcgcaccaccgccggaagcggcggtacagttaccgccaacaaaagtcctgatgccattatttaatccgtcggtaatgacgtcctgattgacggggtcaagaatgatgatggcgtcatctttcatgcgcaaagacgatgctgcgtcaatccagtaaccttgccatccgctttcacgaagctttggatagatttcgttggtataatcgccgccctgacaggtcacaatgatatcgagggcctttagcgcctccagatcaaaggcatcctgaagtgtgccagtggttccgccaaaagacggcgcagcctggccaagctgagaagtagaaaagaagacagggcgaatggcgtcgaagtcgcgctcggttgccggatcggtaatatcggccagcgccttaccgttgctctccatcgccacttcttctgaagatggctcatgcggaatggcgtagttccatgtcatgttcagcacctggtccgggttcgcgccaccctgttcggcatacatctttccagtgccactgtaaccagcgacctgagttaacgatagaaccgttctcttccgcgaagcaggtcgatggcagacggaacacttcggtctggatcttcgacgagtcaattcgttcagctcaccgtggttctgccagaagttagaggtctcagtgctcagtgggtcgatggtgacgaggaacttcagtttcgacagacaaccgatcactttgttcttgttcgggaatgaggcaacagggttaaagccctggcagatatagccattgaccttgccctctttcatcatctcgaagtattgcaggacgtcgtagcctttatcccacttcggcaacgcagtcaaagcccccagttgttctctttctgcgcggcatcgctcatagaaagatttcatcaggctaacgaagaacttcggatagttgctccagtagtcaccttgatcagccagcgtcgctttcggcgtgttcgcttccagatacgactgcaaatcaacctgtttttctgacggcagcgtcagataacctggcaggctggtagagagcaggcctaagtcagtcaagccctgaatgttggagtgaccacgcaatgcgttcacgccgccaccggccatacccatgttaccgagcagcaactggatcatcgccatagtacggatgttctgcgcacccacagtgtgctgcgtccagcccagcgcgtacaggaaggtggttgtgcgatccggtgcgctggtggaggccagcacttcacacactttcaggaagtcggcttttggacagcgcggatgagtcagtgtttcatcgcgtttcgcatagccgttttcatcgagctgatagttccaggacgatttttcgtattgacgtttttcagcgtcgtagccgctgaacagaccgtcttcgaaagcaaaatcattgatgaacttttgtaaggagcttatgaaggaaacaagcccgtgccgcagatattcccgtggcgagcgataacccagcgcactatgcggatgccattcgttataatgctcgaacgcctctgcaaggttctttgctgccgttaacccgtctggtttgggcatgatactgatgtagtcacgctttatcgttttcacgaagctctctgctattccgttactctccggactccgcaccgccgtgttcttcggttcaagtcccaacatccgggcgaactggcgtgtttcattagcccggtagcatgaaccattatccgtcagccactccactggagacgacggaagatcgttgccgaagcggcgttccaccgctcccagcatgacgtcctgtactgtttcactgttgaagccgccggtagtgaccgcccagtgcagtgcctcacgatcacagcagtccagcgcgaacgtgacacgcagtctctctccgttatcacagcagaactcgaacccgtcagagcaccatcgctgattgctttctttcacggccactctgcctgtatgtgcccgtttcgatggcggtacagcaggttttcgctcaagcaacagcgcattctggcgcatgatccggtaaacacgtttggcattgatcgcaggcatacccatcaagttctgcctgtctgcgaagcaacgcccatacccgacgataaccatacgttggcagctttccgataaacatggggtatacggagaaggcacatccggaatcaatagtggggacgaactggcggggggccatatcattccaagttcatcgggttcgtgttgggaaaagtgaccgtggccaaatgttttgccatcgccaggacgttccggcagcatatcaacgccgatgatccgttttgcaccgcgacctttcgccagcatcatcgccatcatgccgactgcgcccagaccgaccaccagcacgttatcactgccggaaacttcgccgcgcaaaattccttcatacgctgtaccaacgccgcaactgataaacgcaccatcttcgtagctcagcgcatccggcaggaggatcagatctttgtcttccgccagcaagtattcggcatgaccgccgtcacgctgccagccgtaagccgcttttccttcgccagtacaagaaataggaaaaccgcgacggcagttcgggcaaaaaccacagccagaaatgtgatacaccagcacgcggtcgccctctttaaaatggcggcagccttgccccatcgccacaatctgcccgcacggttcatgaccgttgataaagccctggtataacggtttatcgggtgccgccgctgtggcacggtgttgatgatagatatagtggacatcgcttccgcaaatcccggaggatttcattttgatcagtacctggttaatccccggcgtcggcaccgcaacttcccgcagatcgacggtcgaatttcctggtaaataagctgccagcatcgttttcataaatccctcattaacaatacgattaattttcat

SEQ ID NO: 140126 - DNA, 1617 bp, Homo sapiens
atggcccgggaacgggacaaggctgtagctggtaatgccctgtttttcgagacgctgttcgccgccgagatcgaacaggttgataatgaacgcagcgtcagccacttcaccacccagacgacggatcagtttaacggtcgcttcgatagtgccgccggttgccagcaggtcgtccaccaccagaactttgtcgcccggtttgatggcatcaacgtggatctccagctgatcggtgccgtattccaggtcgtaagtttcactgatggtttcacgcggcagtttgcccggtttacggaccggtacaaagccaacgcccagacccagagctaccggagcgccaaacaagaagccacgcgcttcggtgccgacaactttggtaatgcccgcatttttgtaacgctcaaccagcaagtcgatgctgagagcgtaagctttcgggtcttccagtggggacggatcaactgggttgatcgtcatgcaaagaaagagattattctcaaaaaagaacccgccaccagtttctggaagcgggttatggtcagactggcgtcgatattgcccgtggaatggttatgccatctggtaaaccggtcagcacgccagatttacggcagcgcagcatatccggccaacaattttttccagcggctggttaatatatcccgcatcatgagcggtaattgtggtggcaatattggtatcgaaatcaaccggcgcgtgggttgcattttcgatacggatgccttccattactttttcccacaattccgtggtggcaggcgtcgcttcggcgaggaaagattcatcgccttcatacggggatcctctagagtctgcgataccaaagttgaacgtaaagagatcccgcagtggtttatcaaaatcactgcttacgctgacgagctgctcaacgatctggataaactggatcactggccagacaccgttaaaaccatgcagcgtaactggatcggtcgttccgaaggcgtggagatcaccttcaacgttaacgactatgacaacacgctgaccgtttacactacccgcccggacacctttatatcacgtccagctggctgtacatacgcgaatgagtgccacgcacctgagtctgccactatccgcaacgatgttgctgccagaccttgcaattgtgcgcaatgtgctgcgctagattgcgtgtcagttttcgtcactatacggcactcgtgtagcagtgtatattcagcacctggcatactggttgcagctctacaggcgggccacaagccggttgcgctggtaggcggcgcgacgggtctgattggcgacccgagcttcaaagctgccgagcgtaagctgaacaccgaagaaactgttcaggagtgggtggacaaaatccgtaagcaggttgccccattaccggatcgcaaaaatatttcgcctgcggattcgcggctttcacctgacggacgataccgaggatatgttcaccctgctccgccgatcccagatagccacttaatacggcatcacaggtgtgtaatttatcaatggcggcaatgccttgcacaatttcggttaaatggctgggcggcatcacgcagccagtccatttgccgtattgggtgtgattag

SEQ ID NO: 140127 - DNA, 3603 bp, Homo sapiens
atgagttcatcgtgtatagaagaagtcagtgtaccggatgacaactggtaccgtatcgccaacgaattacttagccgtgccggtatagccattaacggttctgccccggcggatattcgtgtgaaaaaccccgatttttttaaacgcgttctgcaagaaggctctttggggttaggcgaaagttatatggatggctggtgggaatgtgaccgactggatatgttttttagcaaagtcttacgcgcaggtctcgagaaccaactcccccatcatttcaaagacacgctgcgtattgccggcgctcgtctcttcaatctgcagagtaaaaaacgtgcctggatagtcggcaaagagcattacgatttgggtaatgacttgttcagccgcatgcttgatcccttcatgcaatattcctgcgcttactggaaagatgccgataatctggaatctgcccagcaggcgaagctcaaaatgatttgtgaaaaattgcagttaaaaccagggatgcgcgtactggatattggctgcggctggggcggactggcacactacatggcatctaattatgacgtaagcgtggtgggcgtcaccatttctgccgaacagcaaaaaatggctcaggaacgctgtgaaggcctggatgtcaccattttgctgcaagattatcgtgacctgaacgaccagtttgatcgtattgtttctgtggggatgttcgagcacgtcggaccgaaaaattacgatacctattttgcggtggtggatcgtaatttgaaaccggaaggcatattcctgctccatactatcggttcgaaaaaaaccgatctgaatgttgatcctggattaataaatatatttttccgaacggtgcctgccgtctgtacgccagatgctcattaccgcgagccggtccaggctcgggggggggacttgtttgtaccagaaaaatgccagcgcatagtcttttgcgactccgttgccatttctgtacatccacccaagattattttgcgcataagacattccgctctccgcggctatctgataccagacaaccgcttctttataattgggggcttctccacgatccagtgtccagccaagggcgttggaagcgaaaaagatgtcgataaactttatgtccgcagcgccaacggcgaaatggtgccattctcggcctttaccacttcacattgggtgtatggctctccgcgactggaacgctacaacggtctgccgtcaatggagattcagggggaagccgcgccaggaaccagttccggcgatgccatggcgttgatggaaaaccttgcgtcaaaattacctgcgggcattggttatgactggacgggtatgtcgtatcaggaacgcttatcgggaaaccaggctcccgctctggtagcaatttcctttgtggttgttttcctgtgccttgctgcactctatgaaagctggtcaattcctgtctcggttatgttggtagtgccgttagggattgtcggcgtgctgctggcggcgacactctttaatcaaaaaaatgacgtctactttatggtgggcttgctaacgacaattggcttgtcggccaaaaacgctattttgatcgttgagttcgctaaagatctcatggagaaagagggtaaaggtgttgttgaagcgacactgatggcagtacgtatgcgtctgcgtcctatcctgatgacctctctcgcctttattctcggcgtattaccgctagctatcagtaacggtgccggcagtggcgcgcagaacgctgtgggtatcggggtaatgggaggtagctcggtaccgacgctgaatatctgcccgcccctgcatcggctttttatcgccttccagatgaatattcgccgcaatgctgccgcccgccatgccaaatttcagcggttgcaggcgcaggtcagcatttttgaggatgatatgagtagaaagatcgctaatcggcaggctactgccatgctcaatgcgccgccctttgaagcgaacatcggcatccataacgtcccatttatcggtttcgaagcggtcataaggcagcactttgcccgcaggctgaacgcttttttcgcccttcttctgttcagaccgtttcgacttttctgcccctttcccggaatcaacgccaatcaacggtcccaggtccgccagccgcaattgccgcgactcgacatcaccttccagttttggtcgtggctttccggtggtgtagaccagagaaccgtggatatcgctatcaccaattcgcccattaaaaccgcgataatcaaagaccgacgatttttcagtgtcgattttcgctaccagccgaccatccgtttcaaacggcggggtatcgggcagcagaacgcccgtcagttcatagagatcacccaagcggaaatcagcctgtaccggaaacggcgtcccttcgccacgcagcgccagcataccgcctattttcccgtaaccgcccaaaggtattcgccccctttcttatccgtttcccttcgatccgtaataagcaaccctgaagcaagcatcgagagcttgcaggaacggcgtttttggttgcagtgtgagcgtgcttacacctggcagccgatctatcaaacatgcgggcggttaatggccgtggagctattaacggtggtcacgcatcccttgaacccttcgcaacgcctgccgccggatcgctattttactgaaatcaccgtcagccatcggatggaggttgtgaaagagcagattgatttgctggcgcaaaaagccgacttctttatagagcacggcctgctggcatcggtcaatattgatggccctacgctcatcgccctgcgtcagcaaccaaaaatcctgcgccagattgagcgtcttccctggctgcgtttcgaactggtggagcatatccgtctgccgaaagattcaacctttgcctcgatgtgtgaatttggcccgctgtggctggatgattttggtaccgggatggcaaatttctctgcgctaagtgaagtgcgttatgactacatcaaaatcgcgcgagaactgtttgtgatgctgcgtcagtcgccggaaggacgcacactcttttctcagcttttacatctaatgaatcgctattgtcgcggggtgattgtcgagggcgtagaaacgccggaagagtggcgtgatgttcagaactcgcccgcattcgccgcacaaggctggtttctttcacgcccggggccgttagaggacgaatgcatgatcagcagagtgacagaagctctaagcaaagttaaaggatcgatgggaagccacgagcgccatgcattgcctggtgttatcggtgacgatcttttgcgatttgggaagctgccactctgcctgttcatttgcattattttgacggcggtgactgtggtaaccacggcgcaccatacccgtttactgaccgctcagcgcgaacaactggtgctggagcgagatgctttagacattgaatggcgcaacctgatccttgaagagaatgcgctcggcgaccatagccgggtggaaaggatcgccacggaaaagctgcaaatgcagcatgttgatccgtcacaagaaaatatcgtagtgcaaaaataa

SEQ ID NO: 140128 - DNA, 1102 bp, Homo sapiens
gttattagtagattgcttaataaagtggttttctaaaaacgacatattgttaatgcaaaggaattaatatcgccaatacagtttttaccgtggattaatagagaaaagatataaatccatcgatatcgaatcgctattgaatgcgtgagaaaagtgtattggtaagagccgggacaacctcgctataaaaaggcgttagattccaccctacagaaaaaggatatgtatgtctcaggttcaattttctcataacccgctgttttgcatagatattatcaagacttataaacctgatttcacgccacgagtggcctttattttaggttccgggctcggcgcgctggccgatcagattgagaacgctgtcgcaatttcctacgaaaagctgccgggcttcccggtaagtacggtacatggtcatgcgggggagttagtgctgggccatctccagggcgtaccggtggtatgtatgaaaggtcgcggacatttctacgaaggtcgtggaatgaccattatgactgacgcaattcgtacctttaagctgctgggctgcgagctactgttctgcaccaatgcggcaggctcgctgcgtccggaagtgggggcaggcagcctggtcgcattgaaagatcatatcaacaccatgcccggtacgccgatggtgggtcttaacgatgatcgttttggagagcgcttcttctcactggcaaatgcctacgatgcggaataccgcgcactgttacaaaaagtggcgaaagaagagggtttccctctgacggagggcgtgttcgtctcgtatccggggccgaatttcgagactgcggcggaaattcgcatgatgcaaattattggtggggatgttgttggtatgtctgtggtgcctgaggttatttcagctcgccattgcgaccttaaagtcgttgcggtctctgcgattaccaatatggcggaaggtttaagcgatgtgaaattgtcacatgcgcaaacgctggcggctgcggagctctctaagcagaacttcatcaaccttatttgtggctttctgcagcaaaattgcctgagaaaaacaataagaaacggcctcgcgggtgaggccaaatga

SEQ ID NO: 140129 - DNA, 2064 bp, Homo sapiens
atggacttcgctgaaacggagctcgagttcatcaaattctggggagatatcatcaccaacaagctgaacgaggcgctcgcagcacaaggcgataatgtggtgattaatctggcgtcagatgagtattttaaatcggtgaagccgaagaaattgaatgccgagattatcaagccggtgttcctcgatgagaagaacggcaaatttaagatcatcagcttctacgctaagaaagcacgcggtctgatgagtcgtttcattattgaaaatcggctgaccaaaccagagcaactgactggttttaatagcgaaggttacttctttgatgaagattcctccagcaatggcgaactggtgtttaaacgctacgagcagcgcgctgaatgccggattgttacccggcatttgtcatttagcggtgatgtttgcctggaccatgaccgccgtgatgatcatgaggagctttcttatggtggcgcggcggtggcggcggtccttgttatcgaaccgaacaaactggcctttgacggcagcggttatctggcctgggaaggtctgatctgcatgcaggaaatcggcaaatgcaccgaagaacatcaggcgattgtgcgtaagtggctggaagagcgcaaactggatgagtttccggttgggccctttcccggggaaaaaaccaaccgggggttggttgcgaagcaggcgcccgtcgacacgcccgagaagcgcgcatcggtgatgagcgacaccgtcttgccccacgagatatgctttagcgcggagcgcgacaaaacggtgcgcctgacctttgccgacagtgcgccaggtgtcagtgacgatcagctacaaaaattgtttgaacgtttttatcgcaccgaaggttcccgcaaccgtgccagcggcggttccgggctggggctggcgatttgcctgaacattgttgaagcacataatggtcgcattattgctgcccattcgccttttggcgggcgtggtgataagccccagcacatcgtgaccgtccaccgggccgatgtagttaaagcccagctcttcaaacaacgtgccaggcactaccatgcctttaatatgttcttcggcataccagccgccatattttttatcacgcagtgcgccgttcatggctttgataccgtgatcaaccaacgagtaagcgccaggtcgacccatcgccgcagcaacggaataaaccggcgtttagccatcatttcgtcgacgatatcgccaagttgttgtaatttcggtgcgcaaacgtcacgcagcatcagctcgttgtctggtaaaccgacgaccgatgcccagactgcacggcctgccaggaatcccgatgcgcccgccgtcattgccacgcgtacggcacgcgggaacagtttttcgtcgacaccggaagagaggatcacccatggcatattgatatggtcattcagaccttgtgaagcacagagaagctctttgttgcggacctttgccataaaacggcatttcaacttttgtgaggcgctagtttcatctgcacaagaagcgggtaactatcagcgcaaactggttgctgaagatcagcaaaaaatcatcgacggcatgaaagaagcgggcgtggaagtcatcaccgatctcgaccgcaaagcctttagcgacgcactggggaatcaggttcgcgacatgtttgttaaagatgtgccgcagggagctgatctgctgaaagccgtggatgagccaggctgggcagagcgcgatatggcagaactgtggcaatgctgcatggctgtcattcgcgccctgcttactcattctggtgttagcggggaacaaaattgtcggtatcggcatcttcgcacaaggaaaggggcttggtttttgttggataaaaacgacaaaccgctcgggaatgctattttgtcctcggaccgccgggcgatggaaatcgttcgtcgctggcaggaagatggcatcccggaaaaactctacccgctgaccccgacaaaccttgtgggacccgggcatccgggggttgctgttacacctggcctgaaaagaggcacgaacccataa

SEQ ID NO: 140130 - DNA, 3297 bp, Homo sapiens
atgaagaaagtcttcaaaaatgcaccatatcgattttgtccagtgtacgtttgcccgtgcggatacatgggcgtctggcaggacagctaccggaaggataagccgctgaaaggtctgctggatattctgaagctcggcttccgtggctaccgccatctggcggagtttgcgccttcttcggtgaagggcatattccgtgtgctgacttctctggcgacgccagcaacgcaaccactgatcaatgctgagccagctgtagccgcccagacggaacaaaatccgcaggtggggcaagtgatgccgggcgtgcagggcgctgatgcgccagtcgtggcgcagaacggtccttcgcgtgatgtgaagctgacctttgcgcaaattgcaccgccgccgggcagcatggtgctacgtggcattaacccgaacggcagcattgagtttggtatgcgcagcgatgaagtggtgacgaaggcgatgctcaacctcgaatacaccccatcgccatcgttactgcctgtccagtcgcagttaaaggtttatctcaatgatgaactgatgggcgtgctgccagtgaccaaagaacagttggcgacttcaaccgtgtacggctggagtttgtcggcccattatcaggacgtgtgcgaaaaaccggccagcaccacgcttttgctggatgtttggcggagcagtggactggatctgacctatcagaccttgaatgtgaagaatgacctgtcacacttccggtgcccattctttgacccgagcgataaccgcaccaacaccttgccgatggtctttgcggcctctgccattgtcgcctcgtggtttggttcgcgttctggctggcgtgggcagaacttcccggtactctataaccaactgccggatcgcaatgccattgtctttgcaaccaacgacaaacggccggacttcctgcgcgatcatccggcggtaaaagccccggtgattgagatgattaaccatccgcagaatccttacgtcaaactgctggtggtgtttggtcgtgacgacaaagacctgttgcaggcagcgaaaggtatcgctcagggtaacattctgttccgtggtgaaagcgtggtagtgaatgaagtgaaaccgctgctaccgcgtaagccgtacgatgcgccgaactggggcatccatttattactcaaccgtaaccgatttgccagggttacgcggctgcaggcatgcaagctttggggccgcactgacaatgtgttgctggaaaacggtggtcatttagacataaacgcatatggttcggcaaacaagacgattattaaagataaaggaacaatgtcagttttaaccaatgctaaagctgatgcgacccgaatagataatggcggggttatggatgttgcaggaaacgcgacaaataccataattaatggtggcacacagaatattaataattatggcatagccacaggcaccaatatcaacagcggaacgcaaaatatcaaaagcggcgggaaagctgacacaacaattatatcctccgggagccggcaggttgttgagaaagatggtacggcaattggcagcaatattagcgccggaggctcgctgattgtctataccggcggtattgcacatggggttaaccaggagacgggcagtgctttagttgccaacacgggtgcagggactgatatcgaaggatacaacaagctctctcacttcactattaccggaggggaggctaattatgttgtgctggaaaataccggcgaactgacggtagtggctaaaccctcggcgaaaaatactaccattgatactggcggtaagctgattgtccagaaggaggctaaaacagatagcaccagacttaataatggcggcgttctggaggttcaggacggtggtgaggctaagcatgttgagcaacaatccggcggcggcattaattgcttccacgacctccggaacacttatcgaaggaaccaacagttatggaattcagaagctaaaaatgtagtgctggaaaacgctggctcattaacagtcgtcactggttcccgcgcagttgacacgattattaatgccaacggcaaaatccatgacgggcagcctgaatcagaagtaattgctcgcccgccatcgagtgggcggcacagcattaacgaggggcagtgcagtgcctgtcatgcctggaacaccatcaccgaggtgcgtcttgctgcgtcgccaatggtggcgcgtaacgagcgtctcagcggctatgccggtagcgccggggtggcaaaagtccagaaactctccgatatcagccttgaagagctgccgcgtttttccaccggatttaaagagttcgaccgcgtactaggcggcggcgtggtgccaggaagtgccattctgattggcggtaaccctggagctgggtccaggtgctcatcacgtggcattaacccgaacggcagcattgagtttggtatgcgcagcgatgaagtggtgacgaaggcgatgctcaacctcgaatacaccccatcgccatcgttactgcctgtccagtcgcagttaaaggtttatctcaatgatgaactgatgggcgtgctgccagtgaccaaagaacagttggcgacttcaaccgtgtacggctggagtttgtcggcccattatcaggacgtgtgcgaaaaaccggccagcaccacgcttttgctggatgtttggcggagcagtggactggatctgacctatcagaccttgaatgtgaagaatgacctgtcacacttccggtgcccattctttgacccgagcgataaccgcaccaacaccttgccgatggtctttgcggcctctgccattgtcgcctcgtggtttggttcgcgttctggctggcgtgggcagaacttcccggtactctataaccaactgccggatcgcaatgccattgtctttgcaaccaacgacaaacggccggacttcctgcgcgatcatccggcggtaaaagccccggtgattgagatgattaaccatccgcagaatccttacgtcaaactgctggtggtgtttggtcgtgacgacaaagacctgttgcaggcagcgaaaggtatcgctcagggtaacattctgttccgtggtgaaagcgtggtagtgaatgaagtgaaaccgctgctaccgcgtaagccgtacgatgcgccgaactggactaggggtaatggtactttaaatgggttaagtgagttacggcttataaagtgcttggcttgtagtaagagtggtgatgatgaagatgagaaagagaaggaggtcataaagcaatga

SEQ ID NO: 140131 - DNA, 3884 bp, Homo sapiens
atgaattattctttaaaacaattaaaggttttcgtcacagtagcgcaggagaaaagttttagtcgtgcaggagagcgtatcggcctgagccagtcggcagtgagtcacagtgtgaaggaactggaaaatcatactggtgttcgccttctggacagaaccacgcgtgaagtggtgcttacagatgcagggcaacagctggcttttcgtcttgagcgactgctggatgaactgaacaacacgttgcgcgataccgggcggtatggggcaacaactgaacgcagtgcgcggtattccgcatcgctgcctgcccccacttccggacgcagcgagcctgccgcattggtgcagaacagtagctcgcagcccagcagcttaaaggaaaatattatgaaattacgctctgtaacctacgcattattcattgctggcctggctgcattcagcacattttttctggccggcacaatctatacgttgcggttatgaaacatcgcaagccgactcgcaacatagtggggcgaaaaaattcaatgatttactgcaggagagacccaaaggcgagctgaaattaaaactgttcccggacagcactctcggtaacgcgcaggcgatgatcagcggcgtacgtggcggcaccatcgatattggaaatgtccggctcgaattactttgccgggttatcaccagtgatgaacttgcttgatgtccctttcctgttccgcgataccgctcacgcgcataaaacgctcgacggcaaagtcggtgatgatctgaaagcctcacttgaaggtaaaggactgaaagtactggcctactgggaaaacggctggcgcgatgtcaccaactcgcgcgcaccggttaaaacccccgccgacctgaaagggctgaaaatccgcaccaacaatagcccgatgaatatcgccgcattcaaagtctttggcgctaaacccgatcctcgatgccgtttgccgaagtctataccgggctggaaacccgcactatcgacgctcaggaacacccgatcaacgtcgtctggtcagcaaaatttttcgaagtgcagaagttcctttctctgacgcaccacgcctattccccgcttctggtggtgatcaacaaagcgaagtttgatggcttaagtccggagttccagcaggcgctagtttcatctgcacaagaagcgggtaactatcagcgcaaactggttgctgaagatcagcaaaaaatcatcgacggcatgaaagaagcgggcgtggaagtcatcaccgatctcgaccgcaaagcctttagcgacgcactggggaatcaggttcgcgacatgtttgttaaagatgtgccgcagggagctgatctgctgaaagccgtggatgagccaggctgggcagagcgcgatatatgggcatttgcgccagcgtttttttacccactgtttattagcgacttcaaccgtgtacggctggagtttgtcggccattatcaggacgtgtgcgaaaaaccggccagcaccacgctttggctggatgttgggcggagcagtggactggatctgacctatcagaccctgaatgtgaagaatgacctgtcacacttcccggtgccattctttgacccgagcgataaccgcaccaacaccttgccgatggtctttgcgggtgcgccggatgttgggctgcaacaagcctctgccattgtcgcctcgtggtttggttcgcgttctggctggcgtgggcagaacttcccggtactctataaccaactgccggatcgcaatgccattgtctttgcaaccaacgacaaacggccggacttcctgcgcgatcatccggcggtaaaagccccggtgattgagatgattaaccatccgcagaatccttacgtcaaactgctggtggtgtttggtcgtgacgacaaagacctgttgcaggcagcgaaaggtatcgctcagggtaacattctgttccgtggtgaaagcgtggtagtgaatgaagtgaaaccgctgctgccggccggcagccagcccgtttggtccagcagcgcaagcgagagcaggtgttgcttctacgcgtaggaaattgcacatcagtgtttgcggaaatatccggtggattgccaagaatgatgtcttcggcgtgacatggggccacggcacccagctgcgccagccagttcctgtgttggccgtccccacaccacgcccagatcgccacggatagcgaacgaacgattcaacaccaagaaagcccgtgaaatcgcagcggttattttgcttgctttgctcatcgttcgcttcttcatattcttcctgtgccagtcttaaagatagtccagccaggcggaaaatgaggcagcttatagcgccagaaccgccgtattcagcgtttctatcggtgcccgggcgtgaaagaaaccagccttgtgcggcgaatgcgggcgagttctgaacatcacgccactcttccggcgtttctacgccctcgacaatcaccccgcgacatatagcgttttattatatgtaaaagctgagaaaagagtgtgcgttcttccggcgactgacgcagcatcacaaacagttttcgcgcgattttgatgtagtcataacgcacttcacttagcgcagagaaatttgccatcccggtaccaaaatcatccagccacagcgggccaaattcacacatcgaggcaaaggttgaatctttcggcagacggatatgctccaccagttcgaaacgcagccagggaagacgctcaatctggcgcaggatttttggttgctgacgcagggcgatgagcgtagggccatcaatattgaccgatgccagcaggccgtgctctataaagaagtcggctttttgcgccagcaaatcaatctgctctttcacaacctccatccgatggctgacggtgatttcagtaaaatagcgatccggcggcaggcgttggaagggcagatcggtaaacagatattcaaattcactgtccatttctcggccataggcgtggaatgaacttttaatcatattaatgccaccgaacgggtgtagcgcacgtttcaacggcgcatccgttgccaggccaacaattttttccagcggctggttaatatatcccgcatcatgagcggtaattgtggtggcaatattggtatcgaaatcaaccggcgcgtgggttgcattttcgatacggatgccttccattactttttcccacaattccgtggtggcaggcgtcgcttcggcgaggaaagattcatcgccttcatacggtgtatagttatgttgaataaaatcgcggacattaatttcgtttttccagtccgtaccacaggagttagagcgattattcatttctgtatcaatctctaagcctaatacagccaaatgttccatgaccagacgacgaattaagcttgaattctctcctattccgccggtgaatataattccatccaggcgacgtaatgaagctgcgtgtccggcaatatgacgggcaattcggtgaacaaaggttttaattgccagttgcgcgcgttcgtgaccttcatgccaggctttttccagaacacgtaaatccgaagaaagaccggaaatacctaataatcccgactctttattcactacgcgttccaggtcacccaggctctggttggtttggctggcgacccaggacatcgcaccaaagtcgacatcgccactgcgggtacccatcatcaagccttccagcggcgtcattcccattgaggtatcaacactctgaccgttgcgaaccgcgcagattgacgcgccattgccaagatgcgccacaaccaggccggagtcatcttccgtcagattcagcagcgaatgtgcgcgctgggaaacatagcggtgcggacgtgccggggaaaccat

SEQ ID NO: 140132 - DNA, 573 bp, Homo sapiens
ttagggaataccaaaacggtgaaaggctggctggcacagcttcctgctaaatatcaccagcgcgccacctgcatgtttgaccgccacggtctgctggcgctgctggctggacgttttcttgcatttgtccgtacgctgctgccaaccatggcgggaatttccggtctgccaaaccgccgcttccagtttttcaaggctaaattgcgatgcgctttcatagccgacgcgcatcgctgctgcgctggccttcatgccgtcatggatgatcatcatccgcgccttatgcagacggtaattcttcaaatactgcaacggcgaggtactggtgacagacttaaaattatggtggaacgccgatacgctcatgttggcttctgccgccagttgctcgacgctcaggttttcggtgtatttattctcaatccgtttcagcacgcggctaatcagactgaagtgagtctggcgactgaccagcgccagtaacgcgccgccgcaaggtccggtcagcacgtagtacagaatttcgcggatgatctgtttgccgagaatacgcgcatccagtggtcgctccat

SEQ ID NO: 140133 - DNA, 2187 bp, Homo sapiens; identical to SEQ ID NO: 115216

SEQ ID NO: 140134 - DNA, 2790 bp, Homo sapiens
ttatttacggtacaaaatggcttgtgaataccactgtcctgtcacgatggtttcgtccaccatgacgacaacgtaataatcagcttttgcagcgacagctttcgctttgatttctgctaatgcgtcatccggagaaccccgaaccatcgtgcttacgctacctattcgctgtaacccttgcgtctggtcgcggcgaatctcttgcggatggtccgttactggcggtgctggctgtggcgtacctgatttaatcttgaagagttgccggtaaaacactgggccatgtcgatggcgcaaaagcatgtgctggttgtcgaccacagtaaatttggcaaggtgcgtccggcgcgcatgggtgacctgaaacgctttgatattgtggtgagcgattgttgcccggaagatgagtatgtgaagtacgcgcagacgcagcgcattaagttgatgtattaatgacgtataaccggatgacgtttcgcgccatccggttatcagaagattaagagaaccaggtgtcagatactccaccggtacgctccagatgtgtatcagacgcgagaacgggaacagcaggaataacgtcatccccagcaccaggtgcagacggaagataaacgccacaccatcgaggtgttgagaagcgccaccgtggaaggtcaccaccgactgcgcccagccaaccagtttcatcatctcgctaccgtccatatgctgagcggagaacggaatggtcaacaggcccagcgcgcactggataacgagcagcgacaggatcaggatatccgctccggtagtggttgcacgcacgcgtgggctgaacagacgacgtttcagcaacagcacgccgccaatcagacacagcacgccgctggcaccaccagcaaacattgccattttctgtttcacttcaatcggcagccaggcttcatacatccagtgcggcgtcagcataccgaagaagtgaccgacaaaaatccccagaatcccgatatggaacaggttcgacgccaggttcatccggctaaattgcgatgcgctttcatagccgacgcgcatcgctcgtgcgctggccttcatgccgtcatggatgatcatcatccgcgccttatgcagacggtaattcttcaaatactgcaacggcgaggtactggtgacagacttaaaattatggtggaacgccgatacgctcatgttggcttctgccgccagttgctcgacgctcaggttttcggtgtatttattctcaatccgtttcagcacgcggctaatcagactgaagtgagtctggcgactgaccagcgccagtaacgcgccgccgcaaggtccggtcagcacgtagtacagaatttcgcggatgatctgtttgccgagaatacgcgcatccagtggtcgctccatcacgtcgagtaacccgtccgccgcgcataaaatctcttccgtgaggttgtattcccgacgcattgtccggtatgtggttctgacgttgagcgtgtggaaggtgaagcggttgcccgctgtaccggtgccctgatttgcggtgcgcagcgtaaagagtcgctgaaacactttgtttcccgccgtgcgatggatgttgacggaatgggcgacaaaatcatcgatcagctggttgaaaaagaatatgtccatactccggcagatctgttcaaactcaccgcaggcaaactgaccggactggagcgtatggggccaaaatcggcacaaaacgtggttaacgcgctggaaaaagcgaaagaaaccacctttgctcgcttcctctatgcacttggcatccgtgaagtcggcgaggccaccgcagcaggtctggcggcatatttcggcacgctggaagcgctggaagccgcttcgattgaagagctgcaaaaggtgcctgatgttggcattgtcgttgcatcccacgttcacaacttctttgccgaagaaagcaaccgcaatgtcatcagcgagctgttggcggaaggtgttcactggcctgcgccgatcgttatcaacgcggaagagattgacagcccgtttgctggtaaaaccgtggtgcttacgggcagcttcaggcacgccgcttaaacgcgccagtttgctgatgttttccggctgtttcagccacacgtctgggttagcaatgtacggttgctgagcatcgatggcgctcaggatgtttctcggcaaaatcttgcgcaccacccagacgtccagcgttggcgcgccccactgcccgacctgttcagaatcggtcaacaccttgccgtctttttccagggcgttaaccgccggtgcccagacataagcaccatcaatatctccccgctgccaggcagcgataatcgcgggcggctgcaggttcacaatctccacttgcccgggtttaatgccccagtgtttcagtgccgccagcaggctgtagtgggtggtggagataaacggtacggcgatgcgtttgccaatcagatcttccggtttgctgatagttttctttaccaccagcgcttcggagttacccagttttgacgccagcaagaagacttcaatcggcacctgttggctggctgcaaccgctaacgggctggaaccgaggttgccgatttgcacgtcgcctgaagccagcgcccgcacgatgctggtccggccagtccacggttgtccgctttctttagcaaaggtgttgtcggcctgagccactttcccggttcggctgaggtttgatacgccacggtgacgttcaccgcctgtgcctgaaaagcgatgaatgccagtgcggcaagaagcgccccgcat

SEQ ID NO: 140135 - DNA, 2451 bp, Homo sapiens
atggtcgatgccgataccgcctatataaccagccgtggcctgcgcacattaggtgtgcgtttgcgtcaacatcatgaaagcagtctgaaagtggctgaatggctggcagaacatccgcaagttgcgcgagttaaccaccctgctctgcctggcagtaaaggtcacgaattctggaaacgagactttacaggcagcagcgggctattttcctttgtgcttaagaaaaaactcaataatgaagagctggcgaactatctggataacttcagtttattcagcatggcctactcgtggggcgggtatgaatcgttgatcctggcaaatcaaccagaacatatcgccgccattcgcccacaaggcgagatcgattttagcgggaccttgattcgcctgcatattggtctggaagatgtcgacgatctgattgccgatctggacgccggaaagtccatggctgttattcaagatatcatcgctgcgctctggcaacacgactttgccgcgctggcggatcctcatattggtagctgcgttatcttcggtagaaagctgcggcgtgatggtgtgacgtacatcttccacgcgggcaaatgcagaaatcaccagcgacagcggcgacgtcatttcgcgctcttcgttaccttcctgccagcgggttttcatcgacatggagtctttacccaccgggatcgtcaggcccagcgccggacaaagctcttcgcccacggctttaacggcttcatacaggcccgcatcttcaccagggtggcctgccgccgccatccagttggcggaaagtttgatgcgtttgatatcgccaatttgtgttgcggcgatacgggcagaggcggcgaaatccagcagcgcaaccggcgcacgctcgccaatcgccatcgcttcaccgtagtagctgtcgaggctggcggtagtgaccgcgcagttagcgaccggcacctgccacggccccaccatctgatcgcgcgctaccatgccggttacgctgcggtcgccaatggtcaccaggaaggttttttccgccacagtcggcagatgcagcacacgtttcaccgcgtctgcaatggtgatcccttcacgggccagcgcgtcgcctttcgctttcagcgtttgtacaatcgcgggtcatcttcggcgtttaccaagcaggacgtccagcggcagatcgatcggctgattatcaaaatgacgaatcgggcagagacacgatcagtctctcggcgcttacaatcaccgcgggcaagcaagacacaaaatatagagcttttttcttcttcttgtccttcttccgccgctgatacccactatacaccaaacaaaccacgagagaaagcagcgacgagcaaacgagagagaaaccacaccagcacagaagagcagcagagaacaacagcaataaaacaacacatcgcactgggtgacagttccaactcagaggcggccaacgcaaaagctccgaacaacacaggtgtcataatgaaaaaaagaaatttcagcgcagagtttaaacgcgaatccgctcaactggtcgttgaccagaactacaccgtggcagatgcagccagcgctatggatgtcggcctttccacaatgacgcgatgggtgaaacaattacgtgatgaacggcagggcaaaacaccaaaagcctcccccattaccccggaacaaattgaaatccgatcctcctatttcatcttgccagctccggctggccgcatgcgcagtggtggaaacaactcaactgacccgcagctggatgcgctgatccaacggacgctaagtggttcacacaccctcgccgaagcgaaactgcgggaagaaaaagcgcagtcccaggccgatttgttagatgccggttcacaatttacaggtcgcagcgttagggatgctcaaccgccaacgtgtctcggcgaacggctttttaatgcccttattcaatggatgcgccagcactgggtatggacgggccgatactatacggaagccacagtaggtttgtttgccggactggatcttgatttgtggggtgtgcatcgctcagcggttgccgccgccattggcgcgcataatgccgcgctggcagaaaccgcagcagtagagctatcgctggccacgggcgtagcgcagctttattacagtatgcaggccagctatcagatgctcgatctgttagaacaaactcacgatgtgattgattacgcggtgaaagcgcaccagagtaaagtggcgcacggtctggaagcgcaagtgcctttccacggcgcgcgggcacagattctggcggtcgataaacaaattgttgccgtcaaagggcaaatcaccgaaacgcgagaatctctgcgtgcattgattggcgcgggagccagcgatatgccggagatcagaccggtggcattaccgaaagtccagaccgggattccggagaaactcctctaa

SEQ ID NO: 140136 - DNA, 744 bp, Homo sapiens
ggcgaacaaggcgttgtcgaatgtgcctacgttgaaggcgacggtcagtacgcccgtttcttctctcaaccgctgctgctgggtaaaaacggcgtggaagagcgtaaatctatcggtaccctgagcgcatttgaacagaacgcgctggaaggtatgctggatacgctgaagaaagatatcgccctgggcgaagaggaataccaaaacggtgaaaggcttggctggcacagcttcctgctaaatatcaccagcgcgccacctgcatgttttgaccgccacggtctgctggcgctgctggctggacgttttcttgcatttgtccgtacgctgctgccaaccatggcgggaatttccggtctgccaaaccgccgcttccagtttttcaactggttaagtggattgctgtgggtcagcgtggtaaccagttttggctatgccttaagtatgattccgttcgttaaacgccatgaagatcagtgcagaaacggagttttcggaaaaagaaaaggcggcattgctgccgccttaattttaactcgcctgagaaggcgcttcgtcagttcctggaagcgtttcagggagttgcggcgcaaatcctcgcaggccgacgacatgaacgtgttcggtattctggaagactttacgcaccagtttataggtggtgcctttctccgggctgatatttccggcgctgcgaagatgagttgccttgcaaaggctcaggccagcagctccatgcattag

SEQ ID NO: 140137 - DNA, 6240 bp, Homo sapiens
ttacacgtgagcaacgggtttcggcgtatgaccggcgttgcgcagcagcatcagcaaatagataaacgatacgctggcgatcatgataaacaataaattatcggagaaattctgcattagcatagcggtaaatgacgggccaagcagacttcccacagtatagctcaacagtaaggcctggttcatcgccaccagttgatgatgttcaactttctcgcaagcccatgccatcgccaccggatatagcgtaaagccagcggcaccgaggatgaataacgctggggccatcgccgcctggctaagcatcgcgatactgccgagaatgacgacaaagacctgaacacgcaacaccagcagtcgaccaaacttatccgccagacgtccaatcggccattgtccaaggatacccgcactgaccagtaccgccatccagaaaccaatgctggcattgctcacccctttgtgattgaggtacagcggcatcaggccatatagagatcccagaacgattcctgagataatgcagccattcacgccaagccgcgcctgacggagttttagcattgacgtaattgacgtcgaatcatggttttcagcctgctgattcagcacacgcgtaaacaacagcggtaagatccctgccaacgtcaaacctgtaacccacggcaatacggacatcagctcggttgaaactttgctgaccagtaactggcctaaaaacgttcccacgtaataaaccatcatatacgcagcaagcaaacgcccacggttacgtgacgtcccactgcacatcagcgcgctctcaacaaccacccaaatcatggcacagccgacgcccgcgacaaaacgccaagccaaccagctccagaatccaatcatcaggccaagggcggcacagccagcggcaaaaatgaaggaggccagataatagctgtcagcaatgtaccgaacaggttgccggtacatacgatgaagtgagaaggctaactgcctgttgaatgtgttcagcgcagtcatttccggctcggtcagcgtcagttgctgtgctttgtcgatcagcagtgactcggtggtggaaacgtccagacgagcgcgatagttacggaaaccgtcagcaattggctccagcagctcaaacatctcaatgtcagtctgatcctgacgcgcatcaacgcgacccggcgcaaacggtacatgaatgctcaaacctgcggcgcttgcggctttctcaacaccaaccacaccagccagcactatgatatccgccagcgaggctttaccagactctttctggattttctccagaacaggcagagcacgaacggctgcggcgttcacatcccagtcgcgctgcggcattaatgccagacgcgcaccgttggcaccaccgcgtttgtcgccaccacggaaggtagaagcagatgcccaggccaccgataccagctcactaacagacagaccagaatccgcaatcgcgaatttcagatcgataatgtcctgctcggtcgggttgtagatcggctgcggcagcggatcttgccagatcagatcttctttcggcacttccggcccgatgtagcgagatttcggccccatatccctgtgcgtcagtttgaaccaggcacgggcaaaggcttcgttgacgcctgcgatggtccggccgtgtgtgtttctgttgtctctgtgtgtctttgtttgttcgtgtgctgtgttgtgttcttgtcttcgtgtctctctcgctctcctgtcggcgtccagatcggcaatcagatcgtcgacatcttccagaccaatatgcaggcgaatcaaggtcccgctaaaatcgatctcgccttgtgggcgaatggcggcgatatgttctggttgatttgccaggatcaacgattcatacccgccccacgagtaggccatgctgaataaactgaagttatccagatagttcgccagctcttcattattgagttttttcttaagcacaaaggaaaatagcccgctgctgcctgtaaagtctcgtttccagaattcgtgacctttactgccaggcagagcagggtggttaactcgcgcaacttgcggatgttctgccagccattcagccactttcagactgctttcatgatgttgacgcaaacgcacacctaatgtgcgcaggccacggctggttatataggcggtatcggcatcgaccatctggcccatcagataggcattttcccgtagctgctcccagcaacgggcattgcacacggcagtgccaatcatcgcataccccaccaccgccaagcacggcgcgttgtgatctaaggatccccgaaaacgtttatccgctacaaacgcatgaagattcaacatgttgcaatagattttgtaggcctgataagcgtagggcatcaggcattgagcacctaatgccggatgcgtcgtgaacgccttatccggcttcgctttggcggtttcttcgccgaccagacctatcttcaggtaacccgcctgatgcagcgtatccattaccttcatcaacgtctcgtaatcgacggttttgtccgctcggaagaagatggtggtgtctttcttgccttcggttaacgcattcaacgccgtaatcattgtttcatcggtgaccggatcgttaccgataaacatcgagttgtctgccttcaccgacagataaaccggtttttccgggcgcggctgcggcgtgctggtagaagcaggcaagttcaccttcacatctaccgtcgctaacggtgccgccaccataaagataatcagcagaaccaacatcacgtcgataaacggcgtcacgttgatatcatgcatttcgccgttatcgtcgaggtttcgttcagatgcattgccatcggatattatcctgcgccgtaattccgtgcgacacgaaccggatgcgcacggggcgggcttcacgatcacggtcccggtttggcgcccaataccctccgagcccgagacagctcgacaccgccggcagagacgctttgccgttcggcagcggctcaacggttccctctttcggcaaccagccgtaataaccggtttccggctcgttcctttctgctgggcattggcagaacgcgcaagaccggtcaggcgataagagtaaacaccgtcatcatccaacgaatcgctaaagtcaaaaccagtctggaacaggctgtcagtaccggctttaaactgaacttctttcagcggttcggtggtcggacgcttgctgaccatattcaacaggccgccaggactgcttttaccgtaaagcacggaaaccgggccacgcataatttcagcgcgttccagcatatacgggtcaatgaccgcatcgttatagaagttgccctgcaacttcaggccattcagatagttattctggctttggccttctgccgcaaagccgcgaatgatcaggtggtcataggtgttggatgcgccacgcgtaccaacagagacacccggcgtgtagctaagcgcttcttttaccgacttcggctgatgcagcgccatctcttcggcggtcacaacagaaatagactgtggcactttttgaatcggcgtatcggttttagtgccggtagcagactgtcgcgccgcaatagttgcagcaagccccatgcgctttcttgggcgcaggtgaacggtaacgtgaagtgtctcttcggtcaacgcgccgtgataaagaatccgtacggtgtcggggctggcatccagggagttgcgtgggctggggtccagtttggggggtctatctttggttgagagcgcaaacacagaggaaccgctcggctgacgactggtaaaggcgtcggcatggatagagacaaacaggtcagcacgctgtttctgggcttttgctacgcgcacttgcaatggaatgaagatgtcttcattgcgcgtcatgtacaccttcatattgccctctttctcgatcagagagcgcaaacggcgagctatttgcaataccacatctttttcgcgcgttttgtatttccccaccgcaccggagtcttcgccaccgtggccagggtcaagcataatgacaatcggacgatcgcgccctgctttacccggttgtggaccactttgcgctggcggcacctgcttttcgaggtcgcctttgttgtaatcctccagcagcgccagcagcgggtcctgcatatcctgtgcattggccggatagaggtccatcaccagacgctctttaaacccggcgaccggcgcaagggcaaacagctgcggttttacgtttggctttaattcaaaaaccatccgtacggtttgcgggtcaaattgcccgacgcgcgccgacttgatgaacgggtcgtctgcacgaatttgtgccgccatccccttgagtaccgagttcaggtttacatcttcgatatccaccaccacgcgttcagggttactcaacgcgaactgcttatatttcagctgacgatttgattccaccgtcacgcgggtgtagctggacgcaggccagacgcgcaccgccacgacctggctgaccgcagccagactgacctgacttacgctcaatagccacatggcacccgcgcttatccccatattggcaatgtcggcaccaatgacgccgatgaagaatcttctcaggtacatgcacaaggtctggtgattcgcgacctgccgctgattgccagcaacttccgtaataccgaagacctctcttcttacctgaaacgccataacatcgtggcgattgccgatatcgatacccgtaagcatgctgcttgtgccgtgcctaatacactcgtggctcgtggtcttaggaagcatctgaagcgggtagcagctccacagcattggattgctggatgaattgactagtgtgtttgctccttgtccaaccaccagtccccacaagctgagagatgtgctgctgcctgaagattgtctgcatgaaggaaccagacttaagtatgccggggatccgtctagactggtgatgactgggcgaagcacatccgcagtggaaaacgtagcagttataccgcaggtgaattggtagtgccgaacggttcgatggtttccgctggggagaaaaaggcaaatggaatctggaatccattgccgccggtacggaaaccgaattgtcgttaaccctgctcggtcaacatgacgctgttgcaggcgtggccttcccctactttggcggcattgaaaatccgcattttcgcagcgtaaaacacaatccggtgctgtccggtggtcagcgtttatgatttggtactggcgaattacggcctcgatcgcgggctggaagatgaaaacagtgcgaaagattacgctgaaatcaaaccgtacaccccagccggcgtgccgcgccagtatattgaaaccatcgcccgtgaatttgccgataccgcccataaaacgcatgggcgctcgatgattatcctcggcgcaggtgttaaccactggtatcacatggacatgaactaccgcgggatgatcaatatgctgatcttctgcggttgtgtcgggcaaagcggtggcggctgggcacactatgtcggccaggaaaaactgcgcccacaaaccggctggttgcactggcctttgcgctcgaccggtaataacacgaaacgttggcgtaaagtagcggatgcgcacatcgctgtcgtcgctgtgcagcagaaaagcagtttccgaatggccgaactcgcgggcgataagctgcatttgcgcttcgctaagattatcggcggggaaaacaacaccggcagaattgccgcgaaacggttgtgaggtaaaagcatcgacgtggtacacaatttgatatcgacgagtaaagtactcaaacggcgcgctccacacatgcaccagtcgggtgaacgggaagagcaggaagatggtcattcccaacaccagatgcaggcggaagacgaacgctacgccgttgagcatctctgacgatccaccacggaaagtgacaatgctttgcgcccaacccaccagcttcatcatttcgctaccatcaggatactgtgctgaaaacggtatggtacttagccccaacagacactggatcagcaaaatgctcatgatgatgatatccggcgtagtggaagtggcacgcacgcgctgatttgtcagcctgcgccacagcagtcctgcgcggcaatctacgtcacacaccgcaaataacggcgagcacaatgccagaattgttcccgccctgcgaaaccagccgtaatacagggggtacat

SEQ ID NO: 140138 - DNA, 1149 bp, Homo sapiens
tggcaaatcaaccagaacatatcgccgccattcgcccacaaggcgagatcgattttagcgggaccttgattcgcctgcatattggtctggaagatgtcgacgatctgattgccgatctggacgccggttttgcgcgaattgtataacattgccacttttggacaattttgcagacattttattgtgaaaagtcttaaattgttgcgtccgggatcaaggcgtcccggacgattcaggagtacaataggcagataaaggcttaaacgctgttccacaggaaagtccatggctgttattcaagatatcatcgctgcgctctggcaacacgactttgccgcgctggcggatcctcatattgttagcgttgtttactttgtcatgtttgccacgctgtttttagaaaacggcctgctgcccgcctcatttttgccaggcgacacgttgttgatactggcaggcgcattgattgcccagggggttatgaatttttccggcctacgaattgcggttttggacccccgcaaccaagtccggggcggcgggttaagtatattcaaggggcgctggttagggaatcccaaaacggtgaaaggcctggctggcccagcttcctgctaaatatcaccagcgcgccacctgcatgtttgaccgccacggtctgctggcgctgctggctggacgttttcttgcatttgtccgtacgctgctgccaaccatggcgggaatttccggtctgccaaaccgccgcttccagtttttcaactggttaagtggattgctgtgggtcagcgtggtaaccagttttggctatgccttaagtatgattccgttcgttaaacgccatgaagatcaggtaatgacgttcctgatgatcctgccaattgccttgttaaccgctggcttgttaggcacgctgtttgtggtgattaaaaaaaaatactgtaacgcctgacgattttccccgttcccggttgctgtaccgggaacgtatttaattcccctgcatcgcccgcattcttgccgcatcttcccccggcgtcacaccgaagtaacgtttaaactcacggctaaattgcgatgcgctttcatagccgacgcgcatcgctgctgcgctggccttcatgccgtcatggatgatccccgggtggg

SEQ ID NO: 140139 - DNA, 1290 bp, Homo sapiens
atgcccccagagatccctgagacaggctgttaccctcctgacacaggccccctgcactggcccctgattgaccagtcacagatatccaatctgacctctgactcccagggacccgcgaagagggaggagaaagcagggaacaaagaagagaaaagggaaaagaggagacagaagaagaagaggaatacagagacacaaacacaagacacggaagcacagaacaaacacagacaagaagacaacgaaaagcaacaacaacaagaaacaaagaagacgaaagacaacaaaaaagagaggagaaacaaaaaggaagaaacaaacaagcacaaaaaacaaagaaaaaaaaaacgagcaaacaaggccgtcgcttcctgctctacttgccgaagaaaagacagaaaacgaagaaggtatagccggtaccacaccgtcggttctcatttccacgccctggaccgcaccacgctgtcaccgccaaccgtgatatcagctactacacggtgcatgaatccttcgttccaccattccgctggtgttctgcgaagcggagaaaatggaccccaataccagttcctgaaagtgatgatgattgatgaacccgccatcctcgaccaggaagtgaaagagaaatataccgtgctgaaagtgcgccgtacttcctcgaaatcctcgataaacgcgttaacaaaggccgatcgggaagacttcttccaggtcgcctgcggacgcgggataacgtgtacagataccagctcgccgatacgctgtgcgctgcggcacctgcatcggtcgcggctttacaggctgcaacatcaccagaaccatggcagtacacaggccgccgccaatctgcttaacaccaaccagttgacgcgcgcagctttcaccatcgcgtcagaagcctcaatcagtgcaacaggccccgggtttcgatcattcctaatgcttccattgtgctttcctcttatcagggtccagaacgggaccgttcattcaaccagtgtttgtaaactgtttcgcggttcacttctgtctgacgcggcacagctgccaccagcgccagtcgataatttcctgcacgctacaaccacgagagagatcgtgcatcggcgggcaagtccttgtatcagtggcccgacggcacgatatccgccgagtcgtgtgcgattttgtaaccaatatttccggcttccagcgacggaaaaaccatacattgggccttgccctgtagcgggctggcaggcgctttttgcgccgcccttccggcacgaagtcggcgtcaaactgtaa

SEQ ID NO: 140140 - DNA, 1842 bp, Homo sapiens
atgaggtgccagaacgcctggtggattatgcaacattccagtggcagcgagcgtctgtccagcgttttattgcactttcggcgaacgaatctggctgatagcaacgacagaatccagtatcatagcttacgttttttcgacgaggacggtgcccagtggctggtgatccttggcgacgtgttgaatcacggcccgcgtaatgctttaccggacggttacgcgccacgcaaagtcgctgaacggcttaatgaagtggcacataaggttatcgctgtgcgcggcaatctgcgacagcgagtggatcaaatgctgctgatttcccgggcaatcaatcggttagtggcgagcaactggaatcggcgctcggcacaaatgcggtgtccgatctcgggcaaaaacttggcgtggataccagtacagcttccagtttactggcagaacaattgccgaagattattgatgcgctctcaccgcaagcatgggtcaggaaccaatctacctggggaactcatggctattaaactcattgctatcgatatggatggcacccttctgctgcccgatcacaccatttcacccgccgttaaaaatgcgattgccgcagctcgcgcccgtggcgtgaatgtcgtgctaacgacgggtcgcccgtatgcaggtgtgcacaactacctgaaagagctgcatatggaacagccgggcgactactgcattacttataacggcgcgctggtacagaaggccgctgatgctatgacgactatcgttcctgaaaaactctctcgcgaagtcggttctcatttccacgccctggaccgcaccactgctgtacaccgccaacccgtgatatcagctactactacggtgcatgaattccttcgttgccaccaattcccgctggtggtctgcgacggaggaagaatgaccccaagagccatgttcttattcagtagtgctcacatactgatgcctctgaactatcacaactctcatattaatacattgttcccggtggcgggtacgctgatggttgaaccgactgaatctgaaagcaaagtggaactggatcgctttatcgacgcgatgctggctatccgcgcagaaattgaccaggtgaaagccggtgtctggccgctggaagataacccgctggtgaacgcgccgcacattcagagcgaactggtcgccgagtgggcgcatccgtacagccgtgaagttgcggtattcccggcagcacttgtgactggtggcagtcgcggcatcgggcgggcaactgcattactgttggcgcaagaagggtatacggtggcggttaattatcagcaaaacctccacgcggcgcaggaagtgatgaacttaataacgcaagccggtggcaaagcattcgtgctccaggcggatatcagcgacgaaaaccaggtcgttgcgatgtttacagcaatcgatcagcacgatgaaccgctagcagcgctggtcaataacgccgggatcttgtttacccagtgcaccgttgaaaaccttaccgcagagcgaatcaaccgagtactttccaccaacgtgacgggatattttctctgctgccgcgaggcggtaaaacgcatggcgcttaaaaatggtggcagtggcggcgctatcgtcaatgtctcttcggtggcctcacggttgggttcgccaggggaatatgttgattacgcggcatcgaaaggggcgattgatacgttaaccaccggactatcgctggaagtcgccgcgcaggggattcgcgttaactgcgtgcggccagggtttatttataccgaaatgcacgccagcggcggcgaggcttggacgcgtcgatcgcgttaa

SEQ ID NO: 140141 - DNA, 1278 bp, Homo sapiens
cgttaacttttcaccaaaaagtagtcaaattcaccacgccctgcgcaccgtcgcggggcgttttgctgttaaatcaatagattatttttggcatgattcttgtaatgccagcaagagatttcatatttgggagagcatcatgctggaactactttttgtgattggctatttagtcatgctgatggtcaccggcgtttcgttgctgggcattatcgccgcgctggttgtggcgacggccattatgttcctcggcggtatgctggcattgatgattaagttgctgccgtggttactactggcgatttcggtggtgtgggttattaaggcgattaaagcaccaaaagtgccgaaatatcagcgttatgaccgctggcaattggcggttagacgatcccctctgctgcccgatcacaccatttcacccgccgttaaaaatgcgattgccgcagctcgcgcccgtggcgtgaatgtcgtgctaacgacgggtcgcccgtatgcaggtgtgcacaactacctgaaagagctgcatatggaacagccgggcgactactgcattacttataacggcgcgctgggtacagaaaggccgctggatggttagcaccgttggcggcaaaactgcttctcaagcttatggacgaactaatcggtttcctggaaaaactctctcgcgaagtcggttctcatttccacgccctggaccgcaccacgctgtacaccgccaaccgtgatatcagctactacacggtgcatgaatccttcgttgccaccattccgctggtgttctgcgaagcggagaaaatggaccccaatacccagttcctgaaagtgatgatgattgatgaacccgccatcctcgaccaggctatcgcgcgtattccgcaggaagtgaaagagaaatatcccgtgctgaaagcaccgaatctccaacaaccacatggaagttcaggctccagcttccaccgagaaatctttttctcctccagatctgaagacaaaaggagaggaggcctggtggtgagcgggatatctctgttagttgtcagcgcaggtccatgggttaggaatgctaatgagcctcttggccagctgaagacttggttctctctctcgcacaccctgacgctcacatacactcgggctcctgcatgccgactgacaagcacacagacagagcctcgtgcacgaccctgtctctctcctctttcctctgagcccagagatcgatcgctgaccccacggttgggccaacgctttatttatctggctgtgcaatga

SEQ ID NO: 140142 - DNA, 1509 bp, Homo sapiens
atgcttttctactatctcactcgcatgattgtaagtccccactttgcgcagatattgtggcgcagggatatcgctccgtcgttgggcaaagagaaacgcgcatttaccttaagctggctggcagcgttaagcgtgctgctacttctgttgtgcacaccttatgaaaacgactttattgccggttacctggtacccgttttcttcatcatctttaccctcggggtcggtaagcttcgctatccgtttttaaatctcacctgggctgtttcaacgctttgccttctgaattacaaccagaactttttgcaaggggtggaaaccgaatattcgctggcatttattcttgcggtgctgatttcctttagcgtttgcctgctctatatggtgcgcatttatcatcgcagtgaatggcttaatcgccgctggcatttgcaggcgctgacagatccgttaacgctcctacccaactttcgtgcgttggaacaagcgccggagcaagaggcgggcaagagtttttgctgcctgcgcactgataatcttgagtttatgagtcgtcggtcaaaagctgaaaagctgtctcagtgtgatggttttgtctggaagtataaacctcacgcattcgcgctgggctttgttgaagcgccacgcggtgaagacgtgcactggagcatgctcggtgataaccaaaaattgttccgctggcgctgccgtgccgccacggcaaccgacaacatgccgaagatgagcaacaaccggttggggaaatcgctgccgatggattatcgccgcggtgacgatattcgtcgccgggtgtcggcggcgctggataaagtcgggctactggacaaagcgaagaacttccctattcagctttcgggcggtgaacaacagcgtgttggcattgcccgcgcggtggtgaacaagcccgcggtactgctggcggacgaaccgactggtaacctggacgacgcgctgtcggaaggcattttacgtctgtttgaagaggggtacacgcaggcctcagcagagttctgtcaatcactggctcagtacgattacatcaccctgcgggcatgcccgcaggtcacatcaccgaaccccacacctgattatggtatccgttacggcgaactgtcgctcaagatgattcgggatagcaacgtgctcatgaccgccacgcttataccgacgttcattagcaacacgatgcacctcttccggcgtcatcgggttagcgccgttacgatctgccccccacagcagcagcagataacgcaaacgttgcagccctgcagtcggacgcgcctgaatcacagtataagcgcgctgggtatcgagttttacggaagagacaaccgcgaccggatagccttccgggaaacgaccgcctggctacgattcaccagcattcggcttaaacagccttccagcaccagttccatctgctttgctaccatcgccggatcgtcaacttccagtgtggttaacagttcgtgggtgaaatcgtag

SEQ ID NO: 140143 - DNA, 1326 bp, Homo sapiens
atgcatacttttgaagtggctgccaggcatcagtccttcgccctgccggcagaggaattgtcgctgagccccagtgcggaaattcttgatatcaaaaatcaggagttatcgggaacgttaactctgtattcccggccctctatcgcccaatgctggttggtgcccgcattaggtgactttacacgccggtatccgtctatttcgctcaccgtgctcactggtaatgacaacgtcaatctgcaacgtgccggaatcgatttggcgatctactttgatgatgcgccgtcagcgcaactcactcatcactttctgatggatgaagaaatcctgccagtatgtagcccggaatacgctcaaagacatgctttaaccaacacggtaattaacctgtgtcactgtacgttgctccatgacagacaggcatggagcaacgactccgatttgcagttggccggtggtggagcagatcttgatgtcagcgtgaaagagacgagcggctcggtaaccacctatctggtgccttatgcagcggtgccaaatatgctgcaacccggcgtgtcgaaatatgatttagcggcgggtcgtagccatattgaaggggcgagcaaacaaagtgattttgtccaggcgggttatcagtatggttttaataatttattgacgctgtatggtggctcgatggtcgcgaataattattacgcgtttactttgggggctggctggaatacacgcattggtgccatttccgtcgatgccactaagtcgcatagtaaacaagacaacggcgatgtgtttgacgggcaaagttatcaaattgcctacaacaaatttgtgagccaaacgtcgacgcgttttggtctggcggcctggcgttattcgtcgcgtgattaccggacatttaacgatcacgtttgggcaaacaataaagataattatcgccgtgatgaaaacgatgtctatgacattgccgattattaccagaacgattttggccgcaaaaatagcttttccggccaatatgagccagtcattgccagaagtgcggcgcgggtgtgctgtgccgatggccgagcagggagtgaagcagtgattgataaagatctcgccgctgcgttgctcgccgagcagattaatgcagatggactggtgatcctcaccgatgctgatgcggtatatgaaaactggggaacgccgcagcaacgtgccattcgccatgccacaccggatgagttagcgccatttgccaaagccgatggttcgatggggccgaatgtaacggcggcctacaaccggtgccgcatccggcaattggtgcacaatgcctga

SEQ ID NO: 140144 - DNA, 5073 bp, Homo sapiens
atgaaaatcagtcgggaaacactccaccagctaattgagaataaactctgccaggctgggttaaaacgtgagcacgctgcaaccgtggctgaagtattggtttacgccgatgccagagggatccactctcatggcgcggtgcgcgtggaatactacgcggaacgcatttcaaaaggcggcaccaaccgcgaaccggagtttcgtcttgaggaaaccggaccgtgctcggcaattttacatgccgacaatgccgccggacaggtcgcggcgaaaatgggtatggaacatgccatcaaaaccgcccagcaaaatggcgttgcggtggtcggtatcagccggatgggtcacagcggcgcaatctcttattttgtgcagcaggcagcccgcgccggattcattggcatttcgatgtgccagtccgatccaatggtggtgccgtttggcggcgcggaaatttactacggtactaacccctggcctttgccgcgccgggagaaggcgacgagatccttacctatgatatgccgactaccgtacaggcatggggaaaagtgctcgacgcccgctcgcgtaatatgtctatcccggatacctgggcggtcgataaaaacggtgtaccaacaaccgatccgttcgcgcgaattattccgtcaacatcttagccagaccatgcgcgaattaaatgccattacccccgcgcccggttttaatcaggtttattatcccggacaggatcaggatattaaacaacgcaaagccgccgtcgaaggcatcgaaattgttgatgatatttaccagtatttaatttccgacgcgctttataacacgcacgcgctcaatggcgttaagaccgactgtcggcactggctgggtaaaggccccggattaacgccgagtcatgatgacacgctgagcaggaatgctgctggcggcctgctgctgggcacagcctgggcccagttccttatccggttggcagattgtgtcacgtgcaacgggccgcaggtggtggcatgcttggcatgtgcacgaatcatggcgtggaaagaggtagaaccgtatccgctggatgtgctggttgcggaaagccaggggatgattggctatatgctggcgcagagtttgagcgcacagccgcagatgccgcccgtgacgacggtgctgacgcgcattgagagaaatgtattggtccggtttatcagccagaagaacaagaggcactggaagcgcttacgctgcaaagatgagacgggaatagccaacgccgattctgtcgattttgatgcgccacgtaccacgcgatcgttcttgcaaatgaccatgggctggttcctgaaagaaaaacagctggcgatgatgcagacgccgcaccacttcttctcaccggacccgtttgaacgcaacctggggcgtttccgtaaaacgccgaacgaaggcacgctgttctatggatggcaacgatatgtggacgccactttcttctgcggttcctgtgcggtgattcgtcgtaagccgctggatgaaattggcggcattgctgtcgaaaccgtgactgaagatgcgcatacttctctgcggttgcaccgtcgtggctatacctccgcgtatatgcgtattccgcaggcgtcggggctggcgaccgaaagtctgtcggcgcatatcggtcagcgtattcgctgggcgcgcgggatggtacaaatcttccgtctcgataacccgctcaccggtaaagggctgaagtttgctcagcggctatgttacgtcaacgccatgttccacttcttgtcgggcattccacggctgatcttcctgactgcgccgctggcgttcctgctgcttcatgcctacatcatctatgcgccagcgttgatgatcgccctattcgtgctgccgcatatgatccatgccagcctgaccaactccaagatccagggcaaatatcgccactctttctggagtgaaatctacgaaacggtgctggcgtggtatatcgcaccaccgacgctggtggcgctgattaacccgcacaaaggcaaatgtggactggtggaagaagagtacgtcgactgggtgatctcgcggccctacatcttccttgtcctgctcaacctggtgggcgttgcggtaggcatctggcgctacttctatggcccgccaaccgagatgctcaccgtggtcgtcagtatggtgtgggtgttctacaacctgattgttcttggcggcgcagttgcggtatcggtagaaagcaaacaggtacgccgatcgcaccgcgtggagatgacgatgcccgcggcaattgcccgcgaagatggtcacctcttctcgtgtaccgttcaggatttctccgacggtggtttggggatcaagtatcacacgaaagggaggagcagacaagcaaggttacggaaagcccgaagcctttgtggacgaacctgcgaccgcctcaacgggacaaacagcagaggcccgggaagaagccaaccaccaagggccttcgacgggttcgagttccgctgtgataacggagagagactgcgtgtcacgttcgcgctggactgctgtgatcgtgaggcactgcactgggcggtcactaccggcggcttcaacagtgaaacagtacaggacgtcatgctgggagcggtggaacgccgcttcggcaacgatcttccgtcgtctccagtggagtggctgacggataatggttcatgctaccgggctaatgaaacacgccagttcgcccggatgttgggacttgaaccgaagaacacggcggtgcggagtccggagagtaacggaatagcagagagcttcgtgaaaacgataaagcgtgactacatcagtatcatgcccaaaccagacgggttaacggcagcaaagaaccttgcagaggcgttcgagcattataacgaatggcatccgcatagggcaaatccagatgccaacgtagtcagcgaagatgtgctgcgtgagagcgtcggtaagtcggtcgttaaccttattcacggcgtgcgtgatatggcggcgatccgccagctgaaagcgacgcacactgattctgtttcctccgaacaggtcgataacgttcgccggatgttattggcgatggtcgatgattttcgctgcgtagtcatcaaactggcggagcgtattgctcatctgcgcgaagtaaaagatgcgccggaagatgaacgtgtactggcggcaaaagagtgtaccaacatctacgcaccgctggctaaccgtctcggaatcggacaactgaaatgggaactggaagattactgcttccatagccaacccggttatgaatgcctaatcgatccgctgaacgatagcgccaaacgcgccaccatgttcggttcgttcgcggtgatccgcgagtccggtatcaacagcctacgtgttggcgacgtttattacgtaggtcatctgccgtggttcgagcgcgtgtggtatgcgctggcaaaccatccgattctgctggcggtgctggcggctatcagtgtgatattgctggcatgggtactgtggcgtctgctgcgaattattagtcgtcgtcgtcttaacccggataacgatgttcaggcagcctgtacctggcctgcctgggagcagtttaaaaaggattacatcagtcaggaagggcgcgtcatcgaccccagcgacgcgcgcaaaatcaccacctccgaagggcaaagttacggcatgttctctgccctggcggctaacgaccgtgcagctttcgataatattctcgactggacgcagaacaatctcgctcagggttctttaaaagaacgtttgcccgcctggctgtggggcaagaaagagaacagtaagtgggaagtgctggacagcaattcggcctccgatggtgatgtctggatggcctggtcgttgctggaggcggggcgtttgtggaaagagcagcgttataccgacatcggcagcgcgttgctaaaacgtatcgcgcgggaggaactacctggccgccgacgctggcgcagtatttcacccgctttggcgcgccgtggaccacgctgcgcgaaaccaatcaacgtttattgctggaaaccgccccgaaaggtttttcgcccagactgggtgcgctatgagaaagacaaaggctggcagctaaaagccgaaaaaacattgatcagcagctacgacgctatccgcgtttacatgtgggccgttcagcgccagcgcgtggccgataactttcccggcagcgatgcctattacaactatgtgctgaccctgtttggacaaggctgggatcaacaccgtttccgcttctcgacaaaaggaatgcgcaaattcacactaaacatattcacgctttccctcggtctggccgtcatgccgatggtcgaggcagcacaaccgctcagcaacagttgctggagcaagttcggtaaggcgaagcgaaccatcgtgaagatctggtgcaacggcggtatatcgggtggaactatcggatcgaataaccggacgggcgggattatcattattgatttcatcgatatgaataatgaagatcaccgccgccgagtgctgcactcgctggatgccaagggcggcctgcgtattgctttaccgcatcttgacgcctggcgtccggaaatcctcaacaaaatagaatccgcgactggcatgccggtagaagccagtcagctctcagccagctggcagaattttggcccgacgcttgaagcacacgacatccgtgcagaactaaaagatggcggcgaattttcggttaaacgcgttactctggcgctggatgtctggcagagcctgttacatatgcgctggcagtttcgcgacctcactttctggcagctgcgctttcgcaccaacactcctatcaccagcggtggtagtgatgacagtctggaagccagtcacatcagcgatctgtttcttcgtcaatttgaccagttgtgcgaattctgctggatgacgatcgacaaaggcgatgtaaccggcggtgacgtctggctgaaacagggcggtgccagctggttgggcgagaagcaaacgcatacggctgctcggtggataatctga

SEQ ID NO: 140145 - DNA, 3388 bp, Homo sapiens
caacagcactcgcacaaagcgaggtgagagtatgtatcgcatggacaaactaaccactggtgctgcctatggcgcttcagccgggagcatcctaaacggcatgttgaatgcctacagccccgagcagtggaacgctatcggcgtgctgacaaccgccgcagcaggagccgagatgaacccaacgttgaggaataagctggtgggtgccattgttggcggatcaggggcaatcactattgctgcagtaatgctgggcaatgcggatggactcgaaggtcggcgttattacgcctatcaggatgtggtcggcgtctggaccgtttgcgatgggcacactggtaccgacattcgccgcggtcaccgatataccgacaaagagtgtgacaacctgcttaaggcagatctgcgaaaggtggcaagcgccatcgacccgctgatcaaggttcgcatccctgagccaacccgcgccgcgctttactccttcacctataacgttggctctggtgcttttgccagctcgacgctgctgaagaagctgaactccggtgatgttccggtgcacctgaagatcgtattcagagcgtgggtgccgtctcctgactggctagtccactctatgcgcacactccctgagagattggcgctcgagtatactcgtagtggagccaataggggtatctggggattacgcagcggtgccgtcacgctggaaacctcgcaggtattcgccgcgctgatgggcgatgcgccgcgcagtatgacgatggtggtcacctatttttttttaccacgcgtgctgatggcgctgttgattggcgcagcactgggcgtcagtggcgcgatttttcagtcgctgatgcgtaacccgctcggcagccctgacgtaatgggctttaacaccggggcgtggagcggcgtgctggtggcgatggtgctgtttggtcaggacctgacggctatcgcgctgtcagcaatggtgggcggcattgtcacttcgctgctggtctggctgctcgcctggcgcaacggcatcgacacctttcggttgattattatcggtatcggcgttcgcgccatgctggtggcctttaatacctggctgttgctgaaagcgtctttagaaacggcgctaacagcaggtttgttggaatgccggatcgctcaacggcctgacgtgggcaaaaacctcgccttccgcacccatcattatattgatgctcattgccgccgccttactgtcgcaccgcacattgcccgacgcattagcggcaccgctcgctgggggctaacccaggcggcgctatgcggggcgctgttactgcgtggcggccgatctctgcgcccaacaactgtttatgccgtatcaacttccggagtctcgcaaaaaatgaccgaatcagtagcccgtttgcgcggcgaacagttaaccctgggatatggcaaatataccgttgcggaaaatctgactgtagaagctcttccccagggctgccgaaggaatgaagaacctttcttggggtcctcccatccagcggacagcgataaagccgaactagttaaagtgatatccacctttttcggcgatgcttttgccattttcacggtcgttgatttgctaagccttttcaccgctgtgctgatttacaacatgcttttctactatctcactcgcatgattgtaagtccccactttgcgcagatattgtggcgcagggatatcgctccgtcgttgggcaaagagaaacgcgcatttaccttaagctggctggcagcgttaagcgtgctgctacttctgttgtgcacaccttatgaaaacgactttattgccggttacctggtacccgttttcttcatcatctttaccctcggggtcggtaagcttcgctatccgtttttaaatctcacctgggctgtttcaacgctttgccttctgaattacaaccagaactttttgcaaggggtggaaaccgaatattcgctggcatttattcttgcggtgctgatttcctttagcgtttgcctgctctatatggtgcgcatttatcatcgcagtgaatggcttaatcgccgctggcatttgcaggcgctgacagatccgttaacgctcctacccaactttcgtgcgttggaacaagcgccggagcaagaggcgggcaagagtttttgctgcctgcgcattgataatcttgagtttatgagtcgtcattacggcttaatgatgcgcgttcactgtatccgctcaatttgccgtacgctgctgccgttgatgcaggaaaacgaaaagttgtatcaattaccgggtagtgaaaacatgttagtgctgagcgggccggaaacggaagggcgactccagcatatggttaacatcctgaatagtcggcaaattcactggaacaataccgggctggatatgggctatggtgctgcctgggggcgttttgatggaaatcaggaaaccctgcaacccttgttggggcagttaagctggctggcggagcaatcctgcgcacatcatcatgtgctggcgctggatagcagagaggagatggtttccgggcagaccactaaacaggtgctattgctgaataccattcgcacggcgttagatcagggtgatttgctgctctacgcccagccaattcgcaacaaagagggtgaaggttatgatgagatcctcgcgcgactgaaatatgacggcggcattatgaccccggataagtttctgccccttattgctcagtttaaccttagcgcgcgttttgatttgcaagtgctggaatccttgttgaagtggctggcaacacacccttgcgacaaaaaaggaccgcgcttttcagtcaatttaatgccgctcacgctgctgcaaaagaatattgccgggcggattattcgtctgtttaagcgttatcacatctccccgcaggcggtcattcttgagatcaccgaggagcaggcgttttctaacgcagaaagcagcatgtacaacatcgagcagctgcataagtttgtatccggactttttatcaccccaaagagaaactctgccactgttaaacaacagctgcccacttccccctctggcctggggacctggggcacaggggctggtggagacacggggtctggctgcaaccggagagttcggcgctttggatttcgcaacgtcagccattaccgcagcgtcgttaatggcaacgctcgcggtgatggcgacaatgaaccaatcagccgagcttcaatatcatcatccgcaataactaaacgccgggtacgcggaaacttaatcgccagttcagtcaggcaagataatccctctctgcgctcacttctcatggcagaaaaagaaaaaatgaccgccgcaaacgagatccgcgacatggcatcctga

SEQ ID NO: 140146 - DNA, 1830 bp, Homo sapiens
  misc_feature (1)...(1830): n = a,t,c or g
cccttgttctgttcggagtggccgaaacgtaccctgttgcgaatgatttcgctgcgggcgctggggcatacgtcaggggcagatacgctgctggggttcgggcttggccaacaattattacaaggaaaaccatgaaaacactggttgtggctcttgggggcaacgccttactccagcgcggtgaggcgctgacggcagaaaatcaatatcgcaatatcgccagtgctgtacccgcgctggcacgcctggcccgttcttatcggttggcgattgttcacggcaacgggccgcaggtggggctgctggcattgcagaatctggcgtggaaagaggtagaaccgtatccgctggatgtgctggttgcggaaagccaggggatgattggctatatgctggcgcagagtttgagcgcacagccgcagatgccgcccgtgacgacggtgctgacgcgcattgaggtttcgcctgatgatccggcgtttttgcagccagagaaatttattggtccggtttatcagccagaagaacaagaggcactggaagcggcttacggctggcagatgaaacgtgatggtaaatatttgcgccgggtggtggcgtctccgcaaccgcgtaaaattctcgacagcgaagccatcgagttgttgctcaaagaggggcatgtggtgatttgcagtggcggcggcggtgtgcctgtgacgatatgacggagcagggagtgaatcagtcattcataaagatctcgccgctgcgttgctcgccgagcagattaatgcagatggactggtgatcctcaccgatgctgatgcggtatatgaaaactggggaacgccgcagcaacgtgccattcgccatgccacaccggatgagttagcgccatttgccaaagccgatggttcgatggggccgaatgtaacggcggtgagtggttatgtcagaagccctgtgcagatgcaccaccggcagtttcagccagtcataattcacatcgctaccaatcagattgatcatcaccgacggattattcaccactggttgcgngaatggcttaatcgccgctggcatttgcaggcgctgacagatccgttaacgctcctacccaactttcgtgcgttggaacaagcgccggagcaagaggcgggcaagagtttttgctgcctgcgcattgataatcttgagtttatgagtcgtcattacggcttaatgatgcgcgttcactgtatccgctcaatttgccgtacgcttctgccgttgatgcagggaaaccgaaaagttgtatcaattgccggtgaactgctgttagtgctgagcgggccggaaacggaagggcgactccagcatatggttaacatcctgaatagtcggcaaattcgctggaacaataccgggctggatatgggctatggtgctgcctgggggcgttttgatggaaatcagcaagccctgcaacccttgttggggcagttaagctggctggcggagcaatcctgcgcacatcatcatgtgctggcgctggatagcagagaggagatggtttccgggcagaccactaaacaggtgctattgctgaataccattcgcgcggcgttagatcagggtgatttgctgctctacgcccagccaactcgcaacaaagagggtgaaggttatgatgagatcctcgcgcgactgaaatatgacggcggcattatgaccccgcataagtttctgccccatactgcgcagtttaaccttagcgcgcgttttgatttgcaagtgctggaatccgtgttgaaggcgccgccccccccccctgcgatctgcagaacgaaagcacactggcggccgtga

SEQ ID NO: 140147 - DNA, 3639 bp, Homo sapiens
atgaaacgactcattgtaggcatcagcggtgccagcggcgcgatttatggcgtgcgcttattacaggttctgcgcgatgtcacagatatcgaaacgcatctggtgatgagccaggcagcgcgccagaccttatccctcgaaacggatttttctctgcgcgaagtgcaggcattagccgatgtcacgcacgatgcgcgcgatattgccgccagcatctcttccggttctttccagacgctggggatggtgattttaccctgttcaatcaaaaccctttccggcattgtccatagctatactgatggcttactgacccgtgcggcagatgtggtgctgaaagagcgtcgcccgttggtgctctgcgtgcgtgaaacaccattgcacttaggccatctgcgtttaatgactcaggcggcagaaatcggaggaaataccggggaaatagacgaagaagaactggaatccttgttatatgccattgcgaaggggaatgtttttaacttccagaccattctgcatctgcccgttgccgtgcaaaatgacaccatcgatttttaccaaatgttcgctcggatttggtcatcgcatccacaatggctgacattgtatttagcgcaacatcgcgcagtgattatccccgatgatgcaaaactgcacagaaatttactccgctggtatagcgcaggtcgcctggatatccccgaacttctggattacgcccagtcatggcgggaaactgaacctgataatgaagatgcgccttattatgaatacgcgcaacgcgtctattgtggagaaggcgaaagcctgttggcagaactttgtgactactggcgcgagtatccctccacccaggcggatgctttaatgttgcaatggtgccgtcagcatcgggtcgattattacccattactggtgatgatgattgaagcgcgtgatctggttaacgatcagggaaaaccgctactttatgtccccggcgacagcgcccgtacgcgttttcatttatacgaaatactcagcgatgaaaaactctctgcgctggggcgttcactggtcgagatggttttgcacaaaggaccgtcttacgttcgtgccgtcgcagaccaaacagcaactgctggttatgtaaaaactaacactgcatacaccattacttatcattcatcgtctattgcggacattgtcatttcgggtactcgcgtaatatataaaagcgatcaaaaaagtgtcaacgtacgtctggaaaataaagggaataacccgttgcttgtccagagttggttagatactggcgatgacaacgctgagcctggcagtattacagtcccttttactgctacgccgccagtatcgcgtattgatgccaaacgtgggcaaacaatcaaattaatgtacacagccagcacctcactgcctaaagacagagagagcgtgttctggtttaacgtactggaagttccaccaaaaccagatgcagaaaaggtcgcgaatcaaagcctgctgcaactggcatttcgcacacgtataaaacttttctatcgcccggatggattgaagggaaatccctctgaagccccgttagccctgaagtggttctggtcaggttcagaaggtaaggcgtcattacgagtgaccaatccaaccccttactacgtctcttttagcagtggtgatttagaagctagcggtaaacgctatccgattgatgtgaaaatgattgcaccatttagtgatgaggtcatgaaagtcaatggccttaatggcaaagcgaattctgcaaaagtgcatttttacgccattaatgactttggtggcgcaattgaagatcttcgtgtaacttgcgatcttcgtatcccttatgtcccctgttctcagtttttatctttctgcggttacttatcactgtcacggaggtgtgttcgattcgtgttttcggtcccgccatgcgtcctatcggccttggcaatattctacccggaatgcgcatacggtgctgtctggcctctgggcacctgtttcggagggcctggacatggccgttaccggttggccatctttccccactcaaatccatcggcgacccgtaggtgtttctcaatttgtacggcctgttgtgccagttcctgcacttctttcgttggtcagcgagaagatgtcacgctgttcctgcggtacgtcttcgattttaacctgcttgccgtgctcctgggtcggcgcgtaaaccatgcggatttttttcgaccccatggtgcggcgcacgatagccgggcgattcgccgccagtgtcggtttatgcacgtaaaactcatccgggttaaccgcaccctgcacgaccatctcaccaaggccccatgcggaagtgataaacaccacctgagttcaacaaatagccaggatccgttccgtcgggcggtactgtttttatatttgaaccgctacggttacaacggcctgtgtcgttacaatctgcgcggtgagtttaacgtgccgttcggccgctacaaaaaaccctatttcccggaagcagagttgtatcacttcgctgaaaaagcgcagaatgcctttttctattgtgagtcttacgccgatagcatggcgcgcgcagatgatgcatccgtcgtctattgcgatccgccttatgcaccgctgtctgcgaccgccaactttacggcgtatcacacaaacagttttacgcttgaacaacaagcgcatctggcggagatcgccgaaggtctggttgagcgccatattccagtgctgatctccaatcacgatacgatgttaacgcgtgagtggtatcagcgcgcaaaattgcatgtcgtcaaagttcgacgcagtataagcagcaacggcggcacacgtggacgaactgctggctttgtacaaaccaggagtcgtttcacccgcgaaaaaataattctcaaggagaagcggatgaaacagtatttgattgccccctcaattctgtcggctgattttgcccgcctgggtgaagataccgcaaaagccctggcagctggcgctgatgtcgtgcattttgacgtcatggataaccactatgttcccaatctgacgattgggccaatggtgctgaaatccttgcgtaactatggcattaccgcccctatcgacgtacacctgatggtgaaacccgtcgatcgcattgtgcctgatttcgctgccgctggtgccagcatcattacctttcatccagaagcctccgagcatgttgaccgcacgctgcaactgattaaagaaaatggctgtaaagcgggtctggtatttaacccggcgacacctctgagctatctggattacgtgatggataagctggatgtgatcctgctgatgtccgtcaagcctggtttcggcggtcagtctttcattcctcaaacactggataaactgcgcgaagtacgtcgccgtatcgacgagtctggctttgacattcgactagaagtggacggtggcgtgaaggtgaacaacattgcgcgaaatcgctgcggcgggcgcggatatgttcgtcgccggttcggcaatcttcgaccagccagactaccaaaaaagtcattgatgaatgcgcacgattcagaaagcggtccagcaatgcgttggacctgtcgtccatcactttag

SEQ ID NO: 140148 - DNA, 1263 bp, Homo sapiens
gcctgggcgcgtcaggaccgtcgactcagcgtaaaacaatggggtaaaccgcccgttgatgagaccattccggcaaaagaacaggtacgtattctgcgtaaactgttcgatcgctattatggcgaggttgccggaagaggggacggtttttgttccccgcacgttgcccgatacgttgggcgcgttgcaggttaaaggccctgccggctagggcctggtcacccaacaaaccgaacgccgttcgtcgcgccgctgctcgaagccttagatatcgccaaatacttcagcgtggtgattggtggtgatgatgtgcaaaacaaaaaaccgcatccggacccgctgttactggtggctgagcggatgggaattgccccacaacagatgctgtttgtcggcgactcacgcaatgatattcaggcggcaaaagcggcaggttgcccatcagttggcttaacctacggatataactacggcgaggctatcgatctcagccagcctgatgtaatttatcagtctataaatgaccttctgcccgcattagggcttcccatagcgaaaatcaggaatcgaaaaatgactaagcccatcgtttttagtggcgcacagccctcaggtgaattgaccattggtaactacatgggatgcacagaagctgatcgccagttcgcctttaactttaacaacttcgtgctgattcaactgttaaccaacggcggcccggatcgtcttggcacgaccacgccagccggttataccgacctgcttgttaactacacctaccgcatcgcttttgaaggcggcgggggtcaggacttcggtctggcggcagcaattgccacgctgatcttcctgctggtggcgattatgttcccgctgctgatggtcgtcgctatctcgctgcgtcagggaaactttgcgaccggcagcctgatcccggagcaaatctcctgggatcactggaaactggcgttaggttttagcgttgaacaggctgatggtcgcattacgccaccgccattcccggtactgctgtggctgtggaactcggtaaaggtcgccgggatttccgcgattggcattgtggcgctctccaccacctgcgcctacgctttcgcccgtatgcgctttccaggcaaagcgacgctgctgaaaggaatgctgattttccagatgttcccggcagtactttcactggtcgcgttgtatgcgttgtttgcaccgcgcgtgcgggcggcattgtgttaccgatcatcaacagcgtga

SEQ ID NO: 140149 - DNA, 3243 bp, Homo sapiens; identical to SEQ ID NO: 138577

SEQ ID NO: 140150 - DNA, 1386 bp, Homo sapiens
ctataggttttctctcgtccggtgtggcaggggcgggtatcgcgtgtctccccactgtcccggttgggttgtcgtcagccggcttgtacgggggtatacgcctttcgtcccgtagtacttgcgtttgaggggtgtaccgtttacgcgtcgcatattgttaaaggtatggaccccaagcctcttagtgcacctgggtccctgtgggtttcggccaacccgggttccatgttgggcccaggggttcggtcttgcccctgtcccctttcggggcccaaggggggggcacggtggacaacaacacactttcaaggcggaacggcgcacgggtggggctcccataaggacgcccgtgggatcgcgctccacgcggaccaccacccccgcacgtgttgaaccgactgtctttgtcccacatccttccgcacgcatctcacgtgtcacagcaaaatcgatcacgaaagagtctaaatcaaaacccgtggtcaccaagtaagcaacgcgattgcggcatggcgttacatccgtgggtggcgatggcggtttacagctaaccgtgatggataagctggatgtgatcctgctgatgtccgtcaccctggtttcggcggtcagtctttcattcctcaaacactggataaactggcgaagtacgtcgccgtatcgacgagtctggctttgacattcgactagagtggacggtggcgtgaaggtgaacaacattggcgaaatcgctgcggcggcgcggatatgttcgtcgccggttcggcaatcttcgaccagccagacgcccgttgatgacgacatccggcagaagaacaggtacgtattctgcgtaaactgttcgatcgctacttggcgaggttgccgaagaggggacgtttttgttcccgcacgttgccgatcgttgggcgcgttgcaggctaaaggcctgccgctaggcctggtcaccaaaaaccgacgccgttcgtcgcgccgctgctcgaagcctgcgcgacggccctgtgcctgcaacaggtcctgagaaacagctccgcaggcgctcttggaagatacaaccctgtctggcagagcagcctcgcacttgcgttccaggcctgaatagcagccccacaggctgcccctggcacacatgccctcagactggtggagcagtttgcacccatgtcccaagcctgagaaatagccccaagggccacccctggcagcacacccccaggacagccgagcaactgcgtacacatgctcctggtcaagtaacaacccatagccccaacaccagctccaagttggcagacccactgggcacacatatgctcctaacataagaaacagccttgtgagcccaccctcgcaaagctggaccaccgccaccataaagtctctcat

SEQ ID NO: 140151 - DNA, 3003 bp, Homo sapiens
atgagagctctcttctctgacatccaggctctgggcatctctcaaaaagagatggtcaaagaatctgatgaggatgcctgcaagttttcctggaatttgatgcaaatacgaggctatgctaaagccattcagcaagctgtaggagccccaagtggagaaactcaaactagttcacaggagcaaacatcatgcagctccctccaaggctacatcactcgtgggttgtggtgtttctttgtggaagtccccaagctcttaggctggcgcaccaagcacccagctcatgaaagggtccgggtcgtggccctcatcgtgcagcagccattggcaggcagcatcagagagtggttacagcaaggacatggaatcagacagctcgggcctggacccaccactctgccagcctacctgggcagcagtgtggatgagggtgacccacttaacctctttgagactcaagcagctgcgctggttggacttcaaaggaagcaggaaaacagctcagatatcttctttagctctcctttcacggtgaccccagacgccctaccaacagccattacatgggagcacattccgtttgcaaagctggcgggtctaattgcagggcctttggtggagatgtgcaggcagaggctaagcaaagagtttgaggccttgaaaggggaattcagggacctcgggcactgtcttccaggagcccaaaaaccggaggttacagaactcgcaaccattgttatagccgtgtccccaccagaaaacgacggcgagcgaatccgcaaacatggtaacaggtgttccccgaccggaaaacgacggccagcgaaaccgcaatcacggtcaaagattgtgtacttgtcgctcctcgtagttaagtcgaagaatgtggttatcgggtatccacgtgatatagcatcgtgcgccacagttggctcatcagccatacttcgcattctgctgaagcacgtgatacatcatacgcgtagatgctgcgtatccgctgctatatacatcacgcgtgtgcgcaatcactacgctgcacttcacggcattgctcactatagcgcatatactcgataccatgtagccgctcacatctcatattgccacttctatcgtcggacatgcatccatggcagtatctcttcgacgtatctcgtatcgcatcgccactgtctgtgtgacttgacatactatacgtatctctcatcacttagagctatactgtacgaattcgctagctcgtcgctagcgtattgcactactcatgactcgtacatccgccactcgcgatgtggtcatgcgcgctatccagtagtcgtgattcgcgcatctgcctcctcgcgacttgagcatctagtgacatcgtgtacttgttcgccagcgctgaagaatcctccatgccgccttcgaagcagtgttgaccgaattgctctgaataccatggctttccggacgcgcaaaagatatgggatccgctgcgggggcggaatgaaagcgttaacggccaggcaacaagaggtgtttgatctcatccgtgatcacatcagccagacaggtatgccgccgacgcgtgcggaaactccgcagcgtttggggttccgttccccaaacgccggctgaagaacatctgaaaggcgctggcacgcaaaggcgttattgaaattgttttcggcgcatcacgcgggattcgtctgttgcaaggaagaagaagaaaggttggccactggtaaggtcgggtggctgcccgttgaaacacttctggcgcaacagcatattgaaggtcattatcaggtcgatccttccttattcaagccgaatgctgattgtcctgtgcgcgtcagcgggatgtcgatgaaagatatcggcattatggatggtgacttgctggcagtgcataaaactcaggatgtacgtaacgatcctttactggtgccgctgtttaccctgattcgtgaggggaaactggctgcgaactggccactggagcaggatgagttgctgacacgtttgcagaaaagctgtgatatgacgcaagtctctgccgattacaatgcgttgtttatcggcgatgaatgtgctgtgccgccatatcgtagcgcatgggttgagggcgcgacggaagcggaagtgcgcgcttttctttctgagcgagggatgccattagcggatacgccagccgatcacatcggcacattgctgctcgcagcttcctggctggaagatcagtcaacggaagatgagagcgaagcactggaaacactgttcaaaaggggcgcccccccaagtccctgtgcctgtggggaaaggccccggcccctcatgggagccccgtcggggggttttccaaaggccccaagacgtgggcgccccacgagggggcgtcttaaattcgaaaaaacgcccggcagcagactagatcatccacggtcgaattccgccttcgttagcaacgaagggacccggcgtcgctttacgcccaacgcgatcgccaaaatggccaaaaacggcagagccaatggggcgcgcgacgaaggcgatggcgaagggacaccctaccttgtgtaccctatcgacgttacctacatccttgaaggaccagtgtttccaccggctggattccatcatgacgagttcagcccccaagggtcgtcgatatcatcaacgatcggcgttgtgcaccgcgcgactacttccggcactcagtgcgcaaatgttgcgcaaatcacggctacactttccaaggtgacagccagcctacagggctctctatatccaactcattcggagtcgagcatctccacgagagtatcaggctcatatgcttctgctcgtcagccaatcagtcgtggttgtagcggccgactagtaacagccagattcgcgccaaatctgacaggcagaatagagcattgccgtcaatggatccaccactcgactatgcgctgcagagcttgcgatagctcgtcgcgcgaatgccctgtgagagaaactgctagctag

SEQ ID NO: 140152 - DNA, 657 bp, Homo sapiens
  misc_feature (1)...(657): n = a,t,c or g
atggcatcctcaaatacatttgaaataatcgaaaggttcgcggcaactatcgcagcggtacaatgctttgcaggccgtggaaccaaattcactgataagtgtggtatggacgctggcgcagcgcgggcaacgtacttctggcggcaaatgggcatggcaactgtgtccggcgggcgggctaatgccatactctcgcagacgctcacgggcatcgggggtcatccagtcggtggtccatgccgggtcgagttgcagcacaacctgaacgggggtaaacccgttggttgtcattgcctcacgtatcgcgccaatcaaatgttccgttgccggacaaccggaatatgtcggcgtaaagccgatcacccatccttctcccatctgtgtcacattacgcaggggatctctgaaggctactcaaaagcggcnagtggtatgcgccagcgggtaatgattgcgctggcattctcctgcgagccgcaattgattattgccgacgaaccgactacggcgctggacgtcacggtgcaattgcaggtaaggcacatcgactcgggaacaactaccactgtgattttgaacaagccccttgacgtcgctaagcctgtttcttcatctctaaaatcaaataatgtgcaaaaagtacttaacaatggctga

SEQ ID NO: 140153 - DNA, 480 bp, Homo sapiens
ttaagggacccagccaaggacacgggaaacggggtacaaccaccatgtccaaaaaacccctggtgaaaattcctgtgtcgccccccgattattcggcccccgaaaactttcaatacgctcatagtgctggcgcgtcggtgcatacagtgctttcgctttttcgatatcgcctgctttaatcgcgtcggtaaaggctttggtgtcggtcaccagctgcgtggtttccgccatgacatacgtggattcgcccaatggacccatttgcctgacggctgcgcttttcgcgatcgttgctatgcggcaggtgcacagtgtgaaaacgtcccggcgctgacagcgtgtggtgacaacaaccagcgctgtgcctgttggtatccgcagcaggaggttataagtgtctgacacgttattaacgttacgcgacgtccatatcaatttcccggcccgtaaaaactggcttggtaaaacggtgtggcgcat

SEQ ID NO: 140154 - DNA, 1198 bp, Homo sapiens
tgcttgacccgaaagcaggaggaaagcagtcatgacccaacccgttctggacattcaacaactgcatttgagtttccccggttttaacggtgatgttcacgcgctcaacaatgtgtccttgcagattaaccgcggtgaaattgtcggtctggtgggagaatccggctcaggtaaatcagtcaccgcaatgctgattatgcgtctgctaccgacgggcagttattgcgtacatcgggggcagatttccctgctgggagaagatgttcttaacgcgcgggaaaaacagcttcgtcagtggcgcggccacgagtggcgatgatctttcaggaaccgatgaccgccctcaatccgacacgtcgaatagctcttcagatgatggacgtgatccgccatcatcaaccaataagtcgtcgggaagccagagctaaagcgattgacctgctggaagagatgcaaatcccggatgccgtggaagttatgtcgcgctatccgtttgagctttcaggtggtatgcgccagcgggtaatgattgcgctggcattctcctgcgagccgcaattgattattgccgacgaaccgactacggcgctggacgtcacggtgcagttgcaggtactgcgtttgcttaaacataaagcccgcgccagtggaactgcggttctgttcatcagccatgatatggccgtggtgtcgcaactgtgcgatagcgtttacgtgatgtatgccggaagcgtaattgaaagcggcgtgacggcagacgttatccatcatccccggcatccgtataccattggtttgctgcaatgcgcaccagaacatggagtaccacgccagctattacccgccattccagggacggtaccaaacctcacccatttgcctgacggctgcgcttttcgcgatcgttgctatgcggcaggtgcacagtgtgaaaacgtcccggcgctgacagcgtgtggtgacaacaaccaacgctggggcctgttggtatccgcagcaggaggttataagtgtctgacacgttattaacggtacgagacgtccctattattttccggccggtaaaactgggttgggaaaactacggaacatggtcatgcctttaaggggatggatttacagaaccctttaaagtcgacctgaagggctgccagcttgggcactgggcctcggttaaaaacgtctggaatgggaaaaa

SEQ ID NO: 140155 - DNA, 310 bp, Homo sapiens
ctataagtaggctaaacacccagcagcattttggataacgaacacggcaaatttcaccacattcacctcagggatgtagtcgttgcccattgcattcatgaggcccgctgaaagggcagtgtttcccagcgccttcctggtatgcgattctgactgttcgatatattcactcagcaaccccggtatcagttcatccagcgcggctgctttgttcatggctttgatgatatcccgtttcaggaaatcaacatgtcggttttccagttccggaaaacgccgctgcaccgacagggggatcccgtcgagaata

SEQ ID NO: 140156 - DNA, 1470 bp, Homo sapiens
atggcttcaatcttgatggtattggtctgttcagtgttggtgttgctcgcagccgtgccaggaatcgcagcgcaactgtggttttttggttggggtactctcgttcagatcctgttggcatcggttagtgctctgttagccgaagctctcgtactcaaactacgcaagcagtcggtagccgcaacgttgaaagataactcagcattgctgacaggcttattgctggcggtaagtattccccccctcgcgccatggtggatggtcgtgctgggtacggtgtttgcggtgatcatcgctaaacagttgtatggcggtctgggacaaaacccgtttaatccggcaatgattggttatgtggtcttactgatctccttccccgtgcagatgaccagctggttaccgccacatgaaattgcggtcaacatccctggttttatcgacgccatccaggttatttttagcggtcataccgccagtggtggtgatatgaacacactacgcttaggtattgatggcattagtcaggcgacaccgctggatacatttaaaacctctgtccgtgccggtcattcggttgaacagattatgcaatatccgatctacagcggtattctggcgggcgctggttggcaatgggtaaatctcgcctggctggctggcggcgtatggttgctatggcagaaagcgattcgctggcatattcccctcagcttcttagtaacgctggcgttatgcgcaatgttagcacgtttgaccacctcccgggagatgcacctcggtgcggttaatcgtgccggtgaagagcgtttcatgggcaatcaactgattctggttgtccagatacaacacccggaactcttcccgctcaagcgcggccatatgcagtcgcagccattcacgtacggcgtgggtagaggtgaaggctacgccgggctcatgcaggtggcggtccagagccctgagcgcccgctgaatgagacgtgtgcatcgacctgctttttggccaatggatggtcacgccgacaggccagcacgaacggctcgttgaccagtggggtaaaatcaatggatgaatttgtgacgttgttcatgtttatgccaaagtctgattcgttacacagcaccgattccatgcaattattcgtgccttgtatcgacgaagttgaagccgtccttaagcggatccaacggtttgatccggtcggtgtggcggcaaaagatctgcgtgactgtctgctgatccaactctcccaattcgataagaccacgccgtggctggaagaggccagactgatcattagcgatcatctcgatctgttagccaatcacgacttccgcactttaatgcgcgtcacgcgtctgaaagaagatgtgctgaaagaagccgtcaatctgatccagtcgctcgatccgcgccccgggcagtcgatccagactggcgaacctgagtatgtcattccagatgtgctg

SEQ ID NO: 140157 - DNA, 3258 bp, Homo sapiens; identical to SEQ ID NO: 130057

SEQ ID NO: 140158 - DNA, 648 bp, Homo sapiens
ctacaccacattcacctcacggatgtagtcgctgcccatctcattcatgatggcccgctgaaagggcagtgtttcccagcgcccttcctggtatgcggattctttcgggagatagtaattagcatccgcccattcaacggcggtctgtggctccggctgttcgatatattcactcagcaaccccggtatcagttcatccagcgcggctgctttgttcatggctttgatgatatcccgtttcaggaaatcaacatgtcggttttccagttccggaaaacgccgctgcaccgacagggggatcccgtcgagaatactggcaatttcacctgcgatccgcgacagcacgaaagtacagaatgcggtttccaccacttcagcggagtctctggcatttttcagctcctgtgcatcggcctgcgcacgcgtaagtcgatggcgttcgtactcaatagtccctggctggagatctgtctcgctggcctgcagcagttcttcaacctcccggcgcagcttttcgttctcaatttcagcatccccttgccaccgcctcgcagaacgggcattccctgttcctggcagttctgaatggacggatactcgcacccgaaatgtcagccagctgctttttggttgacttccattgcacat

SEQ ID NO: 140159 - DNA, 2960 bp, Homo sapiens
atgcaagagagtgccgcccaaagtacccccaaaagccccatacgccagcccatgcgttgcgtttttattgacggagacatacccatgacaacacagacgcagcacgacctcgcacccgctaaccaacccgaatttgaactgaccgtcacgccggtccccgatgaacagcgtatcgatttctggccacagtactttggcgctatcccgcagtggctactcctggagccgcatatcttcgcctggatggaccgcttctgtgagggctacagcggtggtatctggtcgttctacaccctcagcaatggcggcgcatttatgtcccccgagcctgacaacgatgagacatggcgtctgtttaactgcctgaacggtaacgatgcccaaatgagtgcagaagcagcaggtattgctgtctgcctgattgcgtatagccaccatgcctgccgtacagaatgtgacgcgatgaccgcacactattaccgctgcgggaccttcacctctacccacgccgtacgtgaatggctgcgactgcatatggccgcgcttgagcgggaagagttccgggtgttgtatctggacaaccagaatcagttgattgcccatgaaacgctcttcaccggcacgattaaccgcaccgaggtgcatccccgggaggtggtcaaacgtgctctgcacttcaacgcggcggcggtgatactcgcgcataaccatccttccggcgagacgacacctagccaggccgacaaaaccctcacgcagcgactggttcaggcaaatctattcgttcgcagaacacggtctgctttgaggtattacatgaaaattatcagtaaacgcagggcaatgacgatataccgccagcatcctgaagtccgaatctttcgctactgcaccggcaaataccagtggcacggtagcgtctgtcattacaaccctgcctgggggttgacccggaaactacgcctgttgcaccgctaccttctgccagcgttttgcctgtgccgtctactgctcatcagttgctgatacgctgccaggcgttacttattcaactgctccataacggctggcgctatcaggaacagagtgctattgaagaatcgaagaaattcagcgccaatctgaacggcactgaaattgccattacctatgtctacaaaggccatggggaggctgcaaatggagctggagaggcacagcgttttgaaggcttcaagggcttcatcatcggtaatagacacgtaatcagcgcgtccagtgctgttaagatacgcgtgttgtgggccgacagacgggaaatccagtccggcggagatggacggtgcgccgtgctcgccagtttcgataccgtgaccacctggctccacaccaatcaggccgacgttggtttcattgatgaaatcagcaaacatgccgatggcattcgaaccgccgccaacacaggcgataacggcatccggcaggcgacttatctttccgacctgcaggcatgcaaacttcgccgagccacatgcagcacagataaaacccgtcttgccttcgctggcctgaaattcggtgactacggctccatcgattacggccgtaactacggtgtagcatacgacatcggtgcgtggactgacaattcgtgtggtgacacttggactcaaaccgacgtgttcatgactcaacgtgcaactggtgttgcaacctatcgtaacaacgacttctttggtctggttgatggtctgaactttgctgctcagtaccaaggcaaaaacgagcgtgacactgcacgccgttctaacggcgacggtgttggcggttctatcagctacgaatacgaaggctttggtatcgttggtgcttatggtgcagctgaccgtaccaacctgcaagaagctcaacctcttggcaacggtaaaaaagctgaacagtgggctactggtctgaagtacgacgcgaacaacatctacctggcagcgaactacggtgaaacccgtaacgctacgccgatcactaataaatttacaaacaccagcggcttcgccaacaaaacgcaagacgttctgttagttgcgcaataccagttcgatttcggtctgcgtccgtccatcgcttacaccaaatctaaagcgaaagccgtaggacgtatcggtaatgtgaccaaggccattacaagctattaccccccaattgggtttaatcttcccggcgccgataaacgagccgctatttataaccgtctccgcagttacgggcggtttcatgttacgtatgaatggttgcgtctcgaagaccgcacgagccatagcggagagctaccgtcaggcggcaaatcctttaccgtcaatttcgctaaacctggcaactacaatctgacattacgcgataaagacggcttaattctcgctgggttaagtcatgccgtcagcggtaagggcagcacggcgcatactggtacggtagatatcgtggcggataaaacgctgtaccagccaggcgaaaccgcgaagatgctgattacctttccggagccaattgatgaagcattattgacgctggaaagcgatcgcgtggaacagcagtcgctgctttcgcatccggcaaactgcgtaacgctacaacgtttaaacgatacccagtatgaagcccgggttccagtgagcaattcctttgcgcctaacatcactttttcggtgctgtatacccgtaacggtcagtacagttttcagaacgccgggatcaaagttgccgttccccagctggatatccgggtgaaaacggacaacccccatccccagcctggtgaactggtcaatgtcgaattaacctcgtcgctgaaaggtaaacctgtttctgcgcagctaacggtaggcgtggtcgatgaactttatatctcggttatggataccacagcaattattactcccggtgttacggttttggttattaagacgaatccaggaacctgttaa

SEQ ID NO: 140160 - DNA, 2108 bp, Homo sapiens
atgacgccacaggaccggcgtctcattcagcgggcgctcagggctctggaccgccacctgcatgagccccgcgtagccttcacctctacccacgccgtacgtgaatggctgcgactgcatatggccgcgcttgagcgggaagagttccgggtgttgtatctggacaaccagaatcagttgattgcccatgaaacgctcttcaccggcacgattaactcgaccgagcccccactccctccattcaatcacccatccatccccagcgcggtccagcccgtgacgggagagcctgaagcagaaggtgggggggcgtccacagctgtcccccttccccccccccgacagctgggcactggaccctggagggggaagggcacgggaaactcctcgaggggtttcaaacgccaccaaggagcccatctctgtcgctcagcatggcaatgtggcgataaagagatccgccgtgagttaaagtactacgcgcatcttggtcgccggttaaaagactggagtggaataccgcgctatcacggtaccgttgagacggattgcggaaccggttatgtctacgatgtgattgcagattttgacggcaagccttccattacgctgaccgaatttgctgaacaatgccgttacgaagaagacattgcacaactgcgccagctactgaaacagctgaagcgttatttgcaggataaccgtatcgtgacgatgtcgctgaagccgcagaatatcctctgtcaccgcatcagtgagtcagaggttatcccggtcgtctgcgacaacattggtgaaagcacattgattccactggcgacctggtcgaagtggtgttgtctgcgtaagcaagagcggttatggaaacgatttatcgcccaaccggcgctggctattgccctgcagaaagatctgcaacctcaggctacagaggccagcggtgcggaaaacatggcctcgatcgcatctggcaacattgcccggacagatccagacatgttgtccatccctttgtccaagaagatctgctgctttggcgaccgcatcatcgaaatccccgagactatagaccagcccgttaggttttgggtcctgaccggtccagtcgtggacatgggcatttatgcctgctatcttagcagcccgcaatggggatggtatgccgaaagggatgctgaaattgagaacgaaacagtgcgccgggaagttgaagaactgcggcaggccagcgagacagatctccagccagggactattgagtacgaacgccatcgacttacgcgtgcgcaggccgacgcacaggagctgaaaaatgccagagactccgctgaagtggtggaaaccgcattctgtactttcgtgctgtcgcggatcgcaggtgaaattgccagtattctcgacgggatccccctgtcggtgcagcggcgttttccggaactggaaaaccgacatgttgatttcctgaaacgggatatcatcaaagccatgaacaaagcagccgcgctggatgaactgataccggggttgctgagtgaatataaccgcgctgacagacaatacgcagggggcagcagagttgccgccaggtttgctgcttccccacgggtcgcggtcttgtccgttattaccgggctgattccacgccatgtttgtgctccatatttgttatgcggtgatccctgttgtctttcgacgccagaggatatgactccacgcttcagacgctacgccgttagatcaggtaatcgatcaacgccgggtcttgaccacagatgcgacgcctgccaacgatcggcatacgaacttgcagacttacgctgccgtcctcctccatccactctttttctattgcctgaagctgataaaaacgacttctcagacgcccttcctgcggtggcagacgcaatgtatgctgcgccacctcgccggaaagccgctccgtcaaagcctgaaaaagctgtggtatccccgctccggtctgtgcggaaagccagacacggttcggtttgttctcttcgtcccgatcaatacgcggttcgaaatcttccagcatatcgatcttgttcatcaccagacctgcagtttatggtctggtgtgcgctggctga

SEQ ID NO: 140161 - DNA, 2883 bp, Homo sapiens
atgagcaagatcaaaacgctactgcaatacagcccatccagcaccaactcccagccgtggcattttattgttggcagtaaagcgtttgttgaatcggtgcgggcagaacaccccgatgcccggcaccattgcgtggcgtgggtcgcgggtgcgccggatgattctcaacagctgggtttctctgacgacggggagccggcgggaacggcaggtaaaccgatgctcgcccagctaatgggcagcggcgtcggggaaattaccgctgtggtagtgcgctactacggcggcatattgcttggcaccggtgggttagtgaaagcgtatggcggcggcgtgaatcaggcgctgcgccagctaacgacccaacgcaagacgccattaaccgaatatactttgcaatgtgaatatcatcagttaaccggcattgaagcgttgctggggcagtgtgacggcaaaattatcaacagtgattatcaggcattcgttctgctgcgggtggcgcttccggcggcgaaagtggctgaattttccgcaaagctggcggattttagccgtggttcattgcatgcgccggccagactagcgtcgatatcagcaggatgtagattcccgacgcaagatcggtccaaaagcatgatgaactgctcctacggcgcaatggttcccgctatcaccaaaaaccccaacgaacgcgcctcactggcggcatggcgtcagggcggcgctacgctgggcctgctgctgtgcacggtgggattcgtgccagttatgaatcttatcgaaggtaatcagcaacttggctatatcttcgccgccacgctgttttcactgtttggcctgctgtttatgtggatctgctactcgggcgtgaaagagcgttatgtcgaaacccagcctgctaatccggcgcaaaagccgggcctgctgcaatctttccgcgcaattgcgggtaaccgcccgctgttcattctgtgcattgccaacctctgcactttaggggcgtttaacctcgccatccaggtctattacacccagtacgtgcttaacgatcccatcctgttgtcgtatatgggatttttcagcatgggctgtatttgcatcggcgtattcctgatgcctgcctcagtcagacgttttggcaagaagaaagtttatatcggcggcctgctgatttgggtgctgggcgatctgctcaactatttcttcggcggcggttcggtcagcttcgtggcgttctcctgcctggcgttctttggctcagcgtttgttaacagcctgaactgggcgctggtttccgacaccgtcgagtacggcgagtggcgcaccggcgtgcgttcggaaggaacggtctacaccggttttaccttctttcgcaaagtgtctcaggcgctggctggtttcttccccggctggatgctgacgcaaattggctatgtgccgaacgtcgcacaggctgaccacaccattgaagggttacgccagttgatcttcatctacccaagcgcactggcggtagtcaccattgtggcgatgggttgcttctacagcctgaacgagaagatgtatgtccgcattgtggaagagatagaagcccgtaaacgcacggcgtttcttccagcgccattggctttcaacgtaaacatttacgccgagtttgcgtccggctttttccagatattccgcagccatataggtgtgagcaatacccgccggacaggccgttacgcagacgatagttggcgcgttggaaaaagaggcagaaggttgcgtgcctcccttgtcatccagcgccgagagcaactcatcaggcgtcgtcgccgactgtatacgcgcccgaatctcatcatccgcaaggcgcgtggtggctcctgcgcctgcgccggctcctgcaagtgcaaaaagtgcaaatgcacctcctgcaagaagagtgagtgcggggccatctccaggaatctggggctgtggctaaggctacttgattctatagaaacagaaaaaggcaaacgcagccttttctacattttcagagtaactcccgtcagttgcgagcaaaaaagccgctacgctttagctatacgtgctaattcaagagaagagaccatggacaacgacaaaattgatcaacacagcgacgaaattgaagttgagagcgaagaaaaagagcgcggcaaaaaaatagaaatagatgaagaccgactcccctcccgggcgatggcaattcatgagcatatccgccaggatggtgaaaaagagctggacgcacgcatagcgctgggtgtcgagaatattatcgaaagctgcacggtcgttagccgccagggcaaagatgccgacatcatgatcatcggtggtatcccggacaaactgaaagacgataagcagatcgacctattggtgcaggcgaccgaaagctgggtgaaaacaccgatgcgccagaccccgttccccggcattgtgccggacgagagcgatcgcgcggcagaaacccggtcaacgctgacctcttccggtgcgatggcggcggtgattggcttccagtcgccgtataacgaccagcgcagcgtgattgcgctgttggcagatagcccacgcggttatgaaatgcttaacgatgcggtgaacgatagcggcaaacgcgccaccatgttcggttcggtcgcggtgatccgcgagtccggtatcaacagcctacgtgttggcgacgtttattacgtaggtcatctgccgtggttcgagcgcgtgtggtatgcgctggcaaaccatccgattctgctggcggtgctggcggctatcagtgtgatattgctggcatgggtactgtggcgtctgctgcgaattattagtcgtcgtcgtcttaacccggataacgagatctatgagtga

SEQ ID NO: 140162 - DNA, 5116 bp, Homo sapiens
ctcctccccatcctctccctctgtccctctgtccctctgaccctgcactgtcccagcaccatgggacccacctcaggtcccagcctgctgctcctgctactaacccacctccccctggctctggggagtcccatgtactctatcatcacccccaacatcttgcggctggagagcgaggagaccatggtgctggaggcccacgacgcgcaaggggatgttccagtcactgttactgtccacgacttcccaggcaaaaaactagtgctgtccagtgagaagactgtgctgacccctgccaccaaccacatgggcaacgtcaccttcacgatcccagccaacagggagttcaagtcagaaaaggggcgcaacaagttcgtgaccgtgcaggccaccttcgggacccaagtggtggagaaggtggtgctggtcagcctgcagagcgggtacctcttcatccagacagacaagaccatctacacccctggctccacagttctctatcggatcttcaccgtcaaccacaagctgctacccgtgggccggacggtcatggtcaacattgagaacccggaaggcatcccggtcaagcaggactccttgtcttctcagaaccagcttggcgtcttgcccttgtcttgggacattccggaactcgtcaacatgggccagtggaagatccgagcctactatgaaaactcaccacagcaggtcttctccactgagtttgaggtgaaggagtacgtgctgcccagtttcgaggtcatagtggagcctacagagaaattctactacatctataacgagaagggcctggaggtcaccatcaccgccaggttcctctacgggaagaaagtggagggaactgcctttgtcatcttcgggatccaggatggcgaacagaggatttccctgcctgaatccctcaagcgcattccgattgaggatggctcgggggaggttgtgctgagccggaaggtactgctggacggggtgcagaacctccgagcagaagacctggtggggaagtctttgtacgtgtctgccaccgtcatcttgcactcaggcagtgacatggtgcaggcagagcgcagcgggatccccatcgtgacctctccctaccagatccacttcaccaagacacccaagtacttcaaaccaggaatgccctttgacctcatggtgttcgtgacgaaccctgatggctctccagcctaccgagtccccgtggcagtccagggcgaggacactgtgcagtctctaacccagggagatggcgtggccaaactcagcatcaacacacaccccagccagaagcccttgagcatcacggtgcgcacgaagaagcaggagctctcggaggcagagcaggctaccaggaccatgcaggctctgccctacagcaccgtgggcaactccaacaattacctgcatctctcagtgctacgtacagagctcagacccggggagaccctcaacgtcaacttcctcctgcgaatggaccgcgcccacgaggccaagatccgctactacacctacctgatcatgaacaagggcaggctgttgaaggcgggacgccaggtgcgagagcccggccaggacctggtggtgctgcccctgtccatcaccaccgacttcatcccttccttccgcctggtggcgtactacacgctgatcggtgccagcggccagagggaggtggtggccgactccgtgtgggtggacgtcaaggactcctgcgtgggctcgctggtggtaaaaagcggccagtcagaagaccggcagcctgtacctgggcagcagatgaccctgaagatagagggtgaccacggggcccgggtggtactggtggccgtggacaagggcgtgttcgtgctgaataagaagaacaaactgacgcagagtaagatctgggacgtggtggagaaggcagacatcggctgcaccccgggcagtgggaaggattacgccggtgtcttctccgacgcagggctgaccttcacgagcagcagtggccagcagaccgcccagagggcagaacttcagtgcccgcagccagccgcccgccgacgccgttccgtgcagctcacggagaagcgaatggacaaagtcggcaagtaccccaaggagctgcgcaagtgctgcgaggacggcatgcgggagaaccccatgaggttctcgtgccagcgccggacccgtttcatctccctgggcgaggcgtgcaagaaggtcttcctggactgctgcaactacatcacagagctgcggcggcagcacgcgcgggccagccacctgggcctggccaggagtaacctggatgaggacatcattgcagaagagaacatcgtttcccgaagtgagttcccagagagctggctgtggaacgttgaggacttgaaagagccaccgaaaaatggaatctctacgaagctcatgaatatatttttgaaagactccatcaccacgtgggagattctggctgtcagcatgtcggacaagaaagggatctgtgtggcagaccccttcgaggtcacagtaatgcaggacttcttcatcgacctgcggctaccctactctgttgttcgaaacgagcaggtggaaatccgagccgttctctacaattaccggcagaaccaagagctcaaggtgagggtggaactactccacaatccagccttctgcagcctggccaccaccaagaggcgtcaccagcagaccgtaaccatcccccccaagtcctcgttgtccgttccatatgtcatcgtgccgctaaagaccggcctgcaggaagtggaagtcaaggctgccgtctaccatcatttcatcagtgacggtgtcaggaagtccctgaaggtcgtgccggaaggaatcagaatgaacaaaactgtggctgttcgcaccctggatccagaacgcctgggccgtgaaggagtgcagaaagaggacatcccacctgcagacctcagtgaccaagtcccggacaccgagtctgagaccagaattctcctgcaagggaccccagtggcccagatgacagaggatgccgtcgacgcggaacggctgaagcacctcattgtgaccccctcgggctgcggggaacagaacatgatcggcatgacgcccacggtcatcgctgtgcattacctggatgaaacggagcagtgggagaagttcggcctagagaagcggcagggggccttggagctcatcaagaaggggtacacccagcagctggccttcagacaacccagctctgcctttgcggccttcgtgaaacgggcacccagcacctggctgaccgcctacgtggtcaaggtcttctctctggctgtcaacctcatcgccatcgactcccaagtcctctgcggggctgttaaatggctgatcctggagaagcagaagcccgacggggtcttccaggaggatgcgcccgtgatacaccaagaaatgattggtggattacggaacaacaacgagaaagacatggccctcacggcctttgttctcatctcgctgcaggaggctaaagatatttgcgaggagcaggtcaacagcctgccaggcagcatcactaaagcaggagacttccttgaagccaactacatgaacctacagagatcctacactgtggccattgctggctatgctctggcccagatgggcaggctgaaggggcctcttcttaacaaatttctgaccacagccaaagataagaaccgctgggaggaccctggtaagcagctctacaacgtggaggccacatcctatgccctcttggccctactgcagctaaaagactttgactttgtgcctcccgtcgtgcgttggctcaatgaacagagatactacggtggtggctatggctctacccaggccaccttcatggtgttccaagccttggctcaataccaaaaggacgcccctgaccaccaggaactgaaccttgatgtgtccctccaactgcccagccgcagctccaagatcacccaccgtatccactgggaatctgccagcctcctgcgatcagaagagaccaaggaaaatgagggtttcacagtcacagctgaaggaaaaggccaaggcaccttgtcggtggtgacaatgtaccatgctaaggccaaagatcaacttcacctgtaattaaatttcgaccttcaaggtcaccattaaaaccaggcaccgggaaacaggaaaagaggcttcaggatggccaaggaacatttggttcctttgaggttttgttaccgggtaccgggggagaccagggatgccactatggtctatattgggacatatccatggatggactgggctttgctccaggacacaggttgaccttgaaggcagcctgggccaatggtgttgacagatacatctccaagtattgagcctggacaaaagccttctccgataggaaccaccctcattcatcttacctgggacaaggtcttcacactcttgagggtggactgtcttagcttttcaaagtttcaccattacttttaattgttaggagcttattcccaggcttgggggccagttcaaggtctacgcctattacaacctggaggaaagctgtacccggttctaccatccggaaaaggaggatggaaagctgaacaagctctgccgtgatgaactgtgccgctgtgctgaggagaattgcttcatacaaaagtcggatgacaaggtcaccctggaagaacggctggacaaggcctgtgagccaggagtggactatgtgtacaagacccgactggtcaaggttcagctgtccaatgactttgacgagtacatcatggccattgagcagaccatcaagtcaggctcggatgaggtgcaggttggacagcagcgcacgttcatcagccccatcaagtgcagagaagccctgaagctggaggagaagaaacactacctcatgtggggtctctcctccgatttctggggagagaagcccaacctcagctacatcatcgggaaggacacttgggtggagcactggcctgaggaggacgaatgccaagacgaagagaaccagaaacaatgccaggacctcggcgccttcaccgagagcatggttgtctttgggtgccccaactgaccacacccccattcc

SEQ ID NO: 140163 - DNA, 1297 bp, Homo sapiens
  misc_feature (1)...(1297): n = a,t,c or g
ctgaaggaaaaggccaaggcaccttgtcggtggtgacaatgtaccatgctaaggccaaagatcaactcacctgtaataaattcgacctctgcctcccaggttcaagacagaaagtcgaagtcttcctgggccatgtctgcagcctgggactttcctttggagtagaaataggagggtgcttggttttcccagcatgaatggagaggacatggggcttctcttcctctgctctgagtgggaaaggagctctgagggctggctctgcaacagagaagggggaagtggacactcaattgaaccccactgctgtaccttcctgcatctcactcaccgttcactggctttttctcttctagcaggtgtctcctgcacctgcgccagctcctgcaagtgcaaagaagtgcaaatgcacctcctgcaagaagagtgagtgcggggccatctccaggaatctggggctgtggcttaaggttgggagggaacccaaggctgtccctgaagtgcgtgcttctggggaaccggccttcctttgtccctgtaggttgtcactgcctgtctagtcttctgcaactttccagggcttatgtgaggtggggcagctttctccaaaggaagacccgattctcaatgtccaaccaagttgtctcctgacaaaaaaccatgcccatcatgaactaaagggtccctctggggctgggagggatggagacaggcctctgttggggcagggagttctcatgatcgagtctgcttctgaccgtctcaatctccgtttcctccccaggctgctgcttcctggctgccctgtgggtggttggcaaagtgttgcccagggctggcatctgcaaagggggcatcgggagaagtgcaagctgctgcgcctgaatgtcgggacagccctgcttccaaggtacaaatagagttgacccgtaaaatccagggatttttttgtttttttgattacaatctttgaacccctttggctaacattcctttttttcttgtggaaatatgtggaataattaatttaaacacttaagacttgnnnnnnnnnnnnnnnnntataatggggcgccccttttaaagaacccttggggggcccaaatttaacccgggctgggaaggctatagcttttcccttatagggggggttttaaaaagctagtggggaattttgggaaaaaaccctttcttgtgtgggggagcatattggaccaccctcccctccgaattttaacgccccagggcaaaataaaatttttaagggggaagggggtaaaccaacccgctattcccg

SEQ ID NO: 140164 - DNA, 295 bp, Homo sapiens; identical to SEQ ID NO: 139253

SEQ ID NO: 140165 - DNA, 1080 bp, Homo sapiens; identical to SEQ ID NO: 139254

SEQ ID NO: 140166 - DNA, 1267 bp, Homo sapiens; identical to SEQ ID NO: 139255

SEQ ID NO: 140167 - DNA, 939 bp, Homo sapiens; identical to SEQ ID NO: 139256

SEQ ID NO: 140168 - DNA, 1764 bp, Homo sapiens; identical to SEQ ID NO: 139257

SEQ ID NO: 140169 - DNA, 1401 bp, Homo sapiens; identical to SEQ ID NO: 139258

SEQ ID NO: 140170 - DNA, 1215 bp, Homo sapiens; identical to SEQ ID NO: 118998

SEQ ID NO: 140171 - DNA, 4752 bp, Homo sapiens; identical to SEQ ID NO: 123337

SEQ ID NO: 140172 - DNA, 4653 bp, Homo sapiens; identical to SEQ ID NO: 139261

SEQ ID NO: 140173 - DNA, 720 bp, Homo sapiens; identical to SEQ ID NO: 123401

SEQ ID NO: 140174 - DNA, 912 bp, Homo sapiens; identical to SEQ ID NO: 139263

SEQ ID NO: 140175 - DNA, 1860 bp, Homo sapiens; identical to SEQ ID NO: 118995

SEQ ID NO: 140176 - DNA, 1180 bp, Homo sapiens; identical to SEQ ID NO: 139265

SEQ ID NO: 140177 - DNA, 591 bp, Homo sapiens; identical to SEQ ID NO: 139266

SEQ ID NO: 140178 - DNA, 3390 bp, Homo sapiens; identical to SEQ ID NO: 118996

SEQ ID NO: 140179 - DNA, 4247 bp, Homo sapiens; identical to SEQ ID NO: 139268

SEQ ID NO: 140180 - DNA, 4944 bp, Homo sapiens; identical to SEQ ID NO: 139269

SEQ ID NO: 140181 - DNA, 1980 bp, Homo sapiens
tcactggctctctttctggtctatactccgcaaatcctgatccttgatgtgtcgatttccttcgggggaaattacggcggtaaggtaccgggcgatgttgaattcaaaccgggttttaatggccctgcgtgtctttaacggcaatatacggtcaacggctttcgtatgcgcggtactgattaagcccttcctcgcggtgaccggccggtcattgtgtggattatcataacggtagcgagtgatatcgccgtcaggggcagtttcctgaatcagacggcccaattcatcatattcccggcgcaattccagcccgtcaggcccggtggctgacgttaactggttgtggtggttatagtaaaacgccgatgccctgccatccggcgtggttatgcgcgtgatgaggcccgtcaccacatccgggctgtactctgttgtcctgcctgcggcatccgtctgtgccctgagcctgcccacggcgtcaaactgactctgcgtgacgctgccgtccgcgtgttcctttttcaccacccgcttcagcccggcttcgccctgcgtgtgcagcacttcacggcggtccaggctgtcggtgatggtgatgcggtctttctcatactgatacgtgtagcttaagcctgccgggtttagctgttctgtcacccgcccgtcgctgtcgtaacggtaacggatttccggccggcccgtgtgacggtgcgccaccatccggccccggtatttatcatcgtaagtaaagctgcgcacctgtttgccactacggtcatacaccaccgccagttcgccgcggggcgtccagccatagcgcaccagcggcgcgcagggtaaattctccgggtattccgggtcgtgcgtcagccacacggcagacagacggatgccgttgtcccggccatattcggtgtaacccggcagggtatcaggaaaagcggacggttccgtcccgccggaaatggcctgctgccgggcttcttctgcctcgtgcgcatgcgtggtcagtaccagccggaagtgacgcccggcaccatccgtcacgccggtgatttcgccggtctgtgtgcgcccgaagcggtccaccagcccggtcagtacccggtacggcggcagcggcgcaggcagcacctcatccgcttccggcacccgctcacaccagccgagcagccaccacggcccctgcggactgtttgtcgccagataacgatgcggacttaagcggagttcttccggcagcgcctgccagagtgcggccagccggtgaccttcatccagtttcgccacgccgccgcgcaccagccacagtgactcgctgcggctgtaaccgtccttggcccggatgctggctttcatgtattcgatgttgatggccgttttgatcttgcgtggatgctgtttcaaggttcttaccttgccggggcgctcggtgatcagccagtccacatccacctcggctagctcctcgcgctgtggcgccccttggtagccggcatcggctgagacaaattgctcctctccatgcagcagattacccagctgattgaggtcatgctcgttggccgcggtggtgaccaggctgtgggtcaggccactcttggcatcgacaccaatgtgggccttcatgccaaagtgccactgattgcctttcttggtctgatgcatctccggatcgcgttgctgctctttgttcttggtcgagctgggtgcctcaatgatggtggcatcgaccaaggtgccttgagtcatcatgacgcctgcttcggccagccagcgattgatggtcttgaacaattggcgggccagttgatgctgctccagcaggtggcggaaattcatgatggtggtgcggtccggcaaggcgctatccagggataaccgggcaaacagacgcatggaggcgatttcgtacagagcatcttccatcgcgccatcgctcaggttgtaccaatgctgcatgcagtgaatgcgtagcat

SEQ ID NO: 140182 - DNA, 4641 bp, Homo sapiens
  misc_feature (1)...(4641): n = a,t,c or g
tcatcgggcactgacgcgggtcgcaggtatagaccccgtcaacgtccgtccaaatctcgcaacaatcggcgcgtaaacaggcagccagcaccgcagcagagtagtcggaaccgttgcgtccaagcaccaccagttcgcctttttcattaccggcggtgaaactgccatcagcaccatgtgatcagccggaatgcggcttgccgaagtacggcgggtggactcagcaatatcgacggtagattcgaggtaatgccccactgccagcagtttttcgaccggatcgataacagtaacgttgtgaccgcgcgcttctaatacgccggccataatggcgatcgacattttctcgccacggcaaatcagcgcaggttcggcatcgctgatattgggtaaagcatcctggccgctaatggttttttctatcatcgccaccaggtggttggtgattttggcgggggcagagaggacggtggccacctgcccctgcctggcattgctttggtcgaaaaaaaaagcccgcactgtcagggtcggccttttttctgtgtttcctgtacgcgtcacccgcaccttttctacgccatcgcgagtaaagacctgaacgtcgataaccgtaccggatacaccgtttggtacgcgcagagaagagtctttaacgtcagaggctttctcaccgaagatcgcacgcagcagtttttcttctggggtcagctgagtttcacctttcggcgttaccttaccaaccagaatgtcgccaccggtcacttccgcaccaatgtaaacgataccggattcatccagtttggagagcgcagcttcacccacgttcgggatgtcagcggtgatctcttccggacccagcttggtgtcacgggacacacacgccagttcctgaatgtggatggtggtgaaacggtcttcctgaacaacacgctcggatacgaggatggagtcttcgaagttgtaaccattccacggcatgaacgctacgcgcatgttctgaccaagcgccagttcaccgaggtcggtggacggaccgtctgccagcacgtcgccacgttcaaccggttcacccagagacacacacggcatctggttgatacaggtgttctggttagaacgggtgtatttggtcaggttgtagatgtcgatacctgcttcacccggatacatctcgtcttcgttaactttgataacgatacgggaagcatccacgtactgaacgacaccaccacgtttagcatcggccacaaaatagagatacggcgtttttgccggatgcgcagcagccttcagcgaatccgcccccggcgtcgctatcgcacctggcggcagaccggtaatggtataggtgttatacgctgtcggcgtttccaggtctgcacgagaaagtttgccattataacgctctcccatcccgtaaatcacggtcgggtcggtctgcaggcgcataccaatgcgtaaacggttgataaatactgaggcaaccttatcgcgttcactggcaacggcggtttctttttcgataattgatgccatcgtcaccaactggtttttatctttataaggcagaccgtccgcacgcccttcccaggcgctatcgaccgctttcaccattttcttgtgcgctcgcttgagtaacgcgacatcggtggtattggcggtatacatccaggtgtctggccagaaccaaccttcaatccactccgggttttccagttcaagtgcctgcgctacggtggcgtacttatcatcgctcagcgtatgcttgatatacggggcctcacgcaattgcttgaggtaatcgctcagacgcatcccttctaccagtcgcagagggaactgtgcttctttaccgctttccagcaatttcagcatctcgcgcacggtcatctgcggtgtaaagcggtaagtcccggctttaaagtgagaaagatccggttcgatacgcagcagccattgaaaaacccgtggacgattgatgatcttatcggcataaagctgttcaccgagcgccagacgtccggtccctggcttcagggtaaatatcgtctcttctttgataagcaatttgcttccagacgcccacaccagcggcgatacccagtaccaccagcaataacaacagccgaggatcgcaatcgccataatcggtttgccccccatcgcgaagatatcgctgatggcgttagtcgccgcaatgcggccaaaatcgaaaggattatcaacgatcggcataaagaagtcggtggtactgataacgctggtgccattgcccagatcgtacaccgccgcatcgtcgcgggtttcattacccacaagcaaattcggatcaacaaacttcgcctgctcactatgcaggatggtttccaacacttttggggaaattttacagccgcaaccagctccgtggctgtattgggtcaaacgaatcgagttctcgctcatggacatctctaccggactttcagttaatgcgccactgcgccagatgccgccaaacccctgggcaactgctgccatttgcatcgccatgaccgcgcatccggcagacatttcctgttcccagcgcgggactttatgattctcttcgcatttcgccaccaccgtgatgatgagcggtgcgcggaacggcgcattacgggctttgtcgatagctttgtcatcactaccggcagcaatcgccccctgttccagtacggcgctgaaacgctcgcgcccttccccttcaatcacaaaaaaatgccacggttgcatggacttatggcccggcgcacgcatacccgcacgcaggatgttttgcagctgttcacccgttggcgcgggttcagccaagcgggaggcgcgattactcttgtcaatccagccatttaccagcacgggttcattttccagcgagagcaacacatcgacggcttcctgggcggcactggcttctatgtaacgggtgattaactccccttcgcgatgcttcttaaccagatacttccatttccaaccgctttcaagattttcaagttgttgatatttcatagcgatctcaatgttaccgtgtaactcttccgcgctggcatgaatttcaccaccgtttacatgcagtgttgcatctgaggtgtgggtgactttctccactttcagaacaacatagacctggttgattcggtcaaaatattgctcaagtttggcaaatttggctgtaacaaattcgcgcagtgcctcggtgatctcgacgttatttccggtaatgttgagctgcatagtgtcttccttatcggttgggtcaaacgagttgtttacgttcgcaacagtgcggcgtgccaccatgataccttgttccgacagcaaagaggttaacttgctgtcgctcaacggtttcgctgggttttccgccgcgattaatttcttcaccagcgcacgaatcgccgtggaggaagcttcgccgccgccctcggtattgacgtgactggaaaagaaatacttcagttcaaaaatgcctcgtggactatgcaggtatttttgcgtggtcacgcgagatatcgtcgattcatgcatttcgacagcctgggcgatatcggccagtaccatcggtttcatatattcttcaccttgctcaaagaaggcttgctgctgttcaacgatacagcgactcacgcgcagtagcgtatcgttacggctttccagactcttgatcaaccatttggcatcctgcagattgctgcggataaactggctgtcatcaaaatttaacgcgtnattgcacatcgaggcgtagtgctggttgatttgcagacgcggaatgctgtcactgttgagttctaccgtccagtgaccgttatgcttacgcaccagcacatctggaatgacatactcaggttcgccagtctggataccgtttttaccgccacaggcagtcgttgcggctccagaacgacgaggccgatgatgaacaccaatagcagttcgctgctctttatcgtggcgcttcgcgtcttctgttttagcctgttcctgattcgtatccgcctgcttatcggcgatagttttcgcagtaaaatcagcatcctgactggttttatcctgctttggttcatcatcgctcattgcttttttaaagcctttgatcgacgcaccaagatcggaaccgatggagccgagctttttggtgccaaaaagcagtacaacgatgacggcaataatcaataactgccaaatactgataccacccatacatgttcctgaatggcaatttcgactctcgatcgcgtcagcgtcggccaggaaccggcttgtgtgaaaacctgtccgaccggggctatccacttcggcaccaagaaggagatgctggagctggcggaacagcgcgtggcgaaactgaaagcgcgtggttacgaacatgctggcgtctacaacccggaaggggtcggtggtacgcacgttatgtacgtgctgcatcacgccgatcagccggagctgtatcacggtctgccgaaagatccgaagatcgacacctcggtaagcctgtggaaaggcgcgttgaaaccgctggcagcggctggctttattgccacttttgccgggttgattttccactacatcggtattggcccgaataaggaagtggacgatgacgaggaggatcat

SEQ ID NO: 140183 - DNA, 1308 bp, Homo sapiens
ttaacgaattccattgtgtggtgtcccgttgtatatatggttgtaggtcgcgggtgtcggtggttggcctcccggcaccatggtgccaaacgcaatggtgttgtggttgcactccggccgcgcgtgtgtcatgatacgttgggggtatggctccctcccattgccctgcgtttggtcaatcgacggggtcgtttcctgtgatctatcgggatcagggtactcaatggtgtggtgcggtgcagggtgccataggcctctgtcgttgctgggtgtgttagtgtcacaggtcgtggttgcctgcgcgccgtcgcggcaccgtggggctcgctgtaaacgcccgtactgtccccgtggtacatagtcccacttcgccgacagtgaattcagagtaagcgccgtcagatcagaaaagagattttcttgtcccgcatggagcgattcgcggccaacgagcatgacctcaatcagctgggtaatctgctgcatgagaggagcaatttgtctcagccgatgccggctaccaaggggcgccacaggcgaggagctggccgaggtggatgtggactggctgatcgccgagcgcccggcaaggtaagaaccttgaacagcatccacgcaagaacaaacgccaaggtgcttaatttccctggactcccgccgaacccggttcaatcgcgggccgtttatgccgcatggtatcggcatccgctgggcctgcaggtgcatgacgtcgctggttttatgcaggatgtagcggtacgcacctcgcggcaccggcaaaatatccgtacctgcgctgccccgtattctccagccgggcatggtgttaaccatcgaaccgggtatcggcagctgctgaggggtgtttgtgcgtagcccgaattttactgctgttggcctagaactattgtacccatcaagagtttgggtcagcatcccaactaggatcctcctgatgtacgtgcttgtttcgcaagttattgatgtgtcgtggggatactcctggcttctctcgtctgttggctcgggtccgtgtgtgttttgtcgtgttgtgttatgtgtggttgtggcctcgtgtgttcgtgcttgatggtagtccattgcttgcgtgctggtacacttggcggttgtttgtattgtgggtggtgtagtgcgtggtagtctgtggttgggtggctgtgaatgtatcttgtggggcttgcgggattgtggtccacctcccttgtttgactttgttgtgacgtgtgataatggatgcgagtttgttcgcctcggattcttggtattgatcatgtcctgttgtttcat

SEQ ID NO: 140184 - DNA, 1305 bp, Homo sapiens
atgcggaatgtgccggaccctcagatgaaggcgcattacagaaatggtggtctgttctaccgttcttcaaagacggttatggttttgaggaagactgggcagaagtttatacctcgaaaatcttccaccagaaagctacccagtcggcgcaccaatcccgtggccatcgataccgttccgtctggttatgccctgatgcaggggcaggcttttgacaatctgcttacccgaaacttgcagccgcttatccagacgtgtgctgtggcgaccgtcatcacttccggtcagcacgtcgtgcgttttcccttgggaaggtgcgaacaagttcctgatatgagatcatcatattcatccgagcgcatcccagagggacatcatgagccatcaactcaccttcgccgatatgaattcagcactaagcgccgtcagacccgaaaagagattttcctctccgcatggagcagattcctgccatggcagaatatgaccgctgtcatcgagcgttttatcccaaggcgggcaatggccgacggccctatccgctggagacctgctgcgtattcactgcatgcagcattggtacaacctgagcgacggtgcatggaagatgccctcgccctgccggatcgcaccaccatcatgaatttccgcacctgctcgagcagcatcaactggcccgtcaattgttcaagaccatcaacgctggctggccgaagcaggcgtcatgatgacccaaggcactttggtggtgccaccatcattgaggcacccagctctaccaagaacaaagagcagcaagcgatccggagatgcatcagaccaagaaaggcaatcagtggcactttggatgaaggcccacattggtgtcgatgccaagagtggcctgacccacagccggtcaccaccgcggccaacgagcatgacctcaatcagctgggtaatctgttcatggagagaagcaatttgtctcagccgatgccggctaccaaggagcccacagcgcgaggagctggccgagcgcagatcctcaaaaacggctgccgcatcgtcagccagttcggcggcgtcatcggatcatcggcgtctgcttcaaaagatgaggcgaccagacaagcgtcagcacgaagagcagcgccacgacggcatccacgaaggcgacagaggctgctggagtgcgacggcggcagctcagagcaaaagtacggcggaatccgcggcaagcgcgccgagacagcagctaaacgggcagaggatattgcatccgccgtgcgcttgaggatgcaagtacgacgaaaaaggggatag

SEQ ID NO: 140185 - DNA, 2025 bp, Homo sapiens
atgatatcaaaacgctctgagcgctcgttcggctatggcgtaggcctagtccgtaggcaggacttttcaagctcggaaggtttcttcaatctgcattcgcttcgaatagatattaacaagtgtttgggtgttcgaatttcaacagcaacaagtacaatgggcatcgtattgcccgaacagataaagctagcatgcaacggtatacagcgagtcgctctttgtggaggtgacgattacctaacatcggtcgattcgtttgatgttatgttttgttctcgctttggttggcaggtacggccaagttcgttctgttcccctgtatttacctgggtaactgagaatcagcagcaccttcacagaggtaaagacaatctctcattgaagaataataattcagcctgtggcgctgcctgtggtagcctcaggggtgagaaatcagacccacccagtgcgaggaataacccaagctctcagcaaggcgggaaaaaagaaagtggccagcaacctagcttaaaggatcctcacatactgcggcacgactctgcgcacagaccaaggaaggagaagccgcggcagccggtaaatgcttccttggtggtcaaattctggagggttaaatgtgtgtgtgtgcataatgatcacaaacgacctgcttgcagtgttgtttgtgtggatggtgacacctactgctggacggaggcgtatcccgccatgggcctgccaacactaagagggcctgattctgccttaggggagcggccagagaggacagaacgagtgggagtgtgtaaaggaccatcagagtgggggaaacaggtgggctggatagcaagttttggaagcactgaacacccacacggagctgctcctctcaagcggggaggcatcttcactaaggagtgtctgttcccctgtattacctgggtaactgagaatcagcagcaccttcaacagaggttggccagcgtgaataacatcgccagttggttatgtttttcagcaaccccttgtatctggctttcacgaagccgaactgtcgctgatgatgcgaaatgggtgctccaccctggcccggatgctggctttcattattcgatgttgatggccgttttgttcttgcgtggatgctgtttcaaggtcttaccttgccggggcgctcggcgatcagccagtccacatccacctcgccagctcctcgcgctgtggcgccccttgcagattacccagctgattgaggtcatgctgttggccgcggtggtgaccaggctgtgggtcaggccactcttggcatcgcaccaatgtgggccttcatgccaaagtgccactgattgcctttcttggttgatgcatctccggatcgcgttgctgctctttgttcttggtcgagctggtgcctcaatgatggtggcatcgaccaagaatctgctccatgcgggacaagaaaatctcttttatggtctgacgcgcttactgctgaattcactgtcggcgaagtcccagaatgactgtctagaccaatgtccttactcattccttattcttctgagctttgctaactggagtacaggagcagtcagcaggcccagagtcaggtggttgagttatcaagccttcataaccagagggtctgagcacttgttggactgtgcttactcagcttctcatttacaattaccactgcacctgagagtaccaagagattctgagccagagattacgatttccaacttccagctcctcaagagctacactgatgaagtgggcatttcagtgtttccatacttattctctctacgcatttgggcaagttgtttaatttctcctttcaatgcctataaaatgctgatagttctagcagctgccctgcatgacatcatgagaattatagataacaagccatggaaatttgcaaatagctgcccagcagcagcacgggaactcccacctcccccttatataagagccaaatgtcggggcgctatcaggctactgccacgacagtctgactgcatggctatcagctga

SEQ ID NO: 140186 - DNA, 1818 bp, Homo sapiens
ttatgggggcgccgacacaggcagggggagcgccacaatacggcgggaaagagcggtatacaaaacacatccgtgtgcagaaagacgatgccgcgccggtaccttgccggggcgctcggcgatcagccagtccacatccacctcggccagctcctcgcgctgtggcgccccttggtagccggcatcggctgagacaaattgctcctctccatgcagcagattacccagctgattgaggtcatgctcgttggccgcggtggtgaccaggcaatgtgggccttcatgccaaagtggccactgatggcctttcttggtctgatgcatctccggatcgcgttgctgctctttgttcttggtcgagctgggtgcctcaatgatggtggcatcgaccaaggtgccttgagtcatcatgacgcctgcttcggccagccagcgattgatggtcttgaacaattggcgggccagttgatgctgctccagcaggtggcggaaattcatgatggtggtgcggtccggcaaggcgctatccagggataaccgggcaaacagacgcatggaggcgatttcgtacagagcatcttccatcgcgccatcgctcaggttgtaccaatgctgcatgcagtgaatgcgtagcatggtttccagcggataaggtcgccggccattaccagccttggggtaaaacggctcgatgacttccaccatgttttgccatggcagaatctgctccatgcgggacaagaaaatctcttttctggtctgacggcgcttactgctgaattcaccctgagtattatcgaggctgacttccgcatttgggctaatgctggttaacgcattgtagcgtgcattaagcccctcgatagccagcgttccccctgtaacattcaggtttccgccacctgtcagttcaccctgactgatcccacctttatttaccgtcagcgccccctctttgaacaaaacagtcgaacccatctgcccggtgaatgtctctaccgtctgcgtcgatccattaagatcgacgatggccgcgttgctgatgttcagttcccgggtgttgccaagtgcaccatccgcatcggtacgtaatgtccccatctgaacgtaggttgccccctgatagtcgttctgaccgttggaaagcgaaacctgtcgcaccgtattgattgccagatccccttcaccaccgatttttgccgacatatcggccgttgcgccataggctccgccatgttcggctaacgtcagcttttgcccaccatggatgttcagcgctttcagcccatagttaacgtacaaaccattacctggtgcggtcgtgaggcggaatccataatcaccctcggcgaccaccgttccgttttgcgcaatgtgtaacgttttgtccgcttccacctcgtcgcccttgtctatcacattaatcacagtaactctccttagtctccagaaatagacactgttctgaacttggtatgtatgcttgttaaagcaggcagctgcattcctttttacacactgttcgcggttttcttccagccactgcgcgccttgttcggtcagcgcaatctgcttcttacctccttcctcttcgcggatggtaatcagcgactgctcctgcagaaaatccagcgttgggtagatgacgcccgggcagacgtaattcaccgtgaccaaagaaacgttgccgacgaccgccgccgcgaccgtggcgaccaccgcagcattgaccgtgttcatgctggtgaccgtgtccgcagtgctcgtgttctgacttctcacctttgcagcagccctcatggcgtggctggccttcat

SEQ ID NO: 140187 - DNA, 4638 bp, Homo sapiens
  misc_feature (1)...(4638): n = a,t,c or g
atgctctgtacgaaatcgcctgccatgcgtctgtttgcccggttatcnctggatagcgccttgccggaccgcaccaccatcatgaatttccgccacctgctggagcagcatcaactggcccgccaattgttcaagaccatcaatcgctggctggccgaagcaggcgtcatgatgactcaaggcaccttggtcgatgccaccatcattgaggcacccagctcgaccaagaacaaagagcagcaacgcgatccggagatgcatcagaccaagaaaggcaatcagtggcactttggcatgaaggcccacattggtgtcgatgccaagagtggcctgacccacagcctggtcaccaccgcggccaacgagcatgacctcaatcagctgggtaatctgctgcatggagaggagcaatttgtctcagccgatgccggctaccaaggggcgccacagcgcgaggagctggccgaggtggatgtggactggctgatcgccgagcgccccggcaaggtaagaaccttgaaacagcatccacgcaagaacaaaacggccatcaacatcgaatacatgaaagccagcatccgggccagggtggagcacccatttcgcatcatcaagcgacagttcggcttcgtgaaagccagatacaaggggttgctgaaaaacgataaccaactggcgatgttattcacgctggccaacctgtttcgggcggaccaaatgatacccattcgctacctgctggcgtatcgtgacgttggcaatacatttcccagaccgcctgccacggcaacgatttctgctcttccagcagtgccagacgcgcagtgtaatcgcccgccgcttccagcttgcgcagctcagcgaggcatcgaagaagtcaaggccgatatgcacccggtcaaacagatcgtgacgcacaatctcactggcaattgcctgggtttcatcatccagcagcactacgtgatcgctgtcccagcgaacctggactggcttgaacgttgcaagcaaagcaactcgggtggaagtgcccggcgtccaggcacagcgcagtctggctggctggttggcataccccatgtaaaactcattggagccaaccgtgtagctctctgcgccaatgccaaacaattggctctcaacggcgtcgatattgggtttagcttctcgcctgatcacctcatccagtgctgccagcagacgctgacgcggggcgagacggtcaacggtgatatctttcataccatccgggatccagatgttcatcaccgatggtgtgccgagttgctcgccaaaataggccgaaacgcgacggctggctttgcagtgatcaatccagaactggcgaatgctgtcctcactggcattacgcgctttgcccggataattgcctgtggcctgaatccccccggtcagcgaaccttccgggttttcaaaaccggaaacatcatcgcctgccagcagtgcattgaaacggctgcgccagctcatgcaacacatcggcatacagcagcgccagctgtcgaaaatgcagcgcgcaggcttggcaataatttgcggttggagatcctctggcaggttgggttgactggaaatcataaagcgaaagatctcaatgcggcgcaactggatgcactcgcacacgcgttactggagattcctcgattttcctacgctacgcgggggcaggtggatgagaataagcatcatggggcgctgtttcgctttaaggtttttcatcgagatggcgaacccccccacgccatacccgcacaaatagccagcagagcaaaaatcgacagcaggatttgcggtagcgggcgtagtgcccgcagtaagatttgtttatcgaaaccaagaccaatccgccagccaattgccatatacgccatcgccagcagccattccggtagttcgatgcatcgggatgagcatcgtgccggaaggaagacgcagcaggcatcccactgtaccggcaacgaccgcgagcaaaatagtaagcaggagattaatgctcactggcgggaaccagacgatatgctggttaaccgcttcagcgttatcgcccagcatcatgcgggtgaccagaacagcggcccccggcgacgaacagcactccgcagattttgccataaacgccaccaggcgaattatcttgcgcccggaaagaagaaatctccggagacgaagaacggccacaggtgggtgcgggaacctttgaaccgaccggttttggccaaagctcggctctttcgccttttccagcgcgcgcacctttctttcggcatcacaagccaattggaaaccagtggagtcaatggtgtaaccgtcacgctcagcttggtacagctcacgttttacggtaacgttagtgagatcatcagacatcaatgtcaacttacacggcacggcaatcacccgctgccactgacggcaatccagggtatcgccctctttagtgacaatcaggctgcctatcgcttccgggctgaccagcgcacgttgcggccctttggtctgccagtagcccgccagccagtccggcgcgggggttttcacgacattgttatagttttcgacttcggcacagcccgccagcaacaagagcgcgcctgcaattgcgagttttttcatcattcgtcctgcatgagaagaaaagaggattgtggcattaaagccctgatgtcgccagcctttcaagaggctacattcatgtcatggcagcaattcaaacacgcctggttgattaaattctgggcccccatccctgcggtcatcgcggcgggtattctctctacttactattttggcattactggcaccttttgggctgtcacgggtgaatttacccgttggggcggccagctcctgcaactgttcggcgtccatgctgaagagtggggttactttaaaattatccatctggaaggatcgccattaacccgcatcgacgggatgatgatcctcggtatgtttggcggctgctttgccgcagcgctgtgggccaacaatgtagcggtaccgacatggtgtaatggctgcggcacaagtcatgaggtgcgggtcattaccgcaccgccttactacccgcaatggcaggtgggcgagaactattccgcctggcgctacaaacgagaagagggggccgccacggtgtggcgctgcccgctgtatgtgccaaaacagccgagcaccctgaaacgcctgttgcatctgggcagttttgccgtcagcagtttctttccgctgatggcgcaacgtcgctggaagccggatcgcattattggcgtggtgccaacgctgttttgcgcgccgggaatgcgcctgctggcgaaactctctggtgcgcgtaccgtgctgcatattcaggattacgaagtggacgccatgctggggctgggccttgccggaaaaggcaaaggcggcaaagtggcacagctggcaacggcgttcgaacgtagcggactgcataacgtcgataacgtctccacgatttcgcgttcgatgatgaataaagccatcgaaaaaggcgtggcggcggaaaacgtcatcttcttccccaactggtcggaaattgcccgttttcagcatgttgcagatgccgatgttgatgcccttcgtaaccagcttgacctgccggataacaaaaaaatcattctttactccggcaatattggtgaaaagcaggggctggaaaacgttattgaagctgccgatcgtctgggcgatgaaccggtgaattttgccattgtcggccagggcggcggcaaagcgcggctggaaaaaatggcgcagcagcgtggactgcgcaacatgcaatttttcccgctgcaatcgtatgacgctttacccgcactgctgaagatgggcgattgccatctggtggtgcaaaaacgcggcgcggcagatgccgtattgccgtcgaaactgaccaatattctggcagtaggcggtaacgcggtgattactgctgaagcctacacagaactggggcagctttgcgaaacctttccgggcattgcggtttgcgttgaaccggaatcggtcgaggcgctggtggcggggatccgtcaggcgctcctgctgcccaaacacaacacggtggcacgtgaatatgccgaacgcacgctcgataaagagaactcgaaactctatccagttgtgatggcaggtggctccggtagccgcttatggccgctttcccgcgtactttatcccaagcagtttttatgcctgaaaggcgatctcaccatgctgcaaaccaccatctgccgcctgaacggcggtcaggctcggcgtcggtgccgataccatactgacgtgacccggcgcgaggaacgcatcgataccgttatccggctgttccagcaaactgcgcaacgtcgggataagcgtaatgtgctggcagaagaatttcaacgcatccatcggcgagtaaacgatgcgcacatcggcaccgcgtgcttttgcctgcaacagcgatccctgtttccccggcacgcgcatggcgtcgccaaaggtacagaagatgacttccggatggctggcaatctccacgcaggtgtcgattctacccatcggcagtacgcacaccgggcaccccggaccgtggataaactcaacgttttccggcagtaa

SEQ ID NO: 140188 - DNA, 2631 bp, Homo sapiens; identical to SEQ ID NO: 123282

SEQ ID NO: 140189 - DNA, 1575 bp, Homo sapiens
atggcagtaaagatttcaggtgtactgaaagacggcacaggaaaaccggtacagaactgcacaatccagctgaaagcaaaacgtaacagcaccacggtggtggtgaacacgctggcctcagaaaatccggatgaagccgggcgttacagcatggacgttgagtacggtcagtacagcgttattctgttggtggaaggattcccgccgtcacatgccgggaccattaccgtgtatgaagattctcaacccggtacgctgaatgattttctcggtgccatgacggaggatgatgcccgtccggaggcactgcgccgttttgaactgatggtggaagaggtggcgcgtaacgcgtccgcggtggcacagaacacggcagccgcgaagaagtcagccagtgattgccgcacattagcccgtgaagcgggaaaccatgcggctgatgctggggactcagcacgcgcagccagcacgtcagccggacaggcgggtagctcatttgcacttgttcatcatcctgttccttcccccagtctcctggcgctcgtgcttcggccctttagaaaccttcctcaaccttcttcgggaaacccaccaacccaaaacgcgccggcccaacaaacaacgggcccccctttccccccaagccccaaacaacggccggccgcgggccccccacaacccgcgcgcccacggcataacacacttcgcgacgctcgcctccttctacccttacgacccttactaactcgcactttctcccatttcttcacgaacacgacctttggtcgacgattccgcatctgggtcctaggtttgccgtctaattgctctgaggctccctattcctgttccctgggccaactggggggtccttttcccgttccatgcctcggatgggtactggatcctgctcctctcgtttgcgttggcccggtgtctccaggccctatggagtggcattgcattgcttgttatcggcccttgggtccctattttcgacgttgtgtgcgggttcccggtccccgattcctttggcctctagttgctccgttggaacttcttcaatttggctttccctattttagcagcttatgttgttacaccttatttcgggatcgtcaaggggagcacgcgtgggaccttgcaccacatatcgccgcactgccactgattgcctttcttggtctgatgcatctccggatcgcgttgctgctctttgttcttggtcgagctgggtgcctcaatgatggtggcatcgaccaaggtgccttgagtcatcatgacgcctgcttcggccagccagcgattgatggtcttgaacaattggcgggccagttgatgctgctccagcaggtggcggaaattcatcgatcgaatctgctccatgcgggacaagaaaatctcttttctggtctgacggcgcttactgctgaattcactgtcggcgaagactcatcaacacagcagcaaaaccaaacatgccgtcagcacccacagcggccagttgccgtgccccatgattccaaacggcaaacacgacagcgacacataatcaccaaccaagtgaccctgtaa

SEQ ID NO: 140190 - DNA, 2040 bp, Homo sapiens
atgatgacccaaggcactttggtggatgccaccatcattgaggcacccagctctaccaagaacaaagagcagcaacgcgatccggagatgcatcagaccaagaaaggcaatcagtggcactttggcatgaaggcccacattggtgtcgatgccaagagtggcctgacccacagcctggtcaccaccgcggccaacgagcatgacctcaatcagctgggtaatctgctgcatggagagaagcaatttgtctcagccgatgccggctaccaaggggcgccacagcgcgaggagctggccgaggtggatgtggactggctgatcgccgagcgccccggcaaggtaagaaccttgaaacagcatccacgcaagaacaaaacggccatcaacatcgaatacatgaaagccagcatccgggccagggtggagcacccatttcgcatcatcaagcgacagttcggcttcgtgaaagccagatacaaggggttgctgaaaaacgataaccaactggcgatgttattcacgctggccaacctgtttcgggcggaccaaatgatacgactggcacaggcagatgacgccgccccggcagcgggcagtactctggacaaaatcgccaaaaacggtgtgattgtcgtcggtcaccgtgaatcttcagtgcctttctcttattacgacaatcagcaaaaagtggtgggttactcgcaagattactccaacgccattgttgaagcagtgaaaaagaaactcaacaaaccggaccggcaggtaaaactgattccgattaccttacaaaaccgtattccacttgttgaaaacggcactttcgattttgaatgtggttctaccaccaacaacgtcgaacgccaaaaacaggcggctttctctgacactattttcgtggtcgttttgctcaacaaactgaatgaagagcaaaaaatgaatatgcgcatcatcagcgccaaagatcacggtgactctttccgcaccctggaaagcggtcgtgccgttgcctttatgatggatgacgctctgctggccggtgaacgtgcgaaagcgaagaaaccagacaactgggaaatcgtcggcaagccgcagtctcaggaggcctacggttgtatgttgcgtaaagatgatccgcagttcaaaaagctgatggatgacaccatcgctcaggtgcagacctccggtgaagcggaaaaatggtttgataagtggttcaaaaatccaattccgccgaaaaacctgaacatgaatttcgaactaagggcaaaagcagacagcagacacagaggagaagatttaaaacttgacaactctaactgcaaccccaaggcagaatttttcacaggttatgtaacagattctggcacttcccactcataccatccagaatgctgttggttccagttcctgatgttatttgggaggctaagtccctattatcttcccctcttcttccaacctttctctgatcatgctccccaattccatgttggcaatctgaaatacagcatccttacaaaaatccctagtttcaagtccagaaatctgattaaagagtttttcatttcctttgcaggagttcagaaagaaacagcaactggggataacattggggatggaaaggcaagtttcttgggggcatattgtggaggaaagattcggggtgacagaacagaaagttacaggctaacagaggagttgtggttaatagaaagctctcatgttagcttggagcctgtgcacagaagtcaagaattggggtttgggaacctctgcctagatttcggaggatgtatggaaatgcctagatgtccaggaagaagtctgctgcaggggcagggctctcacagagaacctctgctacagcagtgcagaagtgaaatgtgggatcagagctctcccagagtccctactggggcatcacctagtggagctgtgagaagagggccactgtcctccgaccccataatggcagatccaccaacagcttgcaccaagtgcccggaaaagcttcaggcactcaatgccagccagtga

SEQ ID NO: 140191 - DNA, 1608 bp, Homo sapiens
atgagtcatcaacttaccttcgccgacagtgaattcagcagtaagcgccgtcagaccagaaaagagattttcttgtcccgcatggagcagattctgccatggcaaaacatggtggaagtcatcgagccgttttaccccaaggctggtaatggccggcgaccttatccgctggaaaccatgctacgcattcactgcatgcagcattggtacaacctgagcgatggcgcgatggaagatgctctgtacgaaatcgcctccatgcgtctgtttgcccggttatccctggatagcgccttgccggaccgcaccaccatcatgaatttccgccacctgctggagcagcatcaactggcccgccaattgttcaagaccatcaatcgctggctggccgaagcaggcgtcatgatgactcaaggcaccttggtcgatgccaccatcattgaggcacccagctcgaccaagaacaaagagcagcaacgcgatccggagatgcatcagaccaagaaaggcaatcagtggcactttggtcatgaaggcccacagttggtaagaaccttgaaacagcatccacgcaagaacaaaacggccatcaacatcgaatacatgaaagccagcatccgggccagggtggagcacccatttcgcatcatcaagcgacagttcggcttcgtgaaagccagatacaaggggttgctgaaaaacgatacccaactggcgatgttattcacgctggccaacctgtttcgggcggaccaaatgataccgtccttgagacccgtcctggcccgcgtgacctggggtaactcccatgtcactgttcctgcccctgggatggggatgtccaaccttcccccacccccaggcaatggacttgaggagagaggctccactgacaaagcgaggcacttcctggagtctgctgcgcccctggccatggacccttatagctgtgccctgactacctacgcgctgaccctgctccgcagcccggcagcccctgaggcactgcgcaagctccgtagcctggccatcatgcgagagagagtccacatctccacccccaacaagtatgagttccagtatgtgcagcggccactgcgcctcacccgctttgatgtggctgtgcgagctcacaatgatgcccgtgtggccttgtcttctgggccccaggacacagcaggcatgatcgagatcgtcctgggggggcatcagaacaccaggtcatggatctccaccagcaagatgggagagcccgtggccagtgcacacacggccaagatcctctcctgggatgaattcagaacattctggatcagctggcgtggtggccttatccaggttggccatggtccagagccatccaatgagtctgtcattgtggcctggaccctcccgaggccaccagaggtccagttcattggcttttccaccggctggggctccatgggtgaattccgaatctggaggaagatggaggtggacgagagctacagcgaggccttcaccctgggggtcccacacggcgccatccctgggtctgagcgagccaccgcctccatcatcggcccgcagcagcccgtccagcagtggcatgtggggctgcagtga

SEQ ID NO: 140192 - DNA, 1665 bp, Homo sapiens
tcagttcacatcgggcatcagttctttcagtttcagtcgacgagcctgaatatctgcccgcccctgcatcggctttttatcgccttccagatgaatattcgccgcaatgctgccgcccgccatgccaaatttcagcggttgcaggcgcaggtcagcatttttgaggatgatatgagtagaaagatcgctaatcggcaggctactgccatgctcaatgcgccgccctttgaagcgaacatcggcatccataacgtcccatttatcggtttcgaagcggtcataaggcagcactttgcccgcaggctgaacgcttttttcgcccttcttctgttcagaccgtttcgacttttctgcccctttcccggaatcaacgccaatcaacggtcccaggtccgccagccgcaattgccgcgactcgacatcaccttccagttttggtcgtggctttccggtggtgtagaccagagaaccgtggatatcgtttgtcatcaatggcgatccgcccttgatcgaaaagaatattatccagccgaaacgaccatgccgacggctttgcattcgcgtctttgtatcatcgttggcaagattaaacgtccagttattgttcttttcagagaggcgaatcaggcgcgcgtcgggcttttcgagcttgatccacggcagccagaccgttttggtcagcagcgccagcggggccagcgttgcctctacgcgtggcaaatgcaccatcgtgacttcgggaatatccggtggattgccaagaatgatgtcttccgcgtgtacatggggccacggcacccagctgcgccagccagtttcttgtttttgccgctcccacaccacgcccagatcgccacggatagcgaacggacgattcaactccgcagagactttctggttgatagtcggtttgagtcgattccagtcaaaagttgcaatcaaaatgatcgccacgacaatcatccgaaaggctgtaagaaataacttcgttgttgaagagatctctcctctgtaagagcggtatcgcttgaccttaatcgctgctttaagtgagagggttcccatcaggcgctgaacagctttatggttaatctgtttcccttctcgatgaagagacagcgttaccctacggtatccgtatcggcctctattctcgtgataaatctcactaatacgctttttaacgtccgcatacttgtcaggcttgctgagagcttgcctttcaagatcctcaatgcgtcggtcttttgacagctccaatgctgatgccgctttttctggatcaactgatattgcaatgtttcttttggtgccaatcttgagcgcgcgtaaaccagcttctccgcgctcttcatagaccttcagccacctggctacagaaccactaccagcaagcataaagtgagcagcagcctgattaagggacatgtgctgctcgatcacagctttcacgaccttaatacgcaactctggatcagcactaacgcctttaggtttgggaattaaacctttttctccatgtttttcatagagggcaacccatgtcctgacctgggttcgggggacaccaaaacgtgccgagatgatcctgtaaccatcatcagttgtgaagtagtgattcacgacttcaaggcgcttttcaaaagggtattttggctttgacat

SEQ ID NO: 140193 - DNA, 917 bp, Homo sapiens
gtctgtgtgcgcccgaagcggtccaccagcccggtcagtacccggtacggcggcagcggcgcaggcagcacctcatccgcttccggcacccgctcacaccagccgagcagccaccacggcccctgcggactgtttgtcgccagataacgatgcggacttaagcggagttcttccggcagcgcctgccagagtgcggccagccggtgaccttcatccagtttcgccacgccgccgcgcaccagccacagtgactcgctgcggctgtaaccgtccttggcccggatgctggctttcatgtattcgatgttgatggccgttttgatcttgcgtggatgctgtttcaaggttcttaccttgccggggcgctcggtgatcagccagtccacatccacctcggctagctcctcgcgctgtggcgccccttggtagccggcatcggctgagacaaattgctcctctccatgcagcagattacccagctgattgaggtcatgctcgttggccgcggtggtgaccaggctgtgggtcaggccactcttggcatcgacaccaatgtgggccttcatgccaaagtgccactgattgcctttcttggtctgatgcatctccggatcgcgttgctgctctttgttcttggtcgagctgggtgcctcaatgatggtggcatcgaccaaggtgccttgagtcatcatgacgcctgcttcggccagccagcgattgatggtcttgaacaattggcgggccagttgatgctgctccagcaggtggcggaaattcatgatggtggtgcggtccggcaaggcgctatccagggataaccgggcaaacagacgcatggaggcgatttcgtacagagcatcttccatcgcgccatcgctcaggttgtaccaatgctgcatgcagtgaatgcgtagcat

SEQ ID NO: 140194 - DNA, 1602 bp, Homo sapiens
ctgctggagcagcatcaacgggcccgccaatcgttcaagaccatcaatcgctggctggccgaagcaggcgtcatgatgactcaaggcaccttggtcgatgccaccatcattgaggcacccagctcgaccaagaacaaagagcagcaacgcgatccggagatgcatcagagcaagaaaggcaatcagtggcactttggcatgaaggcccacattggtgtcgatgccaagagtgggctgacccacagcctcttcaatagtttcttcgccggtagcgatggtgcccgcattaatatccattaaatcaaaccagcggttcgccagctcggtgcgggttgccattttaatgacgggtaccgccatcaggccgtacggcgtaccacgaccggtcgtaaacacttgcactgtgatacccgaagccacctgttgcgtgccacagacaaaatcgctggctggcgtcgcggcgtaaattaatccgcgtttagtcgggcgttgaccgggcgacagcacttcaacaattgcgcttttacccgatttagcaatggagccgagtgccttctctaccacgtttgccagaccgcctttcttgttgcccggcgaagggttggcgctgcggtcggtttttcccatattgagatagttatcgtaccactccatctcctccagcagccgttggccgacctcttcgttcacgttgcgcgtcggctgtccagcacgatgggaattcgcgatcaacgcccacttcccggttaacttctgaacaacatcacccgttggcgccgcagcgcaccagtagatcagacgcatagccaatcggcggggtttgccgttacaccagaaaacgcattcgtggccagtagcggacctagcagacatcgtcatcagcgctgaacatcccacgaaaaccagtgctgcattgaaggagtgcagttcacttaccaggtagccaatcaccagtggagtgacaatggaggcaacattgccaaagacgttaaagacgccgccgcagaggccaacaatctctttcggcgcggtgtcagaaatcaccggccagcccagcgcaccaaatcctttgccaaagaaagccagcgccatcagcatgaccaccagcgtggtgttgttggtgtagttacataagatgatggtggaagccagcaacattcccagcacaatcggtagcttacgtgccagggtcagggataaaccgcgtttgatcagataatccgagaagacacctcccagcacgccgcccgcaaaaccacacagtgctggaatcgaggcgaccagacccactttcagaatcgacatgcctttttcctgcaccagataaatcgggaaccaggtgaggaagaaccaggtgatggtgttgataaaatattgtccgaaaaatacgcccagcatcatgcggttagagagcaattgcttgatgtaatgcagtttgggtccgcttgctgccgcactgcccggctttttgtggtccatatcgaccaccgcgccattttcagagataaacttcagctcttccgcagacatacgtgggtgatctgtcgggttatgaatcaacttgatccacagcgccgtcagcacaaaaccaatcaaccccat

SEQ ID NO: 140195 - DNA, 2472 bp, Homo sapiens; identical to SEQ ID NO: 123273

SEQ ID NO: 140196 - DNA, 2115 bp, Homo sapiens
tcaacgaagatgctgcggggtaactacatccactacggtgttcgcgatctcggtatgaccgcgatttgctaacggtatctccctgcacggtgggcttcctgccgtacaacctccaccttcctgatgttcgtggaatacgcacgtaacgccgtacgtatggctgcgctgatgaaacagcgtcaggtgatggtttacacccacgactccatcggtctgggcgaagacggcccgactcaccagccggttgagcaggtcgcttctctgcgcgtaaccccgaacatgtctacatggcgtccgtgtgaccaggttgaatccgcggtcgcgtggaaatacggtgttgagcgtcaggacggcccagaccgcactgatcctgtgcagccagagtagcgtagccaggctaccaattggggtaattttcggtcccaaatcgcagccaatcacattggcataaaccatcgcttctttgataacgccagatgccgtgctgccatcaatggacaacgcgccaaccagtaccgtcggcatattgttcataatagaagagaggaaggcggtgaggaatccggtgccgagcgtcgcggcccacaggccgttatccgccagcacgttgagtacgccagaaagatattccgttaatccggcattgcgcaggccataaaccaccagatacatgccgagcgagaagatgacaatctgccagggggcaccgcgcaggactttacccgtattaatcgcatgaccgcgtttagcgacgacaaataatatcagcgcgcccacagctgcaatggcgctcaccggaatgccgagcggttccaggacgaaaaatcccaccagcagaagcagtaaaacaacccagccagtttttctgccgtttctggcacgctgcggtttgtgctggtgcggatgggtaatcatcgggaagccagcagcggttgctatacggcgatggcgcgatgagtgatgcgggtaaacagctggctgaacgtgagcattaccgtttacgtcgcgatgcgcaagctctcgcgcagtggaatggcgaaacgcttcctgttgatccactaaacgatgccgtcctttctgacgacgactggcttgaactggccggttttgctttcgctcatcgtccgctattaacgtcgttaggttgcttattgcgtctgttacaaaccagtgaactggcattaccggcgctgcgcaacagttgttactgcttttccacggtgtcggggataacccggtggcaatgggggaaataggcaactggtttgcaccgctgtttcctgatgcgctggccagttgcccacccggtaaacgcgctttacgcaccaggaagttgagcgcgcgctgggtatccatcagacacaggcgaactttccagccgatatcttccagttccgccagagtggagagcgcctcgtcgtactcatcgccctgatgcccttccataatcacccggctcaactgctccaggtcgctatagatattttcaatttcatctgccaactgttcgattttggtttcgaacagatccagcagcaactcgtaggcgttaccgttcttggcatcgacaccaatgtgggccttcatgccaaagtgccactgattgcctttcttggtctgatgcatctccggatcgcgttgctgctctttgttcttggtcgagctgggtgcctcaatgatggtggcatcgaccaaggtgccttgagtcatcatgacgcctgcttcggccagccagcgattgatggtcttgaacaattggcgggccagttgatgctgctccagcaggtggcggaaattcatgatggtggtgcggtccggcaaggcgctatccagggataaccgggcaaacagacgcatggaggcgatttcgtacagagcatcttccatcgcgccatcgctcaggttgtaccaatgctgcatgcagtgaatgcgtagcatggtttccagcggataaggtcgccggccattaccagccttggggtaaaacggctcgatgacttccaccatgttttgccatggcagaatctgctccatgcgggacaagaaaatctcttttctggtctgacggcgcttactgctgaattcactgtcggcgaaggtaagttgatgactcat

SEQ ID NO: 140197 - DNA, 1134 bp, Homo sapiens
atgagtcatcaacttaccttcgccgacagtgaattcagcagtaagcgccgtcagaccagaaaagagattttcttgtcccgcatggagcagattctgccatggcaaaacatggtggaagtcatcgagccgttttaccccaaggctggtaatggccggcgaccttatccgctggaaaccatgctacgcattcactgcatgcagcattggtacaacctgagcgatggcgcgatggaagatgctctgtacgaaatcgcctccatgcgtctgtttgcccggttatccctggatagcgccttgccggaccgcaccaccatcatgaatttccgccacctgctggagcagcatcaactggcccgccaattgttcaagaccatcaatcgctggctggccgaagcaggcgtcatgatgactcaaggcaccttggtcgatgccaccatcattgaggcacccagctcgaccaagaacaaagagcagcaacgcgatccggagatgcatcagaccaagaaaggcaatcagtggcactttggcatgaaggcccacattggtgtcgatgccaagagtggcctgacccacagcctggtcaccaccgcggccaacgagcatgacctcaatcagctgggtaatctgctgcatggagaggagcaatttgtctcagccgatgccggctaccaaggggcgccacagcgcgaggagctggccgaggtggatgtggactggctgatcgccgagcgccccggcaaggtaagaaccttgaaacagcatccacgcaagaacaaaacggccatcaacatcgaatacatgaaagccagcatccgggccacggtggagcacccatttcgcatcatcaagcgacagttcggcttcggcctccgaggcacagacagcagcctcctgctacaggaaccggccccgcagtgtggccagtctgacctagtctgccacccttaccccagtcctactttcaaggaaggagtagcctcagtacccctccctgagcttggtgtccaggaccccagcctgactgctacatcagacctctcagagttccctggattttccagacccagttcagaagagacctgtgacacgaagcctgctgctgcaggccctgctactggactcctctccctctga

SEQ ID NO: 140198 - DNA, 2034 bp, Homo sapiens; identical to SEQ ID NO: 123283

SEQ ID NO: 140199 - DNA, 1875 bp, Homo sapiens; identical to SEQ ID NO: 131853

SEQ ID NO: 140200 - DNA, 1675 bp, Homo sapiens
atgagtcatcaacttaccttcgccgacagtgaattcagcagtaagcgccgtcagaccagaaaagagattttcttgtcccgcatggagcagattctgccatggcaaaacatggtggaagtcatcgagccgttttaccccaaggctggtaatggccggcgaccttatccgctggaaaccatgctacgcattcactgcatgcagcattggtacaacctgagcgatggcgcgatggaagatgctctgtacgaaatcgcctccatgcgtctgtttgcccggttatccctggatagcgccttgccggaccgcaccaccatcatgaatttccgccacctgctggagcagcatcaactggcccgccaattgttcaagaccatcaatcgctggctggccctaggcgtcatgatgactcaaggcaccttgttcgatgccaccatcattgaggcacccagctctaccaagaacaaagagcagcaacgcgatccggagatgcatcagaccaagaaaggcaatcagtggcactttggcatgaaggcccacattggtgtcgatgccaagagtggcctgacccacagcctggtcaccaccgcggccaacgagcatgacctcaatcagctgggtaatctgcttcatggagagaagcaatttgtctcagcgatgccggctaccaaggagccacagcgcgaggagctggccgaggtggatgtggacctgctgatcgccgagcgtcccggcaaggtaaaaaccttgaagcagaatccgcgcaagaacaaaacggccatcaacatcgaatacatgaaagccagcatccgtgccagggtggagcacccgtttcgcatcatcaagcggcagttcggcttcgtgaaagccagatacaaggggctgctgaaaaacgataaccaactggcgatgttattcaccctggccaacctgtttcgggtggaccaaatgatacagctgccaacgtatgagttatcgtcgggtatgggcgctgcttcgcagacaggcagaacttgatggtatgcctgcgatcaatgccaaacgtgtttaccggatcatgcgccagaatgcgctgttgcttgagcgaaaacctgctgtaccgccatcgaaacgggcacatacaggcagagtggccgtgaaagaaagcaatcagcgatggtgctctgacgggttcgagttctgctgtgataacggagagagactgcgtgtcacgttcgcgctggactgctgtgatcgtgaggcactgcactgggcggtcactaccggcggcttcaacagtgaaacagtacaggacgtcatgctgggagcggtggaacgccgcttcggcaacgatcttccgtcgtctccagtggagtggctgacggataatggttcatgctaccgggctaatgaaacacgccagttcgcccggatgtcgggacttgaaccgaagaacacggcggtgcggagtccggagagtaacggaatagcagagagcttcgtgaaaacgataaagcgtgactacatcagtatcatgcccaaaccagacgggttaacggcagcaaagaaccttgcagaggcgttcgagcattataacgaatggcatccgcatagtgcgctgggttatcgctcgccacgggaatatctgcggcagcgggcttgtaatgggttaagtgataacagatgtctggaaatatag

SEQ ID NO: 140201 - DNA, 1746 bp, Homo sapiens; identical to SEQ ID NO: 123278
  misc_feature (1)...(1746): n = a,t,c or g

SEQ ID NO: 140202 - DNA, 1917 bp, Homo sapiens; identical to SEQ ID NO: 123280

SEQ ID NO: 140203 - DNA, 1611 bp, Homo sapiens
tcatcgggtgccgcgcattcgaaattcgcgcacaccgtcggctcgacgagcacggtttgtggggatgagatgagcagctcgatggttccggagccggtcgcggagcctcgggacacgcaccgagaggtccacgtcgacgcaccccacggcacctcgtcgcgagcggcacgcgcaactacccagccacacaacacaccggagggcaggacgcggcacccctaggaggtggaaggtccctggccctggctccatgtggcacgtgctctggtccttctccagcagcaggcttgtcagaccctcccagtccttcagctgagtccctgcacagtcccacaggttgtctactaagtaagcagcgtggtcgtggagctgtagcacaccattattgagcgtagtctggtttgccgcgccacccatttgaacaatttgataaccgtcatttaatactgagtattctgcggcgccattcatttcaatgtactgataccctccgttaatttcagtattattacttacaccaaattcttttatatgctgttctccgccaggattgattttcgtattattggcggtcccataaaccagctggatatctttttccaggacaacaccatcaactgtctcaccatactcaacagttgatgccaatggtatcatttggtccgcccgaaacaggttggccagcgtgaataacatcgccagttggttatcgtttttcagcaaccccttgtatctggctatcacgaagccgaactgtcgcttgatgatgcgaaatgggtgctccacccctggcccgggatgctggctttcatgtattcgatgttgatgggcggtttgttcttgcgtggatgctgcttcaaggttcttaccttgccggggcgctcggcgatcagccagtccacatccacctcggcaagctcctcggcgctgtggcgccctttggtagccggcatcggctgagacaaattgctcctctccatgcagcagattacccagctgattgaggtcatgctcgttggccgcggtggtgaccaggctgtgggtcaggccactcttggcatcgacaccaatgtgggccttcatgccaaagtgccactgattgcctttcttggtctgatgcatctccggatcgcgttgctgctctttgttcttggtcgagctgggtgcctcaatgatggtggcatcgaccaaggtgccttgagtcatcatgacgcctgcttcggccagccagcgattgatggtcttgaacaattggcgggccagttgatgctgctccagcaggtggcggaaattcatgatggtggtgcggtccggcaaggcgctatccagggataaccgggcaaacagacgcatggaggcgatttcgtacagagcatcttccatcgcgccatcgctcaggttgtaccaatgctgcatgcagtgaatgcgtagcatggtttccagcggataaggtcgccggccattaccagccttggggtaaaacggctcgatgacttccaccatgttttgccatggcagaatctgctccatgcgggacaagaaaatctcttttctggtctgacggcgcttactgctgaattcactgtcggcgaaggtaagttgatgactcat

SEQ ID NO: 140204 - DNA, 3952 bp, Homo sapiens
atgaaactgatggccattcaggaacaggcgcgcggcgaacaatgcttccgtgattccgagtgggatttgcagttccacattcaggtcgctctggcgacgcagaactccgccctggcggctatcgtggaaaaaatgtggacccagcgtagtcataacccgtactggaaaaaactgcacgaacacattgattcccgtaccgtcgataactggtgtgatgaccacgatcaaatcctcaaggcgctgattcgcaaagatcctcatgctgctaagctggcaatgtggcagcatctggaaaacaccaagatcatgttatttaacgaaaccagcgacgacttcgagttcaatgccgaccgctatctattcgccgaaaacccggtggcgattgcgaaagaactggagctgaccgcatcagcggaaattttactctgggatgactattttgcacctggctacggcgtgccgaacgacgaaggcatggaagcagtgaaattgctgccgcggctggaaggcattctgcttgatcctgtgtataccggaaaagcgatgcgggggctgattgacggtatcagtcagaaacgcttcaaagatgaagggccgattctgtttattcatacccggcggtgcgcctgcgctgttcgcctatcatccccacgtttagctccggaaacgctcatgcaagaaagtatacaactggttattgattccttgccgttcctgctgaaaggggctgggtatacgctgcaactcagtatcggcggcatgttttttggcttactgctcgggtttattctcgcgctgatgcgtctgtcgccaatctggcccgtgcgctggctggcgcgtttttatatctctatttttcgtggtacgccgctcatcgcacaactgtttatgatctattacggcctgccgcagtttggtatcgaattagatcccattccgtcagcaatgattggtctgtcgttgaacactgccgcctatgctgccgaaacgctgcgcgccgccatttcttctattgataaaggtcagtgggaagcggcagccagtattggtatgacgccgtggcagaccatgcgtcgcgcgattttgccacaggcggcgcgtgtggcgttgccgccgctgtcgaacagctttattagcctggtaaaagatacgtcgctggccgcgacaatccaggtgccggagctgttccgtcaggcgcagttgattacctcgcgtacgctggaggtgttcaccatgtatctggcggcttcgctcatctactggatcatggcgactgtgttatcgacgttgcatctgacaaatggcagcgcattagctgggaagaagcattctccccaacgaaaccgggatgctgacccagaaatttgcccgctccctcgggatgctggcggtagacaaccaggcgcgcgtctgacacggaccaacgcaagtcttgctccaacatttggtcgcggtgcgatgaccaaccactgggtggatatcaaaaacgctaacgtcgtgatggtgatgggcggtaacgctgctgaagcgcatcccgtcggtttccgctgggcgatggaagcgaaaaacaacaacgacgcaaccttgatcgttgtcgatccccgttttacgcgtaccgcttctgtggcggatatttacgcgcctattcgttccggtacggacattacgttcctgtctggcgttttgcgctacctgatcgaaaacaacaaaatcaacgccgaatacgttaagcattacaccaacgccagcctgctggtgcgtgatgattttgctttcgaagacggtctgttcagcggctacgacgctgaaaaacgtcaatacgataaatcgtcctggaactatcagctcgatgaaaacggctatgcgaaacgcgatgaaacactgactcatccgcgctgtgtgtggaacctgctgaaagagcacgtttcccgctacacgccggacgtcgttgaaaagggatcctctagagaccagagatcccagtggtttaagccatcatccgcaaattatccgtgcctggcagcagggggcggacaatttggcatcggtagcggcggctccggtcacgtcagcggttatagcgtggtgcatcaggcactggaagaagagctggccgagtggcttggctattggcgggcactgctgaatatctctggtttcgtcgctaatcaggcagttattgccgcgatgatggcgaaagaggaccgtattgctgccgaccggcttagccatgcctcattgctggaagctgccagtttaagcccgtcgcagcttcgccgttttgctcataacgatgtcactcatttggcgcgattgcttgcttccccctgtccggggcagcaaatggtggtgacagaacgcgtgttcagcatggacggcgatactgcgccactggcggaaatccagcaggtaacgcaacagcacaatcgctggttgatggtcgatgatgcccacggcacgggcgttatcggggagcaggggcgcggcagctgctggctgcaaaagccgtgcgttacaactggcagaaaaactgcgtcagcaaggctgctgggtcacggcgattcgcccgccaaccgtacccgctggtactgcgcgactgcgcttaacgctaacccgatatcgaccgtctgctggaggtgctgcatggcaacggttaataaacaagccattgcagcggcatttggtcgggcagccgcacactatgagcaacatgcagatctacagcgccagagatgtgacgccttactggcaatgcttccacagcgtaaatacacccacgtactggacgcgggttgtggacctggctggatgagccgccactggcgggaacgtcacgcgcaggtgacggccttagatctctcgccgccaatgcttgttcaggcacgccagaaggatgccgcagaccattatctggcgggagatatcgaatccctgccgttagcgactgcgacgttcgatcttgcatggagcaatctcgcagtgcagtggtgcggtaatttatccacggcactccgcgagctgtatcgaggtggtgcagtgcctcagaggatccctaacctccgccatttaagtgaattcagcagtaagcgccgtcagaccagaaaagagattttcttgtcccgcatggagcagattctgccatggcaaaacatggtggaagtcatcgagccgttttaccccaaggctggtaatggccggcgaccttatccgctggaaaccatgctacgcattcactgcatgcagcattggtacaacctgagcgatggcgcgatggaagatgctctgtacgaaatcgcctccatgcgtctgtttgcccggttatccctggatagcgccttgccggaccgcaccaccatcatgaatttccgccacctgctggagcagcatcaactggcccgccaattgttcaagaccatcaatcgctggctggccgaagcaggcgtcatgatgactcaaggcaccttggtcgatgccaccatcattgaggcacccagctcgaccaagaacaaagagcagcaacgcgatccggagatgcatcagaccaagaaaggcaatcagtggcactttggcatgaaggcccacattggtgtcgatgccaagagtggcctgacccacagcctggtcaccaccgcggccaacgagcatgacctcaatcagctgggtaatctgctgcatggagaggagcaatttgtctcagccgatgccggctaccaaggggcgccacagcgcgaggagctggccgaggtggatgtggactggctgatcgccgagcgccccggcaaggaaaaaggggaggaaggacgactccccggaccctacggggtgcctcggttgaacaacgaattacgccggtcacccccaccgagggaatttccccccgcccttgggggaaagcgacctcggacccccccgtgcccacggcgggtccgtggctctgatcgcacgaccgcac

SEQ ID NO: 140205 - DNA, 4763 bp, Homo sapiens
ctacagcgtgttgccttcccagacaacttcgcggtagtgcttcacgtcggtgtcgccttcagtgctgataaccagcaccacggcatctttgttcagcgccagtttttccatcaggctttgacgttgcgggtgataatgaaccgctgcgagaacgcccaaaccgacagcgccggattcaccggagatgatgcgcgggtcgttgccgtacggattacccagcacgcgcatacctaatgcggcaacgcgccaacggttgacgatgtcgcctttgacgccggagcgataaatacagtcagctttgtcaggttcaacaataatgctgtgcagattttgcgggctatagacgtcgaccagataacccagcacaccaccggccattgctccgacaccggcttgcagcagaacgtgcgtcggggttacgcccatttcacgcatttgctcgacggcttcatctgccagggttgcgtagccttgcatgatccaggttgggattttggtgtaaccttcccatgccgtgtcctgtaccacttcccagccgtgctgctgcgcgtgttgcatggtcaggcgaacggtatcgtcatagttcatatccgtgacgatgcactcggcaccgaggttcagaatggcgtcaacgcgttcctgagcagaacctttcggcatgtaaatcaccgcattctgtccgagttgctgtgctgcccacgccacaccgcgcccgtggttgccgtcggtggtggtcgcgaaagtcattttttcgccgatggcatttttcaggtgctcaaatgacagcgtttcgatatcaagatgatatttttcacacaataattgagcgatggcgtacgcaccgccaagcattttgaaggcgttcagaccgaatcgttttgattcgtctttgacgagaattttcttcacaccaaaaaggtttgcgagatcgtccagcgcataaagcggtaatacctggcccggccatacatgaatcatgaaagccagcatccgggccaggttggagcacccatttcgcatcatcaagcgacagttcggcttcgtgaaagccagatacaaggggttgctgaaaaacgataaccaactggcgatgttattcacgctggccaacgcttcgagatacttaacgccaaacaccagcgaaatgagcggcttgccgacgatcaacaccgcgagcgccaccagaataccgattccgcccgccagtaaaccggacttcacacctaacaaccacggtctggtggtgcgcggatctaaacgcatcacctctgggtaaaaacttttacccagcaaacccgctggcgttccggcggcgtcgaagaatgtcatggcgattttaaataacccggcggcagcgggtcctaacacgatccccaccaacactgtgctgcacgagttacgcgccgaccagatggagtgggcaatgttggttgaccagacaaaactccacgcgcctttaatgtatcgggcagactcaaacagattcaatttgaaggcgttatggatatttcggcggcgtaattcgcgcgcggcaaaccaccagtacatggtgccgccaaccagattcgacacgtaccaggcaataacaaaacccgcaaaaccaaagtcaaaataccaggctacgacgctccccgctgcgcgcagaacaggtttcgtcgcctgctgtacagcaattaaatcgaagcgatctaccggacgccaaatgccgtcggcgtggaggaagccttgaaggattgacgggcataaagggtgcagccaaaattggtctccgaccatgacgggcaggatggggtagggaggcccgaaatgccccggccgtaaaattccggaacggaccatctcgttctgttgctgtgtgccagagatacagcgccgcttcgtcggcttcgccggtacgaatacgaatgacgcgttgcaattcagcgacgaagatttgccgtcgccaatttttccggtgtaagccgcttttggcaggaaattgacgctgtattccgccccccggtacagctcggcatgccctttctgacgcccgaaacctttcacttcggtgacggtcaggccctgaataccaatggaagataacgcttcacgaacgtcttccagcttgaatggtttgattatcacggtcaccagcttcatagatcccctccggtcagaattcggtaatggttgcacgctggctgccagctcttcgcccgcaagttgcagttgatacatctgccagtagcgtccctgggccgccagcagttgctggtgagtgccctgctccacggcttgcccacgatgaagcaccagaatggtgtcggcatcacaatggtcgataagcggtgagcaatcacgccgcagagcatgttgaatcgcctgttcagtaccggagtcaatgctggcggttgcctcatcaaggatcaggatttgcggcgtctcgaccagcacgcgcgccagtgccagcagttgcttttgcccaactgagagattattcccctgctcgcccagcggcgtgtaaataccgtcgctcatgctacgcgccagctccgccagttgcacggtttccagcgcctgccagacgcgttcttcggagatatcccgacccagcgtcacgttggcgaggaaggtatccgccagcaccaccggatcttgctgcaccattgccacgccctggcgcagcgcgctgtgacttagcgaacttaatggacgaccatcaaggcgaatctcaccttccgttagcgggtaatagcccatcaataaactggcgagggtgcttttgccactgccggtatgcccgaccagcgccacaaaattgcgcgaaggcacagagagattaatgttctttaacaccagatagtcatcgcgataagcaaatgacacgttatcgacttcgatggtgccactctggtactgtggctgattaaggccgatgaccgggcgctgacggtggcatgaacatttttcatccatcaggtgcattggagaggtataccaggcataaggtgctgtttgttcatccagcagtcggataaggccgaacctaccagcggtggtccacctcaaatgtcgcaacggcccaagcggccggcccgggcctcacccccatcaacccattcgaggaggcatcggacccggccaccaccgccaaacacacagtacatcacagcaaggcacaactgcaacatgcaccatcacaaacaattggtacaagaagccccacaggacctgaacttttgattacggctgatgatcgggcactggcgactgatgagcatttttaccgtcaggtgattggcgaagcataccggcataagatgctgtttgttatcagccagtcagacaaagctgaacccaccagcggtggaaatatcctttccacagagcagaaacaaaatatcagccgcaaaatctgcctgctgcatgagctattccagcccgtgcatccggtgtgtgccgtgtcggttcgcctgcagtggggactaagggtgatggcagagcggatgattaagtgtctgccgcgtgaggccagcagcccggtagtagcgctactgcaacatccctttcgaacaacggtagcccgggagcaggcacgtgacgatttcggtgaaaccgtaggtgccatactcgatacgtggcccgcgctgtctgggatttcttcttctgagtgtttaattctgccctattattctccgagccctgtcgcaagtgcggcagggctttctttatttgttttacccatactgaggagtctgcttatgacccgtctggcttcgcgctttggcgctgcaaatcttattcgccgtgaccgtccgttaacccgtgaagagtatttcgcgtggtgccagcgtatcagtgagatcggacaagatctctctctcgcatggagcagatctgcatggcagaatatgaccgctgtcatcgagccgttttatcccaaggcgggcaatggccgacggccctatccgctggagaccatgctgcgtattcactgcatgcagcattggtacaacctgagcgacggtgccatggaagatgccctgtacgaaatcgcctccatgcgcctgtttgcccgattatccctggatagcgccctgccggatcgcaccaccatcatgaatttccgccacctgctcgagcagcatcaactggcccgtcaattgttcaagaccatcaatcgctggctggccgaagcaggcgtcatgatgacccaaggcactttggtggatgccaccatcattgaggcacccagctctaccaagaacaaagagcagcaacgcgatccggagatgcatcagaccaagaaaggcaatcagtggcactttggcatgaaggcccacattggtgtcgatgccaagagtggcctgacccacagcctggtcaccaccgcggccaacgagcatgacctcaatcagctgggtaatctgcttcatggagagaagcaatttgtctcagccgatgccggctaccaaggagcgccacagcgcgaggagctggccgaggtggatgtggactggctgatcgccgagcgtcccggcaaggtaaaaaccttgaagcagaatccgcgcaagaacaaaacggccatcaacatcgaatacatgaaagccagcatccgtgccagggtggagcacccgtttcgcatcatcaagcggttttcgtgcagcgatgcgacgtccaggggcgtgaaacacagtttaaggcgctgctctatccgttcggcaacatatctctgcacttgccttcctcggcatgattttgctgctgatgtgcacgatggatga

SEQ ID NO: 140206 - DNA, 2781 bp, Homo sapiens
atgtttggtggtgatctcacccgtcgttatgggcaaaaggtgcataagctgacgctgcacggcggttttagctgccctaaccgtgacggtaccatcgggcgtggtggctgcacattctgtaatgttgcctcgtttgccgatgaagcgcagcagcatcgttccattgccgagcaactggcgcaccaggcgaatttagttaaccgcgctaaacgctatctggcctactttcaggcgtataccagcacctttgcggaagttcaggtgctgcgttctatgtatcagcaggcggtgagccaggccaatattgtcggtttgtgtgtgggtacccgcccggactgcgtgccggatgcggtgctggatctgctttgcgaatataaggaccagggttacgaagtgtggctggagctggggctacaaaccgcccacgacaaaacactgcatcgcatcaaccgcggccatgattttgcctacagtgatattactgaattcagcagtaagcgccgtcagaccagaaaagagattttcttgtcccgcatggagcagattctgccatggcaaaacatggtggaagtcatcgagccgttttaccccaaggctggtaatggccggcgaccttatccgctggaaaccatgctacgcattcactgcatgcagcattggtacaacctgagcgatggcgcgatggaagatgctctgtacgaaatcgcctccatgcgtctgtttgcccggttatccctggatagcgccttgccggaccgcaccaccatcatgaatttccgccacctgctggagcagcatcaactggcccgccaattgttcaagaccatcaatcgctggctggccgaagcaggcgtcatgatgactcaaggcaccttggtcgatgccaccatcattgaggcacccagctcgaccaagaacaaagagcagcaacgcgatccggagatgcatcagaccaagaaaggcaatcagtggcactttggcatgaaggcccacattggtgtcgatgccaagagtggcctgacccacagcctggtcaccaccgcggccaacgagcatgacctcaatcagctgggtaatctgctgcatggagaggagcaatttgtctcagccgatgccggctaccaaggggcgccacagcgcgaggagctgtccgaggtggatgtggactggctgatcgccgagcgccccggcaaggtaagaaccttgaaacagcatccacgcaagaacaaaacggccatcaacatcgaatacatgaaagccagcatccgggccagggtggagcacccatttcgcatcatcaagcgacagttcggcttcgtgaaagccagatacaaggggttgctgaaaaacgataaccaactggcgatgttattcacgctggccaacctgtttcgggcggaccaaatgatacaccactcgcatctcgccataacgactgcgtttgcgaatgagcctgtgccccagaaagataaagccgtcattaacatgggggattttagtcttatccatgttcagcctgagtttcagactgccttcgagcacaccccgacactcctccctgatggcttccacctgtgctttggtgcctttgacgatgaggacaaaatcatcggcatagcggcagtacgccaccgcgggtttccactgccagttttctctgaccgccgtacttcggccccgttggatactgttattccagtaccaccgatcttttctggctttcccgctcaggtagcgctcatgcaggatcttggcatcgcccttgatgtcgccaaccagctgcatgtgccaatgccgctgggggccgcctcacgggaggtttatagccaggcgcgcgcagcgggtcgcggtcgccaggactggtccgccattctggaacaggtccgtgtcagtgccgggatgactgccaaatacaccatcaacgacattacgcgcgcatcgggcggttttgccatgctggcggtcgatcagcgcgaagccatgcgcatgatgtttgccgcggctggggcacccgctccggtagccgatagcgttttaactgatttcaaagttaacgctgcaaaggccctctcgccttatgcctcggcgattctggtagatcaacaattctgctaccgccaggtggttgagcaaaacgcgattgccaaaagttgcgccatgattgtcgccgccgatgagttcattcctggcaacggtattccggtcgatagcgtggttattgaccgcaaaatcaatccgctacagatcaaacaagacggtggcaaagccttaaaactgctggtgctgtggcgtagtgatgaagatgcgcagcaacgtctggatatggtgaaagagttcaacgaactgtgccactcacacggtctggtaagcatcattgagccagtcgtccgcccaccgcgtcgtggcgataaattcgatcgcgaacaagcgatcatcgatgccgccaaagagctgggcgacagtggcgctgacctctacaaagttgaaatgccgctttatggcaaaggtccgcaacaagagcttctctgtgcttcacaacgtctgaatgaccatatcaatatgccatgggtgatcctctcttccggtgtcgacgaaaaactgttcccgcgtgccgtacgcgtggcaatgacggcgggcgcatcgggattcctggcaggccgtgcagtctgggcatcggtcgtcggtttaccagacaacgagctgatgctgcgtgacgtttgcgcaccgaaattacaacaacttggcgatatcgtcgacgaaatgatggctaaacgccgctaa

SEQ ID NO: 140207 - DNA, 3109 bp, Homo sapiens
atgcagtattggggaaaaatcattggcgtggccgtggccttactgatgggcggcggcttttggggcgtagtgttaggcctgttaattggccatatgtttgataaagcccgtagccgtaaaatggcgtggttcgccaaccagcgtgagcgtcaggcgctgttttttgccaccacttttgaagtgatggggcatttaaccaaatccaaaggtcgcgtcacggaggctgatattcatatcgccagccagttgatggaccgaatgaatcttcatggcgcttcccgtactgcggcgcaaaatgcgttccgggtgggaaaatcagacaattacccgctgcgcgaaaagatgcgccagtttcgcagtgtctgctttggtcgttttgacttaattcgtatgtttctggagatccagattcaggcggcgtttgctgatggttcactgcacccgaatgaacgggcggtgctgtatgtcattgcagaagaattagggatctcccgcgctcagtttgaccagtttttgcgcatgatgcagggcggtgcacagtttggcggcggttatcagcagcaaactggcggtgctgcgtggccgctctccatccttgttattgacaaattaatatatcgtcgcccttgctgtggaacactgcagccagatgtgattattacaccggttctgccggtggcctgcattagcacctggcgccatactgaggcagatcccaaagaaacagcaaagggttggcctccactactctccgatgtcctatgtgtcttggagataccgcgtctgccactggacgataacggtattctgtttatcgaaaacgttggcaacctcgtatgcccggccagcttcgatctcggtgaaaaacacaaagtggcggtgctttccgttaccgaaggtgaagacaaaccactgaaatatccgcatatgtttgccgccgcctcgctgatgctgctcaacaaagttgacctgttgccgtatctcaactttgacgttgaaaagtgcatcgcctgcgcccgcgaacggcgaagggatggaccagtggctgaactggctggagacacagcgatgtgcataggcgttcccggccagatccgcaccattgacggcaaccaggcgaaagtcgacgtctgcggcattcagcgcgatgtcgatttaacgttagtcggcagctgcgatgaaaacggtcagccgcgcgtgggccagtgggtactggtacacgttggctttgccatgagcgtaattaatgaagccgaagcacgcgacactctcgacgccttacaaaacatgtttgacgttgagccggatgtcggcgcgctgttcgccctggcgcagacccgcgagcaaggctacgccctggacagcgaagagaacgagcagggcgtgcgctgcgtggcggtgccggtgtggaaccacgagtcccgcgtcatcgacgacctgagcctgtcgacgctgacctcccgcgctggtaatggccggcgaccttatccgctggaaaccatgctacgcattcactgcatgcagcattggtacaacctgagcgatggcgcgatggaagatgctctgtacgaaatcgcctccatgcgtctgtttgcccggttatccctggatagcgccttgccggaccgcaccaccatcatgaatttccgccacctgctggagcagcatcaactggcccgccaattgttcaagaccatcaatcgctggctggccgaagcaggcgtcatgatgactcaaggcaccttggtcgatgccaccatcattgaggcacccagctcgaccaagaacaaagagcagcaacgcgatccggagatgcatcagaccaagaaaggcaatcagtggcactttggcatgaaggcccacattggtgtcgatgccaagagtggcctgacccacagcctggtcaccaccgcggccaacgagcatgacctcaatcagctgggtaatctgctgcatggagaggagcaatttgtctcagccgatgccggctaccaaggggcgccacagcgcgaggagctggccgaggtggatgtggactggctgatcgccgagcgccccggcaaggtaagaaccttgaaacagcatccacgcaagaacaaaacgggcatcaacatcgaatacatgaaagccagcatccgggcccaggtggagcacccatttcgcatcatcaagcgacagttcggcttcgtgaaagccagattcaaggggttgctgaaaaacgataaccaaatgggcgatgtttttcacgctgggcaacctgtttcgggcggaccaaatgatacaacgggttcttccccccatgtggagggcttcttgcgagaaccgaatggccattttgggaccaccctcttactgcctagtgaaggcattggttataggctttcaaaaaggcggcttttttgggctagacccccccaaggccagggaagcccgaaaaggggcctcgctgacttataggaggacattaaaggggtttgatcaacgggaaaatttggaggcagataggtacaacagaaagagacacccgatgtctgctacttgcggcggtagtttttccgtgtgtgattgcattatcgtgcgttatttcttcgcttccggtagtgcctatatcgttgctatgttaccggtatttgccatgctggcgaacgtctccggcgcaccgttaatgttaaccgcgctggcactgttgttctccaactcctatggcggcatggttactcactatggcggcgcggcaggtccggtcatctttggcgtgggttataacgatattaaatccttgtgcttcgatgaacgtacccgtattgacgttgcggatacgtacgcgagtaactggcgaagtcgctgcaatcaaaccattttcaatggcgaatgccccaacaccagacagcatattgccgcagttaggcgtggtatcgacacgttgctcatgaacgattacctgcgcaaacagataatcgacatcagcacgcggatcgctggaacggctaataatggcgactttactggtcagtggattaccgccgccaataccgtcaatttccagatcgttgccggaacccataattgccatcaatattttatcgcgctgcgtttgatcttcgggtaa

SEQ ID NO: 140208 - DNA, 2802 bp, Homo sapiens
atgacgcagattttcacgggtacattagtggaagccgatcctttccacgccgtgacgctcgttgccaatcacgacacccaaccgttgcaagccctcgaagcgccggtcgaaccgtggtttaaaccgctggcgtatgccttaattttgttgcgggaaaatggcgttccttcggtattctatccggacctctacggtgcgcattacgaagatgtcggtggtgccgggcaaacctatccgatagatatgccaataatcgaacagcttgatgagttaattctcgcccgtcagcgtttcgcccacggtgtacagacgttatttttcgaccatccgaactgcattgcctttagccgcagtggcaccgacgaatttcccggctgcgtggtggtcatgtcgaacggggatgatggcgaaaaaaccattcatctgggagagaattacggcaataaaacctggcgtgattttctggggaaccggcaagagagagtagtgaccgacgaaaacggcgaagcaaccttcttttgcaacggcggcagcgtcagcgtgtgggttatcgaagaggccgccaacaatcgtcagtacgactacggagctggccataaaataccagttatcaattacactgacgtgcatttgcggattgaacgcagctgccgcttccgtgctgatccccgacagcaacacgagctgcaactctccagcaaactggcagttcatgatgtgctgaccaatatttataatcggcgctactttttcaacagcgtagagtcattattgtcgcgacctgttgttaaggacttctgtgtcatgctggttgatattaatcagttcaaacgcatcaatgcccaatggggacatcgtgtgggtgataaagtgctggtttcaattgtcgatattatccagcaaagcatccgccccgatgatattttagcgcgactggagggtgaggtgtttggcttgctatttaccgaactcaatagtgcccaggcaaaaatcattgcggaacgtatgcgtaaaaatgtcgaactcctgaccggctttagtaacagatatgatgttcctgaacaaatgaccatcagtattggcacggttttttcaacgggtgacacgcgtaatatctcgcttgtcatgacggaagcagataaagccttacgcgaagcgaaaagcgaggggggcaacaaacattggtacaacttgagcgatggcgcgatggaagatgctctgtacgaaatcgcctccatgcgtctgtttgcccggttatccctggatagcgctttgccggaccgcaccaccatcatgaatttccgccacctgctggagcagcatcaactggcccgccaattgttcaagaccatcaatcgctggctggccgaagcaggcgtcatgatgactcaaggcaccttggtcgatgccaccatcattgaggcacccagctcgaccaagaacaaagagcagcaacgcgatccggagatgcatcagaccaagaaaggcaatcagtggcactttggcatgaaggcccacattggtgtcgatgccaagagtggcctgacccacagcctggtcaccaccgcggccaacgagcatgacctcaatcagctgggtaatctgctgcatggagaggagcaatttgtctcagccgatgccggctaccaaggggcgccacagcgcgaggagctggccgaggtggatgtggactggctgatcgccgagcgccccggcaaggtaagaaccttgaaacagcatccacgcaagaacaaaacggccatcaacatcgaatacatgaaagccagcatccgggccagggtggagcacccatttcgcatcatcaagcgacagttcggcttcgtgaaagccagatacaaggggttgctgaaaaacgataaccaactggcgatgttattcacgctggccaacctgtttcgggcggaccaaatgatacacagtcaatattccgcgttgaggagacatcaagatggatcagtctcgtttaagccggagacacacacctgcgatgctcatcgccctgctctaaagccggcgaatgattatgtccgtaccttcttccgtggcgttgatattagtcaggtattcagtgcgaaagatattgcccgccggacaccgaatggcttaattcgtaaaacccctggcttcggcccacgttcggcactgaaattattgcaggatgaagatcgcgaatatggctacgttatcgaacgcggtaataagtttgtcggcgcagtctccatcgattcgcttaaaaccgcggctgtccctcctgttcagctactgacggggtggtgcgtaacggcaaaagcaccgccggacatcagcgctatctctgctctcactgccgtaaaacatggcaactgcagttcacttacaccgcttctcaacccgccgggcagtgacgtcatcgtctgcgcggaaatggacgaacagtggggatacgtcggggctaaatcgcgccagcgctggctgttttacgcgtatgacagtctccggaagacggttgttgcgcacgtattcggtgaacgcactatggcgacgctggggcgtcttatgagcctgctgtcaccctttgacgtggtgatatggatgacggatggctggccgctgtatgaatcccgcctgaagggaaagctgcacgtaatcagcaagcgatatacgcagcgaattgagcggcataacctgaatctgaggcagcacctggcacggctgggacggaagtcgctgtcgttctcaaaatcggtggagctgcatgacaaagtcatcgggcattatctgaacataaaacactatcaataa

SEQ ID NO: 140209 - DNA, 5471 bp, Homo sapiens
ctgctgtgttctgttcacacccttctctgactgtcggtgggatctgtaatgcatgtgtttggcatagtaaagtgttaattaataatctgcggacaaagaagactatataggaatcttgagccatcaagcagggtacagcttttgatctgtgtatcatggaaggtgaaagtatcatttggtccgcccgaaacaggttggccagcgtgaataacatcgccagttggttatcgtttttcagcaaccccttgtatctggctttcacgaagccgaactgtcgcttgatgatgcgaaatgggtgctccaccctggcccggatgctggctttcatgtattcgatgttgatggccgttttgttcttgcgtggatgctgtttcaaggttcttaccttgccggggcgctcggcgatcagccagtccacatccacctcggccagctcctcgcgctgtggcgccccttggtagccggcatcggctgagacaaattgctcctctccatgcagcagattacccagctgattgaggtcatgctcgttggccgcggtggtgaccaggctgtgggtcaggccactcttggcatcgacaccaatgtgggccttcatgccaaagtgccactgattgcctttcttggtctgatgcatctccggatcgcgttgctgctctttgttcttggtcgagctgggtgcctcaatgatggtggcatcgaccaaggtgccttgagtcatcatgacgcctgcttcggccagccagcgattgatggtcttgaacaattggcgggccagttgatgctgctccagcaggtggcggaaattcatgatggtggtgcggtccggcaaggcgctatccagggataaccgggcaaacagacgcatggaggcgatttcgtacagagcatcttccatcgcgccatcgctcaggttgtaccaatgtttaatgtcggccacgtctgccagggtgatttgctgcttcatcggcgtcaggatcggcagctggcgcagtgcctgcggactatcgcgccagctttgcggataacgcagattaattggataacgggcaatcccttccaccgtttcgccaaccatcgccccgcccaccgcagaagtcacaaacaactgcacatccgccaccgtcataccgtaacgtgcggctttttcacggttaatctcaacgttgatatagcgcccaccttccagccgctcggcaagcgcagaagctacgcctggcaccgttcgcgctacttcttcaatttgctcagccatcgcgtcgatatccgccagcacagtgccggaaactttaatgccgatggggcttttaatgccggttgagagcatatcgatacggttacgaattggcggcacccacagattcgccagccccggcagccgcacggtgttatccagttcctcaatgattttgtccatcgtcatgcctggccgccactgctcctgcggcttaagctggatggtcgtttctaccatctccagcggagcagaatcggtggcggtttccgctttcccggttttgccaaatacccgcgccacttcaggtacgctcataattagcttgtcggttttttgcagcatactcgccgcctctgctgcggaaatccccggcagcgtcgatggcatatacaacaagtcgccttcattgatctgcggtaaaaattccccgccaactttattgagcggccagagaaccgtcagcaccgaaagcgccgccaccagcagcgtggttttcggccagtgcagtactttcagcaacagcggatgataaacacgaatcaaaaagcgattgagcgggtttactgctttccggcggaattttgccacggattccaagtagcccatcaggatcgggatcactacgattcgccagcagcgccgcaaccgccattcgcaatacgtttttggtgaaaccgccaaacgggcccaacagaacgcccttccgcaggcaccgtaggagatacaaattttcggttccggcgcggactgccacgcacgcagcgcaggggatcgcattgcacgggtgaccgcgccggtaaacagtaaaatatccgcatgacgcggtgaaggaacgactgtaatgccgaagcgttctgcatcaaacagcggcgaaagcgtggcgaaaatttcgatttcgcaaccgttgcagccgccgcagtccacgcggtaaacataggcagaacgtttgatttttttcagtaacgacgccttcatgctggcgatggattcatccaccgtcatggggaccggaatgccgttggcgtcacgggggcattccgggcaagtctcaaagctttcgcggtggttttccgcgcggctgtcgccgttgtgcttaagcagcgcaatggcgtagtcgatctctttctggacggcgaaaggacgattgcagacgcggcagttgcacagcgcgaagcgggactgttgcaggaagtcttctttcttccacaccgccagttcgtactcttgcgacagtttgatcgccgccgtcgggcagacttcttcgcagcgtccacagaagatgcagtgcccaagattaaactcccaggcaagctctcctgtggcgaggtcagtttcaaccgttaaggcgtttgacgggcaggcattgacgcaggccgcgcagccgatgcactgctgcgggttctgctctggcttaccacggaagtttttatcaaccgcaatcggctccagcggataagacgaggtcgccgtgccggttttgatgagctcaatgctgtaacgctcgagttctttgtacggcaccactttgctcttcttcttacgcacatcgaccacggtcatgcggtcggtacaggagtagcaagggtcgaggctaccgataatcagcggcgcatcggaaacggtgttgccgcgcagcatgtagcgcagggtcggccagttcgcgtaggtcgcggcacggcagcgccagcggacagcgttcatgccgaacaaagcgcgatcagccacgcctggttgagtggtgaaaaagcgcttgcagccatcaccgttaactacacgccttgtggtcactgccgtcagtttatgaatgaactgaacagcggtctggatctgcgtattcatctgccgggccgcgaggcacacgcgctgcgtgactatctgccagatgcctttgggccgaaagatctggagattaaaacgctgctgatggacgaacaggatcacggctatgcgctgacgggtgatgcgctttctcaggcagcgattgcggcggcaaaccgttcgcacatgccttacagtaagtcgccaagcggtgtcgcgccggatatccagcgcgcggttctggcagaaaaagccgatgcgccgttgattcagtgggatgccacctccgcaacgctgaaagctctcggctgtcacagtatcgaccgagtgcttctcgcttaagcctggtgccggatgcgtgcgtgaacgcctgtgtccaggcattgccgagccctctgcctggtgtcgaaattcccggcaaacagtttgccgtttcttgcgcaaaaccagctgggtaaagtagcgctgatggaaattttccttagatcgagtctcctgcatgttaaagcgcgtgttcctcagcctgttagtcctgatcggcttgctgctgttgactgtgctcggcctcgatcggtgcatcaggagctggtggtgtggcgcacactcggtgtcggggaaaaaactgctgcgtaccacgttgtggtgtgagttcgccatgcttgggtttgtttccggcctggtggcgcaattggtgcggaaacggcgctggcagtgttgcaggcgaaagtgtttgattttccgtgggagccagactggcgattgtggattgttctgccgtgcagcggacgctgctggctgtcgcttttcggcggctggctgggtgcgcgactggttaagggtaaggcgcggcgtggcctgttcggtgtgccccggcggagtgacgtccggccatccggtcaatcccctgctcggtgcaaaggtccttcccggtgaaaccgacatcgccctgcccggcccgctgccgttcatcctctcccgcacctacagcagttaccggacaaaaacgcccgcgccggtggggagcctcggccccggctggaaaatgcctgcggatatccgcttacagctgcgcgataacacactgatactcagtgataacggcggcagaagcctgtattttgagcacctgtttcccggtgaggacggttacagccgcagcgagtcactgtggctggtgcgcggcggcgtggcgaaactggatgaaggtcaccggctggccgcactctggcaggcgctgccggaagaactccgcttaagtccgcatcgttatctggcgacaaacagtccgcaggggccgtggtggctgctcggttggtgtgagcgggtgccggaagcggatgaggtgctgcctgcgccgctgccgccgtaccgggtactgaccgggctggtggaccgcttcgggcgcacacagacgttccaccgcgaagccgccggtgaattcagcggcgaaatcaccggcgtgacggatggtgcctggcgtcacttccggctggtactgaccacgcaggcgcgcgtgcagaagaagccggcagctggcattccggcgggccgcaccgtgtccgcgctcgatccgtttccacgccgttcgcaccaatcgtacaacaccgctacctcgctgaaaccggtgcggcagctgcttgatgcggcgttaaaaatcgatcatcgccgcacgctaccgaaatactccttcggcacgttccgtcgctggtatcgcagcgtggcggctcagcaagcacaatataaagaccaggtcgctttctttcacggctgcttcgttaactacaaccatccgcagttaggtcaagatttaattaaagtgctcaacgcaatgggtaccggtgtacaactgctcagcaaagaaaaatgctgcggcgtaccgctaatcgccaacggctttaccgataaagcacgcaaacaggcaattacgaatgtagagtcgatccgcgaagctgtgggagtaaaaggcattccggtgatagccacctcctcaacctgtacatttgccctgcgcgacgaatacccggaagtgctgaatgtcgacaacaaaggcttgcgcgatcatatcgaactggcaaaccgctggctgtggcgcaagctggacgaaggccaacacgttaccgctgaaaccgatgacgctgaaagtggtttatcacactccgtgccatatggaataaatgggctggacgctctacacctggagctgttgcgtaacatcccggggcttgagttaccgtcctggattcccagtctgcgtattccgcccattcgggtcgtcatccacatgttccgccagatagaagaaagcggcgcagatctggtggtcaccgactgcgaaacctgtaaatggcagattgagatgtccacaagtcttcgctgcgaacatccgattacgctactggcccaggcgctggcttaa

SEQ ID NO: 140210 - DNA, 3468 bp, Homo sapiens
ggcgacgaggtggaagcggacaaaacgttacacattgcgcaaaacggaacggtggtcgccgagggtgattatggattccgcctcacgaccgcaccaggtaatggtttgtacgttaactatgggctgaaagcgctgaacatccatggtgggcaaaagctgacgttagccgaacatggcggagcctatggcgcaacggccgatatgtcggcaaaaatcggtggtgaaggggatctggcaatcaatacggtgcgacaggtttcgctttccaacggtcagaacgactatcagggggcaacctacgttcagatggggacattacgtaccgatgcggatggtgcacttggcaacacccgggaactgaacatcagcaacgcggccatcgtcgatcttaatggatcgacgcagacggtagagacattcaccgggcagatgggttcgactgttttgttcaaagagggggcgctgacggtaaataaaggtgggatcagtcagggtgaactgacaggtggcggaaacctgaatgttacagggggaacgctggctatcgaggggcttaatgcacgctacaatgcgttaaccagcattagcccaaatgcggaagtcagcctcgataatactcagggtgaattcagcagtaagcgccgtcagaccagaaaagagattttcttgtcccgcatggagcagattctgccatggcaaaacatggtggaagtcatcgagccgttttaccccaaggctggtaatggccggcgaccttatccgctggaaaccatgctacgcattcactgcatgcagcattggtacaacctgagcgatggcgcgatggaagatgctctgtacgaaatcgcctccatgcgtctgtttgcccggttatccctggatagcgccttgccggaccgcaccaccatcatgaatttccgccacctgctggagcagcatcaactggcccgccaattgttcaagaccatcaatcgctggctggccgaagcaggcgtcatgatgactcaaggcaccttggtcgatgccaccatcattgaggcacccagctcgaccaagaacaaagagcagcaacgcgatccggagatgcatcagaccaagaaaggccatcagtggccactttggcatgaaggcccacattggtggtcgatgccaagagtggcctgagccacagactggtcaccaccgcggccaacgagcatgacctcaatcagctgggtaatctgctgcatggagaggagcaatttgtctcagccgatgccggctaccaaggggcgtcacaccgccgaggagctggcccaaggtggatgtggactggctgatcgccgagcgcccccggcaaggtaagaaccttgaaacagcatccacgcaagaacaaaacggccatcaacatcgaatacatgaaagccagcatccgggccagggtggagcacccatttcgcatcatcaagcgacagttcggcttcgtgaaagccagatacaaggggttgctgaaaaacgataaccaactggcgatgttattcacgctggccaacctgtttcgggcggaccaaatgataccccctaatatgtcaaagccaaaatacccttttgaaaagcgccttgaagtcgtgaatcactacttcacaactgatgatggttacaggatcatctcggcacgttttggtgtcccccgaacccaggtcaggacatgggttgccctctatgaaaaacatggagaaaaaggtttaattcccaaacctaaaggcgttagtgctgatccagagttgcgtattaaggtcgtgaaagctgtgatcgagcagcacatgtcccttaatcaggctgctgctcactttatgcttgctggtagtggttctgtagccaggtggctgaaggtctatgaagagcgcggagaagctggtttacgcgcgctcaagattggcaccaaaagaaacattgcaatatcagttgatccagaaaaagcggcatcagcattggagctgtcaaaagaccgacgcattgaggatcttgaaaggcaagttcgatttcttgaaacgcggcttatgtatctaaaaaagctgaaagccttagctcatcccacgaaaaaggctgcggagataccgcgcagtacgttttattatcatctaaaggctctcagcaagcctgacaagtatgcggacgttaaaaagcgtattagtgagatttatcacgagaatagaggccgatacggataccgtagggtaacgctgtctcttcatcgagaagggaaacagattaaccataaagctgttcagcgcctgatgggaaccctctcacttaaagcagcgattaaggtcaagcgataccgctcttacagaggagaggtagggcaaaccgcccctaatgttctccaaagagatttcaaggctacgcggccaaacgagaagtgggttaccgatgttactgaatttgcagtcaatgggcgcaagctgtatttgtctccagtaatagatctcttcaacaacgaagttatttcttacagcctttcggatgattgtcgtggcgatcattttgattgcaacttttgactggaatcgactcaaaccgactatcaaccagaaagtctctgcggagttgaatcgtccgttcgctatccgtggcgatctgggcgtggtgtgggagcggcaaaaacaagaaactggctggcgcagctgggtgccgtggccccatgtacacgcggaagacatcattcttggcaatccaccggatattcccgaagtcacgatggtgcatttgccacgcgtagaggcaacgctggccccgctggcgctgctgaccaaaacggtctggctgccgtggatcaagctcgaaaagcccgacgcgcgcctgattcgcctctctgaaaagaacaataactggacgtttaatcttgccaacgatgatacaaagacgcgaatgcaaagccgtcggcatggtcgtttcggctggataatattcttttcgatcaagggcggatcgccattgatgacaaacgatatccacggttctctggtctacaccaccggaaagccacgaccaaaactggaaggtgatgtcgagtcgcggcaattgcggctggcggacctgggaccgttgattggcgttgattccgggaaaggggcagaaaagtcgaaacggtctgaacagaagaagggcgaaaaaagcgttcagcctgcgggcaaagtgctgccttatgaccgcttcgaaaccgataaatgggacgttatggatgccgatgttcgcttcaaagggcggcgcattgagcatggcagtagcctgccgattagcgatctttctactcatatcatcctcaaaaatgctgacctgcgcctgcaaccgctgaaatttggcatggcgggcggcagcattgcggcgaatattcatctggaaggcgataaaaagccgatgcaggggcgggcagatattcaggctcgtcgactgaaactgaaagaactgatgcccgatgtgaactga

SEQ ID NO: 140211 - DNA, 7021 bp, Homo sapiens
atgccgatggaaatgctttgtacggtattcctcactcgttctttcccccgtttcccttggatcgccctcgccggcccgcaccccttcatgaatttccgccacctgctggagcagcatcaactgccccgccaattgttcaagaccatcaatcgctggctgcccgaagcaggcgtcatgatgactcaaggcaccttggtcgatgccaccatcattgaggcacccagctcgaccaagaacaaagagcagcaacgcgatccggagatgcatcagaccaagaaaggcaatcagtggcactttggcatgaaggcccacattggtgtcgatgccaagagtggcctgacccacagcctggtcaccaccgcggccaacgagcatgacctcaatcagctgggtaatctgctgcatggagaggacaatttgtctcagccgatgccggctaccaaggggcgccacagcgcgaggagctgccgaggtggatgtggactggctgatcgccgagcgccccggcaaggtaagaaccttgaaacagcatccacgcaagaacaaacggccatcaacatcgaatacatgaaagccagcatccgggccagggtggagcacccatttcgcatcatcaagcgacagttcggcttcgtgaaagccagatacaaggggttgctgaaaaacgataacccactggcgatgttattcacgctggccaacctgtttcgggcggaccaaatgatacgtcactgtgatggggtgatcgcgtttggcggcggctcggtgctggatgcggcgaaagccgtgacgttgctggtgacgaacccggatagcacgctggcagagatgtcagaaaccagcgttctgcaaccgcgcttgccgctgattgccattccaactaccgccggaaccggctctgaaaccaccaatgtaacggtgattatcgacgcggtgagcgggcgcaagcaggtgttagcccatgcctcgctgatgccggatgtggcgatcctcgacgccgcattgaccgaaggtgtgccgtcgcatgtcacggcgatgaccggcattgatgcgttaacccatgccattgaagcatacagcgccctgaacgctacaccgtttaccgacagtctggcgattggtgccattgcgatgattggcaaatcgctgccgaaagcggtgggctacggtcacgaccttgccgcgcgcgagagcatgttgctggcttcatgtatggcgggaatggcgttttccagtgcgggtcttgggttgtgccacgcgatggcgcatcagccgggcgcggcgctgcatattccgcacggtctcgcgaacgccatgttgctgccaacggtgatggaatttaaccggatgtcagattggtcggcactgcgaactaaaaatccagataatagccttgaccgggaaaacggaaagcatcaaattcctgacaccattcgcgtgcgcgactatcgcggcaaactgatagtaccgggctttgtcgatacacatatccattatccgcaaagtgaaatggtgggggcctatggtgagcaattgctggagtggttgaataaacacaccttccctactgaacgtcgttatgaggatttagagtacgcccgcgaaatgtcggcgttcttcatcaagcagcttttacgtaacggaaccaccacggcgctggtgtttggcactgttcatccgcaatctgttgatgcgctgtttgaagccgccagtcatatcaatatgcgtatgattgccggtaaggtgatgatggaccgcaacgcaccggattatctgctcgacactgccgaaagcagctatcaccaaagcaaagaactgatcgaacgctggcacaaaaatggtcgtctgctatatgcgattacgccacgcttcgccccgacctcatctcctgaacagatggcgatggcgcaacgcctgaaagaagaatatccggatacgtgggtacatacccatctctgtgaaaacaaagatgaaattgcctgggtgaaatcgctttatcctgaccatgatggttatctggatgtttaccatcagtacggcctgaccggtaaaaactgtgtctttgctcactgcgtccatctcgaagaaaaagagtgggatcgtctcagcgaaaccaaatccagcattgctttctgtccgacctccaacctttacctcggcagcggcttattcaacttgaaaaaagcatggcagaagaaagttaaagtgggcatgggaacggatatcggtgccggaaccactttcaacatgctgcaaacgctgaacgaagcctacaaagtattgcaattacaaggctatcgcctctcggcatatgaagcgttttacctggccacgctcggcggagcgaaatctctgggccttgacgatttgattggcaactttttacctggcaaagaggctgatttcgtggtgatggaattctggtgtcctgtcctctggtgttttcgtcggcattttcgtggagggcggcggatggcggtaaaaaccgtaacgttcaccccagcgttttcgataggccggagccttacgtccgcgcacccagagccgtatccagatcagcggctgaataaggtagagaagggcggtgtaaagcaattcgagcataaccagtcctgccgccagcaggtcggcgttaccattatcaaggtcgtcaaacagctggctgatattctgccgtccgcgttgcccagcgttttccggtcaaaatcatggtcgataaacctgacccggaaatgttccgcatcggcgcttcggcagtcgctaatcttgagccgcaataatgagcgcgctcaactccctgccattaccggtgtgctgttttacggtattcagtcgaacgcgttttacaccaaatttgtcgcgatcttgtttgtggttgccacggtgctggagatcggcagcctgtttttgatctacaaatggtcatacggcgaaccgttgatccgattgatcatcgccggaccgatcctgatgggctgcatgtttttgatgcgcacccatcgcttggggctggtctttttcgccgtcgccattgtcgctatttacgggcaaaccttccccgccatgctcgactatccggaagtggtcctgcgtgccgaattaagccatttactgggcgaaaaactcagtcgtattgagtgcgtcaatgaaaaagcggatacggcgttgtgggctttgtatgacagccagggaaacccaatgccgttaatggcaagaagctttagtacgcccggaaaagcccgacaactggcatggaaaaccaccatgctggcaagaagtgggactgtccgtatgccgactatttatggtgtgatgacgcatgaagaacaccccggccccgatgtcctgctactggagcggatgcgtggtgtttcggagtacgcgctggctgcatgcacctgtcactcccaccctatgggattcctctcatctgctccaacaggacagcccatatgcgcttgttacgccgagatacgcctgagaacgtgccggagcccaaccttctttgtcagcagacagacgggcagcgttaagaccggccagcaaaccttgcgcagcggcttcttcgtaaccgaaacgtggctggatgcgccatttatcgataaagaatttggcgttcaaccgcagcagttgcccgattactggggacttgcggggatcagcagttcaaaggtaccgggtgttgcgggaatcggaccaaaaagcgccacgcagctgctggtcgagtttcagagtctggaagggatatatgagaatctggatgcggttgccgaaaagtggcgcaaaaaattagaaacccataaagagatggcgtttctgtgccgcgatattgcccgcttacaaaccgatttgcatatcgacggcaatttacagcaattgcggttgcgttgcttcacgcgggttgccaccggtacaaacatcatccagtgccgcctgcgccagtgccggaatgtcttccttgcgtacaccaacatcacgcaaatgtggcggaataccgacatcacggttgagagcaaacaccgcttcaacagcggcattacgcgcctcttccaggctcataccttccactttcacgcccataacgcgcgcgatatcgcggtacttctcaccggtaaagtcagcgttataacgcatgacatgcgcaagagtaaatctgcgtatcttcataccatgactcataaaggagataccccgatgaccattactccggcaactcatgcaatttcgataaatcctgccacgggtgaaccactttctgtgctgccgtgggctggcgctgacgatatcgaaaacgcacttcagctggcggcagcaggctttcgcgactggcgcgagacaaatatagattatcgtgctgaaaaactgcgtgatatcgccagcatccgggccagggtggagcacccatttcgcatcatcaagcgacagttcggcttcgtgaaagccagatacaaaggggttgctgaaaaacgattaccaactggcgattgttattcaccctggccaacctgtttcggccggacccaaatgatacgcatagcgcacagacagataaaaattacagagtacacaacatccatgaaacgcattagcaccaccattaccaccaccatcaccattaccacaggtaacgaggtaacaaccatgcgagtgttgaagttcggcggtacatcagtggcaaatgcagaacgttttctgcgtgttgccgatattctggaaagcaatgccaggcaggggcaggtggccaccgtcctctctgcccccgccaaaatcaccaaccacctggtggcgatgattgaaaaaaccattagcggccaggatgctttacccaatatcagcgatgccgaacgtatttttgccgaacttttgacgggactcgccgccgcccagccggggttcccgctggcgcaattgaaaactttcgtcgatcaggaatttgcccaaataaaacatgtcctgcatggcattagtttgttggggcagtgcccggatagcatcaacgctgcgctgatttgccgtggcgagaaaatgtcgatcgccattatggccggcgtattagatgcgcgcggtcacaacgttactgttatcgatccggtcgaaaaactgctggcagtggggcattacctcgaatctaccgtcgatattgctgagtccacccgccgtattgcggcaagccgcattccggctgatcacatggtgctgatggcaggtttcaccgccggtaatgaaaaaggcgaactggtggtgcttggacgcaacggttccgactactctgctgcggtgctggctgcctgtttacgcgccgattgttgcgagatttggacggacgttgacggggtctatacctgcgacccgcgtcaggtgcccgatgcgaggttgttgaagtcgatgtcctaccaggaagcgatggagctttcctacttcggcgctaaagttcttcagccccggaccattacccccatcgcccagttccagatccctttgcctgattaaaaataccggaaatcctcaagcaccaggtacgctcattggtgccagccgtgatgaagacgaattaccggtcaagggcatttccaatctgaataacatggcaatgttcagcgtttctggtccggggatgaaagggatgcgatgcacgcgcccgtatttccgtggtgctgattacgcaatcatcttccgaatacagcatcagtttctgcgttccacaaagcgactgtgtgcgagctgaacgggcaatgcaggaagagttctacctggtaactgaaagaaggcttactggagccgctggcagtgacggaacggctggccattattcggtggaggaggccaacaatgaatgacaccagcttcgaaaactgcattaagtgcaccgtctgcaccaccgcctgcccggtgagccgggtgaatcccggttatccagggccaaaacaagccgggccggatggcgagcgtctgcgtttgaaagatggcgcactgtatgacgaggcgctgaaatattgcatcaactgcaaacgttgtgaagtcgcctgcccgtccgatgtgaagattggcgatattatccagcgcgcgcgggcgaaatatgacaccacgcgcccgtcgctgcgtaattttgtgttgagtcataccgacctgatgggtagcgtttccacgccgttcgcaccaatcgtcaacaccgctacctcgctgaaaccggtgcggcagctgcttgatgcggcgttaaaaatcgatcatcgccgcacgctaccgaaatactccttcggcacgttccgtcgctggtatcgcagcgtggcggctcagcaagcacaatataaagaccaggtcgctttctttcacggctgcttcgttaactacaaccatccgcagttaggtaaagatttaattaaagtgctcaacgcaatgggtaccggtgtacaactgctcagcaaagaaaaatgctgcggcgtaccgctaatcgccaacggcgtttaccgataaagcacgcaaacaggcaattacgaatgtagagtcgatccgcgaagctgtgggagtaaaaggcattccggtgattgccacctcctcaacctgtacatttgccctgcgcgacgaatacccggaagtgctgaatgtcgacaacaaaggcttgcgcgatcatatcgaactggcaacccgctggctgtggcgcaagctggacgaaggcaaaacgttaccgctgaaaccgctgccgctgaaagtggtttatcacactccgtgccatatggaaaaaatgggctggacgctctacaccctggagctgttgcgtaacatcccggggcttgagttaacggtgctggattcccagtgctgcggtattgcgggtacttacggtttcaaaaaagagaactaccccacctcacaagccatcggcgcaccactgttccgccagatagaagaaagcggcgcagatctggtggtcaccgactgcgaaacctgtaaatggcagattgagatgtccacaagtcttcgctgcgaacatccgattacgctactggcccaggcgctggcttaa

SEQ ID NO: 140212 - DNA, 2247 bp, Homo sapiens
atgttaatcctcgctacgctgttgctgttttgcgcagtgctactgatcgtgctggtgggaacgctttatccgatgatttacggcctgctgggctggggacgcctctccgttggcgcgccgtattttaaccgcgcgacgttaccgtttggtctgttgatgctggtggtgattgtgctggcgacgtttgtctctggcaaacgcgtgcagcttccggcgctgcgtcactgcgatcaatgcgggtatccactgcgccatctccgggaaccagaactggacataaacgccaatggcggtgatttcagagatccccaccgccatccacataaaccacttattgttcgcgatgcgcaccgtatcgaagatatctggcagtttttctataaaggtgcttactggcgtcgcggtccggttacgatgtcggccatttcagcggttgatatggcgctgtgggatattaaagccaaagctgccaacatgccgctttaccagttactcggcggcgcgtctcgtgaaggggtgatggtttattgccataccaccggtcacagtattgatgaagctctggatgattatgcccgtcatcaagagcttggattcaaagccatccgcgtgcagtgcggaatccctggtatgaaaaccacctacggcatgtcgaaaggtaaaggtctggcttatgaacccgcaaccaaaggacagtggccggaagagcagctgtggtcgacggagaaatacctcgatttcatgccgaaattgtttgacgcggtacgtaacaagtttggttttaatgaacatttgctgcatgacatgcaccatcgcttaacgcctattgaagcggcgcgctttggtaaaagcattgaagattatcgcatgttctggatggaagacccgacgcctgcggaaaaccaggaatgcttccgtctcattcgccaacataccgtcacacccatcgcagcgatcacctctctgcgccattttatggcgggcaaatccgaggctgatattgccgccgagtttacgcgtctggagcacatcgaggccacggaaaccgaaggtattaccgcgcttccgggggcaatcgccttactcagtcatttgaataaagcaggtattccgtgggccattgtgacttctggctccatgccggtagcgcgagcgcgccataaaatagctgggcttcccgcaccagaggtgtttgtaaccgctgagcgagtgaagcgcggaaaaccagaacctgatgcgtatctgttaggcgcgcagctgctggggcttgcgccgcaggaagtgcgtatggatgcggtcgctttgtttgttattgtcgcgtttgcattaagcggaacgctgacagtcccagaagtattttccggcttttctgatcctaacgttgtcctgattgccgccttgtttattattggcgatggtttggtccgtaccggtgttgccaccgtaatgggaacatggctggtcaaagttgcgggcaatagtgaaatcaaaatgttggttttgttgatgctgaccgtcgcggggcttggcgcgtttatgagttcaaccggcgttgtcgctatctttattcccgtggtgttaagcgttgccatgcgtatgcaaacgtcgccgtcacgtctgatgatgccgttaagttttgccgggctgattagcggcatgatgacgctggtggcgacgccgccgaacctggtgagactacaaacggatgtgattgacgtggagttcaaaacgagttgccgcgccctgatattgcaccgcctggatcgtgccattggcctgcagttcaccaggggtgttgaggcggatatgttccggtcgcagggcgaagcttcccgtcatgccacaaagtttctctgccatcagtccatcaaaaacattcgatgtaccaacgaacccggcaacaaacggccgtcggcaaaggagccatggattctagcaactaacttacctgttgaaattcgaacacccaaacaacttgttaatatctattcgaagcgaatgcagattgaagaaaccttccgagacttgaaaagtcctgcctacggactaggcctacgccatagccgaacgagcagctcagagcgttttgatatcatgctgctaatcgccctgatgcttcaactaacatgttggcttgcgggcgttcatgctcagaaacaaggcgcgtttttcgccgaaggccagccagtagtttttatcattacgcgccatcagaatcgggaaggccgcgttggagatattctctaa

SEQ ID NO: 140213 - DNA, 2374 bp, Homo sapiens
atgggctccccgaaaagaaagtacacagaggtgcacaaggagaacctggctgctggccgtgtatggacagatgctgggtcaaataggcatttcctgttcctgggcatggtgacagctatacagacccactgcccacaaagggttttggtcacagcgcaaggaagctggggttggcctgaaattgcatctgatactgacaagcagaaaaccaggaggagctgcgagatggaagagagcagcgagaaagaggccggagcgagtgagactctgacagtttcccacagtccaccaacgacgatatgtccgggttcttctgttctccccttctcctacccctatcctaaaaacgactttcctattttccacaatttgtctacacacaaaatggcagggaagcccagacttggaagcacatgtaagacgccgattttcgccatccacggcatagtcgccacgccaaccagtagcaggccgattatctcaacgctaaagcaaatcatcgctacgtttaagccaccgatacggttaatgccgttaggacataacaaacgcgtaccgacaaacgcacagctaaacagcgtcagcgcgaaagccgcactcgtcccaacctttagcgtcataaaacagcgtgataaaggtggcgatgacgccaaatccggcggaagccagtgccagcgccataccgtacagccagacgcgcccaagcaccgtgcgaaacggcagcggtttgcctttactggcttttaccgtcggacgcgggatcgccaacaaaatggccaccagcgccacgcccataatgattaacgctaacgcctgcaagccgacccagtggataaacacgacgcctaacggcgcaaccatcgccatcgacccgtcagtgacatgccgtccacgaatcaccgcccgaatgccggagcaaccagcaacgcccaactcggacctgccgcactatcatcgacattatggagatgtatcatgcgttgcatgtttcctggtctaatttgcaggaccagcaatccatcgatgaacgtcgtgtcaccttcctcggctttgacgccgccactgaagcacgttacctcggttatgtccgctttatggttaatgtggaagggcgctatacccattttgacgccggaactcacggttttaacgcccagacgccaatgtgggaaaaatatcagcgcatgcttaatgtgtggcatgcctgcccgcgttttctgtttgatcttgatggaacgctggtggattccctgcctgcggtagaacgggcgtggagcaactgggccagacgtcatgggttagcgccggaagaggtgctggctttcattcacggtaaacaggcgatcacctctctgcgccattttatggcgggcaaatccgaggctgatattgccgccgagtttacgcgtctggagcacatcgaggccacggaaaccgaaggtattaccgcgcttccgggggcaatcgccttactcagtcatttgaataaagcagcgagcggcgtcaccaataaaggctttcttaccgtcgatgaaattcgccgggttacgcgcgccttcgccagactgggcaccgaaaaagtgcgcctgacaggaggagagccgtctttacgccgcgactttaccgatatcatcgccgctgtgcgggaaaacgacgctatccgccagattgcggtcacaaccaatggttaccgtctggaacgcgatgtggcgagctggcgcgatgcgggacttactggcattaacgtcagtgtcgacagtctggacgcccgccagtttcacgctattaccgggcaggataaattcaaccaggtcatggcagggattgatgctgcatttgaggccggttttgagaaggtcaaagtcaataccgtgctgatgcgtgatgttaatcatcaccagctcgacacctttctgaactggatccagcatcgccctatccagctgcgtttcatcgaactgatggaaacgggcgagggcagcgagctcttccgtaagcatcacatctctggtcaggttctgcgtgacgagctactgcgtcgcggctggatccaccaattacgtcaacgcagcgacggtcccgcgcaagtcttttgccatccagattacgccggagagattggccttatcatgccgtattgataaagacttcttgcgccacttgcaaccgcctgcgcgtttcctccattggtaaactccatctctgcctgtttggtgaaggcggcgttaacctgcgcgatctgctggaagacgatacccagcaacaggcgctggaagcgcgtatttcagcggcgctgcgggagaagaaacagacccatttcctgcatcaaaacaacaccggtattacgcaaaacttatcgtacattggcggctaa

SEQ ID NO: 140214 - DNA, 399 bp, Homo sapiens; identical to SEQ ID NO: 114110

SEQ ID NO: 140215 - DNA, 622 bp, Homo sapiens
  misc_feature (1)...(622): n = a,t,c or g
tgcttgccccgtgccctcatctagccagggaatcagacacataaccagatgatgtgagtgcaatgggtgttttgacaggcactggcagaggggagccgggtgcctgggagcactcacagaggagctcgtctagctcctggcgactcctcccttccctctttagcaggggagctctttttggccttctgctaaagggccaagcctgaccatggagtgatggagcaggtcccctcccgtccctgcctcaccctgatgggaggggctgatctgtgaacagtcctcaagtgctgctttagtaaggctcaggggagcgagagcaagtgattctcctttaccccagctctgtggggtctccccacaccgacccacatgggggtcagctctgtggggaggagaacagtgtacatctgaaatgggagaaactattgatccaccgggaccccatacattttccaaaaatttttgttttgaattacaataatactaccggggaattacttttgggcaaaaacaaaattaagggggaaagggctttacggcatccccacccttttggggaaaaaggggaggggcgggccctggccttttgttcccccgggcgcccncctgtttgtttgtctcg

SEQ ID NO: 140216 - DNA, 453 bp, Homo sapiens
atgactataaaagctgtttggccgccaagaagggaaaactctccattgttcacatcaaatgtggtcatcaaggataacgaacaggaaggaccttccaggggaaaatgcagggacctgtggacaatgtggaagcaagctgagggagccggctctggccttggccagcccagaaaggggctcagcagcggcgggctgaagttctcctcaagtgccgccaaagtgggagcccaggcagaggaggcgccgagagcgagccaaggctgtgaggactgccagcacgctgtcacctctcaagagtatgagagaaaaggacttccaagaacccatttccacagctgctctaagtcctatgccaggtgcacgtacatctctgtggcaaaagctatcggctgcatctacacatcccctgcatctttccagcttcttctcatggagtctagtttgttctcatag

SEQ ID NO: 140217 - DNA, 949 bp, Homo sapiens
  misc_feature (1)...(949): n = a,t,c or g
atgacagcagtagcggttaacatgctgaataatcagttaggggttgtgttcagccgcagacttgtagttgttgaagccaacgttggaactgatctagaggggctgcctcctctggatccagccctttggtcaatgtgcaacatgatgttcttcaaagagattaatgcttttctatttccaataatggcaggcccgtttttcagaccaatcctttcactgaaaataaatgaagtcccatcgaccagccaagggctgaggagtgccggcggacgacacctggactggcaggcagctccacctgcagccccggtgcgggatccactgggtgaagccagctgggctcctgaatctggtggggacgtggagagtctttatatctagctcagggattgtaaatacaccaatcggcactctgtatctagctcaaggtttgtaaatacaccaatcagcaccctgtgtttagctcaangtttgtgagtgcaccaatcgacactctgtatctagctgctctggtgaggacgtggagagtctttatgtctagctcagggattgtaaatacaccaatcggcactctgtatctagctcaaggtttgtaaatacaccaatcagcaccctgtgtctagctcagggtttgtgaatgcaccaatcgacactctgtatctagctactctggtggggccttggagaacctttgtgtggatactctgtatctaactaatctgatggggaggtggtgaacctttgtgtctagctcagggattgtaaacacaccaatcagcaccctgtcaaaacaggccactgggctctaccaattagcaggatgtgggtggggccagataagaaaataaaagcaggctgcccgagccagcagtggcaacccgctcgggtccccttccacactgtggaagctttgttctttcgctctttgcaataaatcttgctactgctc

SEQ ID NO: 140218 - DNA, 1285 bp, Homo sapiens
atgtttctgcaggctgcacaaaaagcatggaacccgcatctgcttctggtgaggactcaggctgcttccactcatggcagaagagctgacccccatgtgggtcggtgtggggagaccccacagagctggggtaaaggagaatcacttgctctcgctcccctgagccttactaaagcagcacttgaggactgttcacagatcagcccctcccatcaggggacattgttgtgtctcctcatcctggacctgaggacaggaaagctttccctggagcacactgaagagcccagtgatgtcccctcccatctcctctatcggtggagcatcagctctgcgatcactgaagtctttcaggctctcgcttcctctgattccacctcgcagccagtaaatgtccacaccaaggaggatatgaaagtacaagacatagccctggtccttccatcgaggaagtcaaggaatgcatgcaggacgacaactagtacttgcaaggcacttcttatgcgccagctggcagccagagttattctgcaaaactgtgtttccaagtcctcaagaggaatacatgtcccccagaaaaacctaaccctgccagtgagaggtgacagcgtgcttgctggcagtcctcacagccctcgctcgctctcggcgcctcctctgcctgggctcccactttggcggcacttgaagagcccttcagcccaccgctgcactgtaggaggcccctttctgggctggccaaggccggagcccgctccctcagcttgcagggaggctttagctgccttcccgcggggcagggctcgggacctgcagcccgccatgcctgagcctcccccacctccgtgggctcctgtgcagccggagtctccccgacaagcgccaccccctgctccgcggagcccagtcccatcgaccacccaagggctgaggagtacgggcacaaagcaccgggactggcaggcagctccacctgcagccccggtgcgggatccactgggtgaagccagctgggctcctgagtctggtggggacgtggagaacctttatgtgtagctcagggattgtaaatacaccaatgggcactctgtatctagctcaagttaagtttcctgctgaatatttcgaaactctttgcaaactgacttcagcacctctgtgggatattcccttccactgccaacccttagttgtcagaaactctgtctttgggaagcatgctacattttctagaacaaatctagatactttagaaatgatggatgatgatgatgatgatgaatga

SEQ ID NO: 140219 - DNA, 573 bp, Homo sapiens
tgagatgtctcgactctacagatcgcgagatcgcgacgagtgtgcctgcagatgaggtgaagatggtcagtaggacagaagctaacattgatgactcgctcattggtggaaatgcctccgctgaagcgcccgagggcgaaggtaccgaaagcacagtaatcactggtgtcgatattgtcatgaaccatcacctgcaggaaacaagtttcacaaaagaagcctacaagaagtacatcaaagattacatgaaatcaatcaaagggaaacttgaagaacagagaccagacagagtaaaaccttttatgacaggggctgcagaacaaatcaagcacatccttgctaatttcaaaaactaccagtaacaaatgtggcaattattttggatctatcacctgtcatcataactggcttctgcttgtcatccacacaacaccaggacttaagacaaatgggactgatgtcatcttgagctcttcatttattttgactgtgatttatttggagtggaggcattgtttttaagaaaaacatgtcatgtaggttgtctaaaaataaaatgcatttaaactcaaa

SEQ ID NO: 140220 - DNA, 574 bp, Homo sapiens
  misc_feature (1)...(574): n = a,t,c or g
gctcgctcgagntttcaggctcgtgtaaagctagcgccgtcgtcgtctcccttcagtcgccatcatgattatctacggggacctcatcagccacgatgagatgttctccgacatctacaagatccgggagatcgcggacgggttgtgcctggaggtggaggggaagatggtcagtaggacagaaggtaacattgatgactcgctcattggtggaaatgcctccgctgaaggccccgagggcgaaggtaccgaaagcacagtaatcactggtgtcgatattgtcatgaaccatcacctgcaggaaacaagtttcacaaaagaagcctacaagaagtacatcaaagattacatgaaatgttaacaaatgtggcaattattttggatctatcacctgtcatcataactggcttctgcttgtcatccacacaacaccaggacttaagacaaatgggactgatgtcatcttgagctcttcatttattttgactgtgatttatttggagtggaggcattgtttttaagaaaaacatgtcatgtaggttgtctaaaaataaaatgcatttaaactcaaaaa

SEQ ID NO: 140221 - DNA, 687 bp, Homo sapiens
cgagcaggaagtcgatcatgattatctaccgggacctcatcagccatggtcagtaggacagaaggtaacattgatgactcgctcattggtggaaatgcctccgctgaaggccccgagggcgaaggtaccgaaagcacagtaatcactggtgtcgatattgtcatgaaccatcacctgcaggaaacaagtttcacaaaagaagcctacaagaagtacatcaaagattacatgaaatcaatcaaagggaaacttgaagaacagagaccagaaagagtaaaaccttttatgacaggggctgcagaacaaatcaagcacatccttgctaatttcaaaaactaccagttctttattggtgaaaacatgaatccagatggcatggttgctctattggactaccgtgaggatggtgtgaccccatatatgattttctttaaggatggtttagaaatggaaaaatgttaacaaatgtggcaattattttggatctatcacctgtcatcataactggcttctgcttgtcatccacacaacaccaggacttaagacaaatgggactgatgtcatcttgagctcttcatttattttgactgtgatttatttggagtggaggcattggttttaaagaaaacatgtcatgtaggttgtctaaaaataaaatgcatttaaactcaaaaaaaaaaaaaaaaa

SEQ ID NO: 140222 - DNA, 675 bp, Homo sapiens
  misc_feature (1)...(675): n = a,t,c or g
cgtccgcccacgcgtccggccgctccggctgcaccgcgctcgctccgagtttcaggctcgtgctaagctagcgccgtcgtcgtctcccttcagtcgccatcatgattatctaccgggacctcatcagccacgatgagatgttctccgacatctacaagatccgggagatcgcggacgggttgtgcctggaggtggaggggaagatggtcagtaggacagaaggtaacattgatgactcgctcattggtggaaatgcctccgctgaaggccccgagggcgaaggtaccgaaagcacagtaatcactggtgtcgatattgtcatgaaccatcacctgcaggaaacaagtttcacaaaagaagcctacaagaagtacatcaaagattacatgaaatcaatcaaagggaaacttgaagaacagagaccaganagagtaanaccttttatgacaggggctgcagaacaaatcaagcacatccttgctaattcanaaactaccagttcttattggtgaaacatgaatcagatgcatggntgtctatggactaccggaggatgtggacccataatgatttcttanggatgttanaaaggaanatgtaacaanggtgcattatttggactatactgcatatactggtttgctgtctccccacaccgggcttagacaatggatg

SEQ ID NO: 140223 - DNA, 1190 bp, Homo sapiens
ggtaccgcccgctcccccctccccccgagcgccgctccggctgcaccgcgctcgctccgagtttcagggctcgtgctaagctagcgccgtcgtcgtctcccttcagtcgccatcatgattatcctaccgggaccctcatcaagccacgatgagatgtttctccgacatctcaaagatccggggagatcgcggacggggtttgtgcctggaaggtggagggggaagatggtcaagtaggacagaaaggtaccattgattgactcgctcattggtggaaaatgcctccgctgaaaggccccgaggggcgaaaggtaccgaaaggcaccagttaatcactggtgttcgatattgtcatgaccccttcacctgccaggaaaccaagttttcacaaaaggaggcctccaagaaggtacatcaaaagattacatgaaatcaatcaaaagggaaacttgaaagaacaggagaccagaaaagagtaaaacctttttatgaccaggggctgcagaacaaatcaagcacatccttgctaatttcaaaaacttaccagttctttatttggtgaaaacatgaatcccagatggcatggttgctctattggactacccgtgagactgggtggtgaccccatatatgattttcttttaaggatgggtttagaaatgggaaaaatgttaaccaatgttggcaattattttggatctatcacctgtcatcataaactggcttcttgcttgtccacccacccaaccccgggacttaagaccaaatggggactgatgtcatcttgaggctcttcatttattttgactgtgatttatttggaggtggaagcattggtttttaagaaaaacatgtcatgttaggttgtctaaaaataaaatgcatttaaactcatttgagagaatgccttttagtttaatgcatatttaaactaaattgatcctgtagtgttcctggagaagctagagcctgattgtaggctactactcatcaattaacttctacagtggagactacttctgggactggaatataaaaaagaatcaaaggttctgattttgagttgcaataaagggaaagaccatgctcatagcagtgccaacatctgaagtgtggagccttacccatttcatcacctacaacggaagtagttaaatggaaccgattaccaagagaataaaaagagactc

SEQ ID NO: 140224 - DNA, 1640 bp, Homo sapiens
atggtggtgccggtgtacaaatactctggcaagaacgcctgtttgtcttaccgtttgctcaaggccagcgagccgggacttttcgcggtggggaagcacacgggtatggtgcgcacggcgcgagccatgttggacatagacgcgctcaagcaaagcttagtagtgaccgtccaggaccacgtccagccccctctctccgccactgtcacgctcacggtggcagtggccgacagcatcccccaagtcctggcggacctcggcagcttcgagtctccagctaactctgaaacctcagacctcactctgtacctggtggtagcggtggccgcggtctcctgcgtcttcctggcattcgtcatcgtgctgctggcgcacaggctgcggcgctggcacaagtcacgcctgctgcaggcttcaggaggcggcttgacaggtgtgtccggctcgcactttgtgggcgtggacggggttcgggctttcctgcagacctattcccacgaggtctctctcaccgccgactcgcggaagagtcacgtgatctttccccagcccaactacgcagacatgctcatcagtcaggagggctgtgagaaaaatgattctttgttaacatccgtagattttcatgaatataagaatgaagctgatcatggtcagattgcaagtagtaccactctgagtatgaaagcaaaagatcctgcagatctaccagcccactgcagtatccaagttgaaattcttgatgacaacgattgtgcacttgaagttattgtgattcaagtatctactcccaaaccggaggattcgccaccaggaacagtgatcgccttgataaaaacgagagacagagactctggagaaaatggagaagtttactgccaagtgttgggaaatgccaagtttattttgaaatcttcctcaaagaactattacaaactagtgacagacggcgctctgtaccgggaggagatcccagaatacaatctcaccatcacagccaccgacgggggcaagccgcccctctcctccagcataattgtcaccctgcacatctccgacgtcaacgataatgccccagttttccaacagacttcctacatggttcacgcgtcttacttagtcagtgtacccgaaaacaaccctcctggggcctccatcgcgcaagtctgcgcctcggacatggacttggggttgaacggccaagtctcctactctatcatggccagcgacctagagcctctggcactggcctcttacgtgtccatgagcgcgcaaagtggggtggtgttcgcgcagcgcgcctttgactacgagcagctgcgcaccttcgaactcacactacaggcccgcgaccagggctcgcctgcgctcagcgcaaacgtgagcctgcgcgtgttggtgggcgaccgaaacgacaacgcaccgcgggtgctgtaccccgcgctgggtcccgacggctctgcgctcttcgatatggtgccgcgcgctgcagagcccggctaccgggtcgtagcgagtgtgtcacaggctgaactgcagttttacctggtggtggccttggccttaatctcagtgctcttcctcctcgccgtgattctggccattgccttgcgcctgcgacgctctctacagccctgcgg

SEQ ID NO: 140225 - DNA, 1527 bp, Homo sapiens
atggtggtgccggtgtacaaatactctggcaagaacgcctgtttgtcttaccgtttgctcaaggccagcgagccgggacttttcgcggtggggaagcacacgggtatggtgcgcacggcgcgagccatgttggacatagacgcgctcaagcaaagcttagtagtgaccgtccaggaccacgtccagccccctctctccgccactgtcacgctcacggtggcagtggccgacagcatcccccaagtcctggcggacctcggcagcttcgagtctccagctaactctgaaacctcagacctcactctgtacctggtggtagcggtggccgcggtctcctgcgtcttcctggcattcgtcatcgtgctgctggcgcacaggctgcggcgctggcacaagtcacgcctgctgcaggcttcaggaggcggcttgacaggtgtgtccggctcgcactttgtgggcgtggacggggttcgggctttcctgcagacctattcccacgaggtctctctcaccgccgactcgcggaagagtcacgtgatctttccccagcccaactacgcagacatgctcatcagtcaggagggctgtgagaaaaatgattctttgttaacatccgtagattttcatgaatataagaatgaagctgatcatggtcagattgcaagtagtaccactctgagtatgaaagcaaaagatcctgcagatctaccagcccactgcagtatccaagttgaaattcttgatgacaacgattgtgcacttgaagttattgtgattcaagtatctactcccaaaccggaggattcgccaccaggaacagtgatcgccttgataaaaacgagagacagagactctggagaaaatggagaagtttactgccaagtgttgggaaatgccaagtttattttgaaatcttcctcaaagaactattacaaactagtgacagacggcgctctgtaccgggaggagatcccagaatacaatctcaccatcacagccaccgacgggggcaagccgcccctctcctccagcataattgtcaccctgcacatctccgacgtcaacgataatgccccagttttccaacagacttcctacatggttcacgcgtcttacttagtcagtgtacccgaaaacaaccctcctggggcctccatcgcgcaagtctgcgcctcggacatggacttggggttgaacggccaagtctcctactctatcatggccagcgacctagagcctctggcactggcctcttacgtgtccatgagcgcgcaaagtggggtggtgttcgcgcagcgcgcctttgactacgagcagctgcgcaccttcgaactcacactacaggcccgcgaccagggctcgcctgcgctcagcgcaaacgtgagcctgcgcgtgttggtgggcgaccgaaacgacaacgcaccgcgggtgctgtaccccgcgctgggtcccgacggctctgcgctcttcgatatggtgccgcgcgctgcagagcccggctaccgggtcgtagcgagtgtgtcacag

SEQ ID NO: 140226 - DNA, 2560 bp, Homo sapiens
tttcgtgaaggccagtatagattcggaaacagaaaacaaaagcaggaaaagtgaccttagcccggattctgccatccccggaaggcttattcctcctatgggcaaaggagcaaagggagccagaagatgaaagcgagctcagggaggtgcgggctggtgcggtggctgcaggtactgttgcccttcctgttgtctttgttccccggggctctcccagtccagatccgctattcaattccagaggagctggccaaaaactcggtcgtaggaaacctcgccaaggatctggggctcagcgtccgggacttgccagcccggaagctgcgggttagcgcggagaaggaatatttcacagtaaacccagaaagcggagacttacttgtgagtgacagaatagaccgagaacagatatgcgggaagcagcctctgtgtgttctggatttcgatactgtcgctgaaaatccactaaatattttctacatagcagtaattgtgcaggatataaatgataataccccgctattcaaacagactaagattaatttaaaaattggcgaatccactaagccaggtacaacatttccacttgacccagccctggattcagatgttggtcctaactcactacaaagataccaccttaatgacaacgagtactttgatctcgctgagaaacagactccagatggtcgtaaatatcctgagttgattctaaaacactctctggacagagaagagcacagtttacatcaattggtcctcacagctgtggatggcggagacccacctcaaagtggcacgacccaaatccgaatcaaagtcacggatgccaacgataaccctccagtgttcagccaggacgtgtacagggtcaccctgagggaggacgtgccgccgggcttctttgtgcttcaagtgacagccaccgaccgggatgaaggcataaacgcagagatcacctactcctttcataatgtggacgaacaagtgaaacactttttcaacttaaatgaaaaaacaggagaaatcacgacaaaggatgatttggattttgatgattgcaagtagttacactctgagtatcgaagcaaaagatcctggagatctagcagcccactgcagtatccaagttgaaattcttgatgacaacgattgtgcacctgaagttattgtgacttcagtatctactcccctaccggaggattcgccaccaggaacagtgatcgccttgataaaaacgagagacagagactctggagaaaatggagaagtttactgccaagtgttgggaaatgccaagtttattttgaaatcttcctcaaagaactattacaaactagtgacagacggcgctctggaccgggaggagatcccagaatacaatctcaccatcacagccaccgacgggggcaagccgcccctctcctccagcataattgtcaccctgcacatctccgacgtcaacgataatgccccagttttccaacagacttcctacatggttcacgtggcagagaacaatcctcctggcgcctctatcgctcaaatcagtgcctctgaccctgacttgggccccagtggccaagtttcctactccatcgtagcgagcgacctgaagccgcgggagattttatcctacgtgtccgtgagcgcgcagagcggggtggtgttcgcgcagcgcgccttcgatcatgagcagctgcgcgccttcgagctcacactgcaggcccgcgaccagggctcgcccgcgctcagcgccaacgtgagcctgcgcgtgttagtgggcgacctcaatgacaatgcgccacgggtgctgtaccccgcgctggggcctgatggctccgccctcttcgatatggtgccacgcgccgcagagcccggctacctggtgaccaaggtggtggcggtggacgcagactcaggacacaacgcttggctgtcctaccacgtgctgcaggccagcgagcccgggctcttcagcctggggttgcgcacgggtgaggtgcgcacagcgcgtgccttgggcgacagggacgcggcccgccagcgcctgctggtcgctgtgcgtgatggaggacagccgccactctccgctacggccacgctgcacctaatcttcgcggatagcctgcaagaggtattgccagacctcagcgaccgccgggagccctctgacccccaggcaaaactgcagttttacctggttgtggccttggccttgatctcagtgctcttcttcctcgcggtgattctggcaatctccctgcgcctgcgactctcttccaggtcagatgcttgggactgttttcagcctggtctcagctccaagcctggacctggggttctccccaattacagtgagggtacattgccctattcctacaacctgtgtgttgcctcacaatcagccaagacagagttcaattttctgaacataaccccggaattggttcccgcgcaagatctcgtctgtgacaatgcctcttgggaacaaaatacaaatcatggagccgctggggtcccttttgcctcagatactattttgaaggtgagctttaat

SEQ ID NO: 140227 - DNA, 246 bp, Homo sapiens
cccttgccaaaacggtgaggcagccgtgtgttacctgccgacagcatgatgctaggcaaggtccagccgttccgcccggcatacgagcttacggagaagccccctttgaagatctccaggtagacttcacagagatgccaaagtgtggagatattaggaaaaatgtcactggggatgtgaatagccctgcggtattgagagtagtatcatcctctccccccttgcatattgggaacaacatcacag

SEQ ID NO: 140228 - DNA, 576 bp, Homo sapiens
ctaatatccagggacggagaggatgatatcactcccaatatagccgggggtgtacaccccttgtgtgacattgctcctaaagcgcagcgggggagaggaagatattacagccaatatcgcaggggatgtacacccccttgtgacattcttccttctatccctgactttccatccaacagtacctagcccgtccacattgttggggttgctgccagccgaggacagctggttcacctgcttggacctgagagacgctttctttcctatcagattagccccggagagccagaagctgtttgcctgtgctgggctgacatcggtttcaccttggccacggttcccaagatgattgtggacatgcagtcgcatagcagagtcatctctcatgcgggctgtctgacgcagatgtctttcttcatcctttttgcatgtatagaaggcatgctcctgactgtgatggcctatgactgctttgtagccatctgtcgccctctgcactacccagtcatcgtgaatcctcacctctgtgtcttcttcgttttggtgtcctttttccttagcctgttggattcccag

SEQ ID NO: 140229 - DNA, 708 bp, Homo sapiens; identical to SEQ ID NO: 129454

SEQ ID NO: 140230 - DNA, 3570 bp, Homo sapiens; identical to SEQ ID NO: 126632

SEQ ID NO: 140231 - DNA, 3001 bp, Homo sapiens
atggaggaaggatggattcggttaccagatgggagactagctgtgccacagctgctaggagctgcagttgtactggctgtgcaagaaaccacccatcgagatcaggagtcactggaaaagttgttaggctggtatttctacatctcacttctgtcagcccttgccaaaacgatttcgaccgccttacggatcggctcagacaacgggcctgtgtttttggctgccttggtacagaagacagcaaaggtgtccaagacacagagagccacggaatctcacaggtgtctgagaattcctcctcctgggactctcagaggatccagaactgcagccggttctcgctttgctctccctgtccctgtccatgtatctggtcacggtgctgaggaacctgctcatcatcctggctgtcagctctgtctctcccctccacacccccatgtacttcttcctctccaacctgtgctgggctgacatcggtttcacctcggccacggttcccaagatgattgtggacatgcagtcgcatagcagagccatctctcatgcgggctgtctgacgcagatgtctttcttgttcctttttgcatgtatagaaggcatgctcctgactgtgatggcctatgactgctttgtagccatctgtcgccctctgcactacccagtcatcgtgaatcctcacttctgtgtcttcttcgttttggtgtcctttttccttagcctgttggattcccagctgcacagttggattgtgttacaattcaccatcatcaagaatgtggaaatctctaattttgtctgtgacccctctcaacttctcaaatttgcctgttctgacagcatcatcaatagcatattcatatatttccataaggatccagaactgcagccggtcgtcgctgggctgttcctgtccatgtgcctggtcacggtgctggggaacctgctcatcatcctggccgtcagccctgactcccacctccccacccccatgtacttcttcctctccaacctgtccttgcctgacatcggtttcacctccaccacggtccccaagatgagcgtggacatccagtctcacagcagagtcatctcctatgcaggctgcctgactcaaatgtctctctttgccatttttggaggcatggaaaaaagacatgctcctgagatattaagatccaaatggcaggggggcgaggcgccccccgcgattcggggagtaataccacccgcctctccccccgcatatattaagatccaaatggcagggaggcgaggcgccccccgcgatgcggggaattatattcggatcaatatcaccggctgtgtgtacacctactgcgatattgaacgtagtatcatgctctctccctccctggagattaggagcaatatcacagctcgtttacgacccaaaacggggacacaaatgcccctgagagtgcagcgttatactgggatagacgaggatggtcacgtggtggagaggcgtgtttttggtgaagaaaggcggagagtcctccaagcaggaactaagtggctagaggaacatgcactagctgattatcaaaacccccaagaatatggaaggacccagttgccaggaaccgacccccagttggacccacatgaaagagaggagatgcaaaggctaaaccgagacagggaagctctcttggaaggattaatgaggggagctcagaaggccacaaacgttaacaagctctctgaggtcattcagggaaaagaagaaagtccagcacaattctacgagagactgtgtgaggcctatcgtatgtatactccctttgatcccgatagccctgaaaatcagcacatgattcacatggctttagtccgtcaaagcgcagaagacatgagaagaaaactgcagaaacaggctgggcttgcagggatgaatccatcacaattactagaaatagctagccaggtgttcataaacagggatgcagtaagccctaaggaaaatggcaaagagaatggaggatggcccccctgtttgagggccttggcagcaactgccctgctagtacaagaagcaaataagctgactcttgggcaaaacctgaacataaaggcctcccgtgctgtggtgactttaatgaatactaaaggacatcattggctaacggatgccagactcaccaagtaccaaactttgctctgtgaaaatccccgtataaccactgaagtttgtaacaccctacaccctgccaccttgctcccggtatcagagagccctgtcgagcctgattgtgtagaagtgttggactcagttgactctagcagacctgacctccgggaccaggcttgggcatcagtagactgggaactatacgtggatgggagcagcttcttcaacccccaaggagagagaggtgcagggtatgcagtggtaaccctggacactgttgttgaagccagatcgttgccccaggccacttcagcccagaaagctgaactcgttgctttcattcgggccttagaactcagtgaggttgagactgtcaacatttacactgattctcgaggacaccagcgagcttccaccttgctgggtttggggaattcccgcgctgactcagaggctcgaaaagcagcatctgcccccttctgggcatcagtgctccctcaagcacctgatcttggacctacttcttctaaagaagaaaaggaccttctccagatttcgaccgcccttatggatcggctcaaacaacgggcctgcatttttggctgccttggtacagaaaacggcaaagatattaggaaaaaatgtcactggggatgtgaacagccctgcgatattgagagtagtatcatcctctccccccttgtatattgggaaacaacatcacagcaaaaaggaatgtagtaggagtcagggtgataataaggagaaggtcagcaacgaacatgtgagcaatagaatctatgtcatcatgaagttcacgggaaggttctatgactggacgtgtac

SEQ ID NO: 140232 - DNA, 1356 bp, Homo sapiens
atgggatttggctcccctggaatgagcagccagttatctttgatcagcttgggctgccgtaacaaaggaccacagaccatcagcttcaatcacaggaatttctcttctcagcgtcctgaggctagaaatccaagatcaagggaaggagagtatgctattactcccaatatcgcaggagttgtacacccttttgtgttttttggtccaatatccaggaaaatagaggatgatatttctcccaatgtcgaagtaattctagagcacccctgtgatattctccctaatatccagaaaatattaggaaaaaatgtcactggggatgtgaacagtcctgcgatattgagagtagtatcatcatctccccccttggatattgggaacaacatcacagaggatccagaactgcagccggtcctcgctttgctgtccctgtccctgtccatgtatctggtcacggtgctgaggaacctgctcagcatcctggctgtccgctctgactcccccctccacaaccccatgtacttcttcctctccaacctgtgctgggctgacatcggtttcacctcggccacggttgccaagatgattgtggacatgcagtcgcatagcagagtcatctcttatgcgggctgcctgacacagatgtctttctttgtcctttttgcatgtatagaagacatgctcctgactctgatggcctatgaccgatttgtggccatctgcccatctgtcaccccctgcactaccgagtcatcatgaatcctcacctctgtgtcttcttagttttggtgtcctttttccttagcctgttggattcccagctgcacagctggattgtgttacacaactcaccttcttcaagaatgtggaaatctataattttttttctgtgacccatctcaacttctcaaccttgcctgttctgacagcatcatcaataacatattatgtattttagatatccctatatttggttttcttcccatttcagggatccttttgtcttactataaaattgtctcctccattccaagaattccatcgtcagatgggaagtataaagccttctccacctgtggctctcacctggcagttgtttgcttattttatgaaacaggcattggcgtgtacctgacttcagctgtgtcatcatctcccaggaatggagtggtggcatcagtgatgtacgctgtggtcatccccatgctgaaccctttcatctacagcctgagaaacagggacattcatagtgccctgtggaggctgcgcagcagaacagtcaaatctcatgatctgttatctcaagatctgctccatcctttttcttgtgtgggtgagaaaggtcaaccacattaa

SEQ ID NO: 140233 - DNA, 436 bp, Homo sapiens
tctaaatcactcatcattggttaaagccgagctcacagcagaataagccaccatgaggctgtcggtgtgtctcctgctgctcacgctggccctttgctgctaccgggcaaatgcagtggtctgccaagctcttggttctgaaatcacaggcttcttattagctggaaaacctgtgttcaaagttccaacttgcccaatttaaggcacctgtggaagctgttgcaagcaacatggaagcgattaattgcgtggatacgatgggcctatgagaaaagagtgctaattacaaaaacattgggaaaaatagcagagaaatgtgatcgctgagatgtaaaaagtttttaatgctagtttccaccatctttcaatgataccctgatcttcactgcagaatgtaaaggtttcaacgtcttgctctaataaatcacttgccctg

SEQ ID NO: 140234 - DNA, 3750 bp, Homo sapiens
atgagtgaagcccccagattcttcgttggaccagaagatacagaaataaatcctggaaattatcgacatttcttccaccatgcagatgaagacgatgaggaggaagatgattctccaccagaaaggcagattgtggttggaatatgttccatggcaaagaaatccaaatccaaaccaatgaaggaaattcttgaacggatctccttatttaaatatatcacagtagtagtatttgaagaggaggttattttgaatgaaccagtggaaaactggcctttatgtgattgtcttatttctttccattctaaaggatttccactggacaaagcggttgcctatgcaaaactcaggaatccatttgtaatcaatgacttgaatatgcagtatctcatacaagataggagagaagtatatagtattcttcaagctgaaggtattttacttcctcgttatgctattttgaaccgtgacccaaataatcccaaaggagtgaagctgcagaccttcgcggtgagtgttacagctcttaaggtagcgcgtctggagttgttcgttcctcccggtgggctcttggtcttgctgggctcaggtgtgaagctgcagatcttcgcgggctgcaggtggagctgcctgccagtcacgcgccgtgtgctcgcactcctcagcccttgggtggtcgatgggactgggcgccgtggagcagggggtggtgctcgttggggaggctcgggccgcacaggagcccatggagtggaatgtaatctgattgaaggggaagatcatgtagaagtaaatggggaagtttttcaaaagccatttgtagaaaagccagtcagtgcagaagatcacaatgtttacatttattacccaacttctgctggtggtggaagtcaaagactctttagaaagattggcagtagaagtagtgtttattctccagaaagcaatgtacgaaaaacaggctcatatatatatgaagagtttatgcccacagatggtactgatgttaaggtttatacagtgggtccagattatgcccatgctgaagctcgaaaatctccagcacttgatggcaaggtggaacgagacagtgaaggaaaagaagtaagataccctgttattctcaatgcacgagagaaattaattgcttggaaagtctgccttgcttttaagcaaacagtttgtggctttgatttgttacgggccaatggacagtcctatgtctgtgatgtcaatggcttcagttttgtgaaaaattccatgaagtattatgatgactgtgcaaaaatacttggaaatattgtaatgcgagaacttgctccacaatttcatattccatggtcaatacccttagaagctgaagatatcccaattgtaccaactacatctggaactatgatggaacttagatgtgtcatagctgttatacgtcatggggatcgaacaccaaaacaaaaaatgaaaatggaagaagtgctagatattgcacgacagcttcttatggagctagggcaaaataatgattctgaaattgaagaaaacaagccaaaacttgaacaacttaagactgtattagagatgtatggtcatttttctggaataaatcgtaaggttcagttgacctatctccctcatggttgtcctaaaacatctagtgaagaggaggacagccgaagagaagaaccatctttacttttggttctaaaatggggaggtgaattaactcctgcaggcagggtccaggctgaagaacttggaagagccttcaggtgtatgtatcctggaggtcaaggagattatgcaggatttcctggttgtggtttacttagattacatagcacctacagacatgacctcaaaatatatgcctctgatgaaggacgagtccagatgactgcagctgcttttgcaaaggggcttttagctttggaaggagagcttacacccattcttgttcaaatggtgaaaagtgcaaatatgaacggtcttttggatagtgatagtgactctctgagcagttgtcagcaacgtgtgaaggcaaggcttcatgaaatacttcagaaagacagagattttactgctgaagattatgaaaagcttactccatctggaagcatttctcttatcaaatcaatgcatttaattaaaaaccctgtgaagacctgtgataaagtttattccttaattcagagtttgacttctcaaatcagacatcgaatggaagatcctaaatcatcagatattcagctttaccatagtgaaacattggagcttatgctacgtagatggtccaagttagagaaagactttaaaacaaagaatggaagatatgatattagtaaaatccctgacatatatgactgtataaaatatgatgtccagcataatggttccttgaaattagaaaacacaatggaattatataggctttcgaaggcattagcagatattgttatccctcaggaatatggtataactaaagctgaaaaactggagattgccaaaggctactgtactcctctggttagaaaaattcgctcagaccttcagaggacacaagatgatgacactgtaaataaacttcatcctgtgtattctagaggtgttctgtctcctgaacgtcatgttcgtactagattatattttaccagtgaaagtcatgtacattctttgctgtctattcttcgctatggtgccttatgcaataccaatgattctcagaatgaagatggaggaatggtgaaggagatggaatcaaaggatgaacagtggaaacgagctatggattatttaaacgttgtcaatgagctcaactacatgactcagattgttatcatgctttatgaggatcctaataaggatctttcctcagaagaacgctttcatgttgaattacactttagtccgggagccaaaggttgtgaagaagacaaaaatttgccatctggctatggatatagaccagcttccagagagaatgaaggcaggagaccttttaaaattgataatgatgatgaaccacatacttctaaaagagatgaagttgatcgagctgtgatattgtttaaaccaatggtatcagagccaattcatatacacaggaagtctccacttccaagatctaggaagacggctacaaatgatgaagagagccccctgagtgtgtctagcccagagggtactggtacctggctgcattataccagtggtgtgggtactgggcgtcgaagacgcagatcaggggaacaaatcacttcttcccctgtctcccccaaatcattggctttcacatccagtatttttggctcatggcaacaggttgtatctgaaaatgctaattacctgagaacaccaagaactcttgtggaacagaagcagaatcctactgtagggtctcactgtgcgggcctgtttagcacctcggtgctcgggggttcttcaagcgcacctaacctacaggattatgctcgtactcatcgtaaaaagctgacctcttctggctgcatagatgcctctacagctttacgttccagtccaataatgagaaaaaaagtatctttaaatacgtatacacctgcaaagatcctcccaacaccaccagctaccttaaagagcactaaagcaagcagcaaaccagctacaagtggaccttctagtgcagttgttcctaatacctcatctcggaaaaagaatataactagcaaaacagaaacgcatgaacacaaaaaaaacactgggaaaaagaaatga

SEQ ID NO: 140235 - DNA, 2874 bp, Homo sapiens; identical to SEQ ID NO: 128751

SEQ ID NO: 140236 - DNA, 369 bp, Homo sapiens
cttgagctagatacagagtgccgattggtgtatttacaatccttgagctagacataaaggttctccacgtcctcaccagagcagctagatacagagtgtcgattggtgcattcacaaaccttgtgctaaacacagggtgctgattggtgtatttacaaaccttgagtggggctgcaggtggagctgcctgccagtcctgcaccctgtgctcgcattcctcagcccttgggtggtcaatgggactgggcgccatggagcagggggtggtgctcgtcggggaggctcgggctgcacaggagcccatggagtgggtgggaggctcaggcatggcaggctgcaggtcccgagccctgccccgtgggaaggcag

SEQ ID NO: 140237 - DNA, 555 bp, Homo sapiens
ctaactgggaggcaccccccagtaggggcagactgacacttcacacggccgggtactcctctgagacaaaacttccagaggaacgatcagatggcagcattcgcagttcacgaaaaaccgctgttctgcaaacaccgctgaatccaggtgatccaggtgccaggggtcggtggcggacgacatgggggagagggtcagcggcgaggccccgcagttggactccaccagctcgccctggatgtggacgtgagccgaggcgtttgtctgcctcaaggcggccttgagaggggcgatctggttgaactggactctggagaggcaaccagtgaatcctggggtgttgtatttgtgaatctcttggtcaattttccctgtttctagtggatcccgcactggggctgcaggtggagctgcccgccagtcctgcaccgtgcgctcgcattcctcagcccttgggtggtcgatgggactgggcgctgtggagcagggggtggcgctcgtcggggaggctcgggccgcacaggagcccatggagtgggtgggaggctcaggcat

SEQ ID NO: 140238 - DNA, 543 bp, Homo sapiens; identical to SEQ ID NO: 120295

SEQ ID NO: 140239 - DNA, 444 bp, Homo sapiens; identical to SEQ ID NO: 116839

SEQ ID NO: 140240 - DNA, 1608 bp, Homo sapiens; identical to SEQ ID NO: 120530

SEQ ID NO: 140241 - DNA, 432 bp, Homo sapiens
ctagatataaagactctccacgtccccaccagactcaggagcccagctggcttcacctagtggatcccgcaccagggctacaggtggagctgcctgccagtcccgcgctgcgcgctcgcattcctcagcccttgggtggtcgatgggactgggcaccgtggagcagggggtggtgctggctggggaggcttcggtcgcacaggagcccatggagtgggtgggaggctcaggcatggcgggctgcaggtcccgagcccattctggaggagtagggatgacaatgacttggcagataattcctgaagttccatgaattcctttgccatctattatatttgtttctttacaaaaactcagtaagtttctacttgatgttgaatatctttgctccggctcccttagagcatgtgcttctgtggggatcacgctcat

SEQ ID NO: 140242 - DNA, 894 bp, Homo sapiens
ctaggtataaagactctccacgtccccaccagactcaggagcccagctggcttcacctagtggatcccgcaccggggctgcaggtggagctgcctgccagtcccgcgcggtgcgctcgcattcctcagccctcgggtggtcagtgggactgggcgtcgtggagcagagggtggtgctcgtcggggaggctcgggccgcacaggagcccatggagtgggtgggaggctcaggcatggtgggctgcaggtcccgagccttgccccacgggaaggcagctgcacctgtggaggcaggaagcggagctagagaggaacagaacctgggttttccgagggagcctcgttcaggtgggggcgccaggggctctgacggcatctgtgggatgcgtgtgatgttccggaagtggatattgttctgcccatcttcgaggtaagaagcctttaggccatggactggtccatgttcccacacaaagccagacagcaggaggctcagcgcaaaaccaggtggcctgagcacactgtcatccaccacatcacacgccagcagaactgaccagaacacccccaagacgtcaagcttgttcttaaagtttccccaaattgttccagctgagtcatgagttacaacacgattgtgagtcgtttcttgatgggcaccaagagccctcagcttttcttcgtctttctcaagaactacgtgaactaaaaatcccagcctcccgctccagcgcgggccagggctggcaagggcccctgcgtccaagtcccccttggcatggctcccctcgcccaacgtggcagccctcagaggagccggaagaccgctggtgctgggcctgggctgctgctcctgctgacaagtggattttggtctgtaggatttcagtgtcat

SEQ ID NO: 140243 - DNA, 599 bp, Homo sapiens
gaggggcctgtcttcagccagggacaagcagaacattatggtcagcatcatccacaaggtcaagaggccacagagccccctgagggcagtatactggccccttcgatattgtatcctacccagcaggagggccacagtgaactagatctacttggtgtgaactttgaagtcctcacctctgcttgtcacctatcaggctatcaggatgaactgataaatcagctgaagggagcaaagtcacagtgcgtgagaattgttttggagatttactcaggagcccagctggcttcacttagtggatcccgcaccggggctgcaggtggagctgcctaccagtgccgcacggtgcgcttgcattcctcagcccttgggtggtcgatgggactgggcgccgtggagcagggggtggtgctcgtcgaggaggctcgggccgcacaggagcccatggagtgagtgggagactcaggcatggcgggcttcaggtcccgagccatgggctggttgtctcttctaccccagatcctatatgtcatcttcttgcccactccacaccatccactctgacctctttgctgttcttcaaggacgcacaaagtcat

SEQ ID NO: 140244 - DNA, 780 bp, Homo sapiens
tcagcgtcttttctgcggcttccttctatcccgctccgaggctgcagggccctggcagagtggcgtcagctggaaggctggccagagccggattttgttgcactccgggcaggaagatggccgaggcggcggctgacggagatagtagtgccttgctgaagtcacggcggccggcggcgccctcctggaggctgacgggacggaggcagggaacttcccggtgagccagccgggcctagcaggagccttcggcggctgcccaaagccgtggggacggctggctgactcagccgctctctggacggagttgctgggtccccacaagcctgcccgtgcagcagactcaggagcccagctggcttcacctagtggatcccgcaccagggctgcaggtggagctgcctgccagtcccgcgtcgtgcgcttgcattcctcagcccttgggtggtcgatgggactgggcgccgtggagtagggggtggtgctcgttggggaggctcgggccgcacgggagtccatggagtgggtgggaggctcagacatggcgggctgcaggtcctgagccctgccccgcgggaaggcagctaaggcctcagttcttgacttctgtgaacccacaggatcaacatcatgtgaaagccaccaaggcttgtgtcctgcactctctgaagcaatggcccgatctgtaccttgggtcccgggcctcacccacaaaaccatttttccctcgtaggcctccaggcctatgatgggtagggctgccatgaatgtctctgacat

SEQ ID NO: 140245 - DNA, 962 bp, Homo sapiens
atgaggccgcggaccctcgcggtgagtgttacagctcttaaggtggcgcgtctagagtctgtcccttctgatgttcagatgtgttcggagtttcttccttctggtgggctcgtggtctcgctgggctcaggagtgaagctgcagatcttcgtggtgagtgttacagctcataaaagcagcgtggacccaaagaactcaggagtccagctggcttcacctagtggatcccgcaccgggactgcaggtggagctgcctgccagtcctgcgccgtgcgctcgcattcctcagcccttgggtggtcgatgggactgggcgcagtggagtagggggtggtgctcctaggggaggctcgggccgcacaggagcccatggagtgggtgggaggctcaggcatggcgggctgcaggtcccgagccctgccccgcgggaaggcagccaaggcccagcgagaaatcgagcacagtgccggtgggccggcactgctgggggactcagtacaccctccgcagccactggcccgggtgctaagtcccccattgcccggggccagcagggcttgctggctgctccgagtgcggggcccaccaagcccacgcccacccggaactccagctggcccgcaagcgccgcacgcagccccggttcccgctcgtgcctctccctccacacctcccttggtccacttgacaaacgatgttctaagagtgaaggtcaagtgggcctttttctttacactccacaagtagctcaaaacattccacactgcagtctttgtcagatttggtccgtggcttcctgatacaggattttgctcttctttgagtttccagttttcttttttaatttccctggatactcttccatatagaaagggagtcatctgtttattggaggcattggatgatctgctgtttttcttggttgagacttggtaccaccaagaagcagtcagtgccctcat

SEQ ID NO: 140246 - DNA, 1405 bp, Homo sapiens
ttaattgttgtgcagtttcatagatgggtcaggaggtggacaagttggggccagagatgatggcagtccagcagcaactccctgtgctcccttctctttgggcagagattctatttttgacatttgcacaagacaggtagggaaaggggacttgtggtagtggaccataccttgagctagatacagagtgccgattggtgtatttacaatccctgagctagacataaaggttctccaaggccccaccagagcagctagatacagagtgtcgattggtgcattcacaaaccttgagaaaccttgagctaaacacagggtgctgattggtatatttacaatccctgagctagatatactctccacattcccactagactcgggagcccagctggcttcacccagtggatcccacaccggggctgcaggtggagctgcctgccagtcccgcgccgtgcgctcgcattcctcagcccttgggttgtttgttccttcccggtcgatgggactgggcgccgtggagcagggggtggtgctcgtcggggaggctccggccgcacaggagcccatggagtgggtgggaggctcagacatggcgggctgcaggtcccgagccctgccccgcgggaaggcagctaaggcccagcgagaaatcgagcacagcgccgatgggccggcactgctgggggactcagtacaccctccgcagccactggcccgggtgctaagtcccccattgcccggggccagcagggctggccggctgctccgagtgcggggcccaccaagcccaagcccacccggaactccagctggcccgcaagcgccgcacgcagccccggttcccgctcgtgcctctccctccacacctccctgcaagctgagggagtgggctccagccttggccagcccagaaaggggctcccacagtgcaggggggaggctgaagggctcctcaaatgccaccaaagtgggagcccaggcaggggagaagaattgtggcattcacgatagaagtgggggtgttgagggaagatctgttttgaatggtgatcctactttgaacattttgggtgtagagcagtacgaggccatcaggtatccaggtggagatggcatactgctgagccagcaggaaaaggcaacaggacgaggggcaggatttgccactggaatgtcagcaggccatacctcaggcgttcagctccatggagcaaagacagtagtgatcacgttccttgacaacagtgctagtgtgcggggagcttttagttttccttttctctgctccttgaaccaagaatccagcatcagcatcagcatcagcatcagcatcagcatctgctcagctgtaggccatgattgtctgtactgtttaccagcagctcatgtaatatgcttgatgtaa

SEQ ID NO: 140247 - DNA, 955 bp, Homo sapiens
tcagcttgcagggaggtgtggagggagaggcgcgagcaggaaccggggctgcgcgcagcgcttgcgggccagctggagttctgggtgggcgtgggcttggcgggccccgcactcggagcagccggccggcccggcgctgtgctggatttctcgctgggccttagctgccttcctgcggggcggggctcgggacctgcagcccgccatgcctgagcctcccacccactccatgggctcctgtgcggcccgagcctccccaaggagcaccaccccctgctccacggcgcccagtcccatcgaccacccaagggctgaggagtgcgagcgcacggcacgggactggcaggcagctccacctgcagccctggtgcgggatccactgggtgaagctagctgggctcctgagtctggtggggagccaacaccttcggggccaggggtcgcgggcagcggcagcactcacacacatgcactcacacacgcatgcacacatgcacacacacgcgccgagccccttcggcttcctcctcctcctcgtcctcttcctccacctctttctccacctcccctgcgcctctgctgccttcgaagcctttttccttgtccactgacagaatcagcagcaaaagcaggcagcaaaaagttccattcggtccaagagatcccgagccccgcggtgtgcgagctgggagttggaaccgtactacacattgatccggagaagtggagggctggaagggaaaatgtggagaccggagggaaacgaactggatcaggcaaagattccacgggaagggggtgggggcagacagactatggcttagggaaaaaagagcggaccgaggaggcttccaggagctgcatttgcctggtctgcgtatcaatgcgcagggatgccctctgtgggcaaagcgtgggaagtcacttttgtcaatggagcctgcgaacatcctga

SEQ ID NO: 140248 - DNA, 1394 bp, Homo sapiens
actggtgcactcacaaaccttgagctaaacacagggtgctgattggtgtgtttacaaaccttgagctagatacagagtgccgattggtgtatttacaatccttgagctagatacagagtgccgattggtgtatttacaatccctgagctagacataaaggtcctccacgtccccaccagagcagctagatacagagtgtcgattggtgcactcaaaaaaccttgaagcttaaacacagggtgctgattggtgtatttacaatccctgagcttagatataaagactctccacgtccccaccagactcaggagcccagctggcttcacctagtggatcccacaccggggctgcaggtggagctgcctgccagtcccggtgccgtgcgctcgcattgctcagcccttgggtggtcgatgggactgggtgccgtggagcagggggtggtgctcgtccgggaggctctggccgcacaggagctcatggagtgggtgggaggctcaggcatggcgggctgcaggtcccgagccctgccccgcgggaaggcagctaaggcccggccaacaccctttggtcacatgaataaaagtcaagccctttctttgctcattgctcagcctctgggtattaatctgctgagctggtggccacctaaatacaatcgtcctgttcccctcattggtctctccggtctcctgattccagccacattttgcctgggggagacccgtgactccaggcatgctatcaggacaacttcaacccgaggggagatcagctctcccgcaacctggtgccgctctctgacagcacaacagaacctaaggggctacaggatgattcaaggaacagtgtgctacaggacctcggtagcccaccagtggctagaaaacaatgcactggaaggcacccttaatgtcctggcatatgcacagggccagttcccagaagcagacccgcactgggacccaaacaaggaagcccaactacagcaactgcagaggtaccaagaggcactcctgcaagttttgagaaaaggagagaaaaaggcattcaatatgggaaacatttcagaggtgcttcagagagcagatgaaagctgtagccagttttatgagagactctatgaggccttccagctttgcagtccatttgaccctgaggctactgagaaccagtgcatggtaaacgcagtgtttgtagggcaaacccagggagacatcaggcgaaagctgcaaaagctagagtgtttcactggcatgaatgtcactcaggttttagaagtggccaccaaggtgtacactaactgtgaggaggagactcagggaaaaggccaatttgctggtggcagcacttatggaaaggggggcgaatgtcccaagacgaagtggatgtag

SEQ ID NO: 140249 - DNA, 2616 bp, Homo sapiens
ttatttgagttcattgtagattctggatattagccctttttcacatgagtaggttgcgaaaattttttcccattttgtaggttgcctgttcactctgatggtagtttctttggctgtgcagaagctctttagtttaatcagatcccatttgtcaattttgtcttttgttgccattgcttttggtgttttagacaagaagtccttgcccatgcctatgtcctgaatggtaatgcctaggttttcttctagggtttttatggttttaggtctaacatttaagtctttaatccatcttgaattgatttttgtataaggtataaggaagggatccagtttcagcttcctacatatggctagccagttttcccagcaccatttattaaatagggaatcctttccccattgcttgtttttctcaggtttgtcaaagatcagatagttgtagataagcagcgttatttctgagggctctgttctgttccattgatctatatctctgttttggtaccagtaccatgctgttttggttactgtagccttgtagtatagtttgaagtcaggtagtgtgatgcctccagctttgttcttttgacttaggattgacttggcagtgtgggctcttttttggttccatatgaactttaaagtagttttttccaattctgtgaagaaagtcattggtagcttgatggggatggcactgaatctgtaaattaccttgggcagtatggccattttcacgatattgatttttcctacccatgagcatggaatgttcttccatttgtttgtatcctcttttatttccttgagcagtgatttgtagttctccttgaagaggtccttcacatcccttgtaagttggattcctaggtattttattctctttgaagcagttgtgaatgggagttcactcatgatttggctctctgtttgtctgttgttggtgtataagaatgcttgtgatttttgtacattgattttgtatcctgagattttgctgaagttgcttatcagcttaaggagattttgggctgagacaatggggttttctagatatacaatcatgtcatctctgaaaatttgaagggtccttgctgcagccacactcacatcattggcttgttcatcaacagtcaatattctgagaacactgaagggaaagaagatggttctctgtagaccaccccagaatagctcaaattttttcctctggctcagctgaatgacaagagcaaggttagggctgacataggcaagctcacttgctagggtaggaaaccctctaggacagttccagaagttagcggggtttggtggaagggtattttggcaccagcagagagcatgctgggctgctgcaaggagcaggagctggcaatcaacagcgagtttggatgttggcaacctgccaccaacaggccccagtatgtaatgttcccctccctgtatccgtatgttctcattgttcaactcccacttatgagtgagaacatgtggtgtttggttttctgttcttgtgttattttgctgagaatgttggtttccagcttcatccatgtcctgtaggagaagttcatcacatatatttttggccagattatctacaaaagcagttgtttgtactgattcagtaatagatacaacagcaatgctaacagttgccataatgtctatggctgagcctgtaaagaccataagtgtaaatgtgaatcttttgtgtctgacctgggacagggcactttctaaggtggcaagggcagaagaatcttgccaattgcatgtcaaattggctggtagaagtgcctcagattgtctccttaataccacgacactggaagtttttaaactagacatatcatgaccagtgatacatgaggcaaaccaagcctgtccctgcacccgggtcacaaatgtggcatttccaggtgtaatggaaatgttagttccagactcaggagcccagctggcttcacctagtggatcccgcaccggggctgcaggtggagctgcctgccagtcctgcgccatgcgctcgcattcctcagcccttgggtggtcgatgggactgggcgccgtggagcagggggtggagctcgtcggggaggctcgggccacacaggagcccatggagtgggtgggaggctcaggcatggcagactgcaggtcccgagccctctcagagcccgttctccttttcttcttagctgcacactcagctgccaactcgacagcccctgccttacttgcagccaagggcatcagtacaaatatcaacacagtgacaaaggcaaacgtcttactattgttacgaagagttttgacttcataccttcctaaattggattcagggaccctcaaaaatctgcagatggcccttcgcgaatcgctgcctgaggtactgtcaggcctacgggagctagattcctgcctcatctgagctcccactggctgcttcttactgcaagggggctgagaagcactggctggctggatcgtcagacttccagctgaaaaacccattacgtgtgtggtcaaaatgtcgatgaaggcttgacttgcaccagcgcttctggctcctatccttccaaaggccttatcttcaaatacagtcat

SEQ ID NO: 140250 - DNA, 954 bp, Homo sapiens
caactattttaggtgctggagtatgtttgaagagtgtgctgggaaaaaggaagcatttcttcattgatttaaatcagtatgaatattatatgcctaaataaaaaatttgcacaggtaaattctctcaactgtgaatgggaagaagctgccccaggaattctgtgaggatggtattccctggagtctggctttggaagatttcatttgttgctagaaataacaggttgagaaagagggagttagcatcacctaaaacctgcacgtgaacaagggttgacatgatacactatggccttagaaaagggccaggtgaaaccccaagctaatcactgcggtctttcagagccggacagacaggtgccagcagagcccgggggctcactctcctttcaagtcattcctcagcccttcgaaagggaagccccaaacacttttgcacgctgtgctggcagacattcttggcctggtgtgtctggaaagttgcattcagtccttcacggtgccaaacacagtttgatttagggaagtccacacaatggacactggaaatccttacagacccaaaatcccacttgttcagcaggaagcagcagccccaggcccgagcaccagcggtctttccggctcctctgaagggctgccacgttggggcgagggggagccattgccaagggttccagggttgctttaggccatctgtggccccactcatcctggggacagatggtttttctttattggaaaaattgtggacttttaaaacctgttgactaaacagtaattaatttatatttgtgaaaaatgccactgtcctagtgatttctgatgtaaataatgttgtgtatatagtatgtatttaaattttcctacattgtaaaactgctgtacttttgattcttgtatattaaaaagtgttactgagcatttttagaattgggctaacaaaaaaaaaaa

SEQ ID NO: 140251 - DNA, 3477 bp, Homo sapiens
atgctgcggatcaacggcatcgttgaagcggaaggtagtttccagctcatcgatcacttcctgcggagcttcaacattcatcagaacgtagtgtgctttgtgcagtttgttgactcggcgaacacgaggcaagaaaaggaagttcggtatgccatgattcatgacgagtcacggtgcaatggctgtaatatttgcgcccgcgcatgccgtaaaactaaccacgtccccgctcagggaagccgtttatcgatagcacacattccagtcaccgataacgacaacgaaacgcagtatcacttttttcgccagtcatgtcagcactgcgaagatgctccgtgcatcgacgtttgcccgacgggggcgtcgtggcgtgatgagcaggggatcgtgcgggtagaaaaatcgcagtgcatcggctgcagttattgcattggcgcttgtccgtaccaggttcgctaccttaaccctgtcactaaagtggcagataaatgtgatttctgcgctgagtcccgactggcaaaaggctttccgcccatttgcgtcagcgcctgcccggaacacgcattgatctttggtcgcgaagatagcccagaaattcaggcgtggttgcagcaaaataaatactatcaatatcagctacctggtgccgggaaaccgcatctgtatcgccggttcggtcaacatttgattaaaaaggaaaatccatcaccgcaacaccgcgaaggggtgaaagatgtgatgcgctttaacgagccgatgtacaaggttggagagcagaacagcgtctgtatgtcctgtcatctgccggaacagttgcaaaaagcgttctggccgcacgatgtccactttctcaccggcgtcggcgtgctggcagccgtcagcggcaccgcagggcgcgtggtggcgaaaacgttgaatatcaatggggtgcgttacggcatggtgcatgacgagtcgttatgcatcggctgtaccgcctgtatggatgcttgtcgggaagtgaacaaggtgccggaaggcgtctcgcgcctgacgattattcgtagcgagccgcagggcgaatttcctgatgtgaaatatcgcttcttccgtaagtcttgccagcactgcgatcatgcgccgtgcgttgacgtctgcccgaccggtgcgtcttttcgcgatgctgccagtgggattgtcgatgttaatccggatctctgcgtcggttgtcagtactgcatcgccgcctgtccgtaccgcgtgcgctttatccatccggtcacgaagacggcggacaaatgcgatttctgccgtaagaccaatttgcaggccggtaagttgcccgcgtgcgttgaagcttgcccgaccaaggcgctgacgtttggcaatctggacgatcccaacagtgagatttcgcaactgctgcgccagaagcccacttaccgctacaagctggcgctgggaaccaaaccgaagctgtaccgcgtaccgtttaaatacggggaggtcattacccctgtaggattcattggttatggtcaagtcaaatggaatatctcagaatttggatataatatagtatcagtgctggaacgttcagacaggaaagttgtcatattaatggataagctagatgaggcaaggcgatattttagacttgtgaaggcgttacagcaggaaggtgcattagtaaactggaaaaataatcccgacggtacacgcagtccgtatgaaataaatgtgacctatatggatgcgttaagccgccgtgagagtagcgatgaagaacgttgcgccaggtttatccttgcccatgcgattttgttaagtttccccggtgtgccagcgatatatattcaaagtattcttggctcgcgtaatgattacgcaggtgtcgaaaaactcggatataaccgtgcgattaaccgtaaaaaatatcacagtaaagagataacccgagaactgaacgatgaagctacattaaggcatgcggtatatcatgagttgtcgcgtttaattacacttcgtcgcagccataacgagtttcatccggataataattttaccattgatacgattaattcatccgtaatgcgtattccaagaagtaacgctgatggtaattgtctgactggattgtttaatgtcagtaaaaatattcagcatgtaaatagtactaatctgcatggtcgggatctgattagtgaagttgatatattgggtaatgaaataacgctgcgcccctggcagaaaaccctggcatgcaccgttaagcaagtgcccgtggaagaagatgcctataacactaaagtgcattactctttcaccggttcgctgccggaagtgatcgaaaccagccatgactacgccaaatggatggacaaagagcagcttatcgatcgcaaagcggttgccacagtcatcagcaacgttgctgaaggcgcgttttacgatggcgtactgcgtattgtgcgtaccgaagatggtagcgcatggaccggtgttcctgtcagcgcctggattgccgcaccccgccctgccatgctctacacttcccaaacaacaccagagaaggaccaaaaaatgtcgatgataaaaagctatgccgcaaaagaagcgggcggcgaactggaagtttatgagtacgatcccggtgagctgaggccacaagatgttgaagtgcaggtggattactgcgggatctgccattccgatctgtcgatgatcgataacgaatggggattttcacaatatccgctggttgccgggcatgaggtgattgggcgcgtggtggcactcgggagcgccgcgcaggataaaggtttgcaggtcggtcagcgtgtcgggattggctggacggcgcgtagctgtggtcactgcgacgcctgtattagcggtaatcagatcaactgcgagcaaggtgcggtgccgacgattatgaatcgcggtggctttgccgagaagttgcgtgcggactggcaatgggtgattccactgccagaaaatattgatatcgagtccgccgggccgctgttgtgcggcggtatcacggtctttaaaccactgttgatgcaccatatcactgctaccagccgcgttggggtaattggtattggcgggctggggcatatcgctataaaacttctgcacgcaatgggatgcgaggtgacagcctttagttctaatccggcgaaagagcaggaagtgctggcgatgggtgccgataaagtggtgaatagccgcgatccgcaggcactgaaagcactggcggggcagtttgatctcattatcaacaccgtcaacgtcagcctcgactggcagccctattttgaggcgctgacctatggcggtaatttccatacggtcggtgcggttctcacgccgctgtctgttccggcctttacgttaattgcgggcgatcgcagcgtctctggttctgctaccggcacgccttatgagctgcgtaagctgatgcgttttggccgccgcagcaagtaa

SEQ ID NO: 140252 - DNA, 984 bp, Homo sapiens
atgcgcttcccggtgtcggatttgccgaacaaagccttgctgatggagatgctggagcaggttgtcgcgcgtaaacaaaccaccgcgctgatgatcatcacctgtgaaaccctgcgtgatactgcgggcgtgctgaaagaggcgcaacgagaaattctgctgctgacgctggtggaaaaactcaaatcggtactgtcgccacgtatgatcctcgcgcagattagcggttatgactttgctgtcattgccaacggtgtacaggaaccgtggcacgcaatcaccttaggtcagcaagtgctcactatcatgagcgagcgcctgccgattgaacgtattcaactccgtccgcactgtagcattggcgtggcgatgttctacggcgatctcaccgccgaacagctttacagtcgcgctatttctgcggcatttaccgctcgccataaaggcaagaatcagattcagttctttgatccgcagcagatggaagccgcccagaagcggttgacggaagagagcgatatccttaatgcactggaaaatcatcagtttgctatttggttacagccacaggtcgagatgaccagcggtaaactgcgggggatctcaaaacaattagtgggattcaccaatcggcagaacggtgcgaccaaactgctcgttcagtacttcacccatcgccagatagattgcgctggcaccgcagatcagcccaatccagccggcaaagtggatgattgcggcgttaccggcaatgttaccgatcgccagcagggcaaacagcacggtcaggctaaagaaaacgaattgcagaacgcgtgcgcctttcagcgtgccgaagaacataaacagcgtaaatacgccccacagacccaggtagacaccaaggaactgtgcatttggcgcatcggtcagacccagtttcggcatcagcagaatcgcaaccagcgtcacgcagaaagaaccaatcattttggggtccgatga

SEQ ID NO: 140253 - DNA, 2604 bp, Homo sapiens; identical to SEQ ID NO: 132444

SEQ ID NO: 140254 - DNA, 1508 bp, Homo sapiens
atggggcctggggacttgccccgaggtctggccactttctggacagaattggggctgctgagttgggccagggagctggccaggatgccagctgtggagatgccacccaggtcctgcccaggccgcagcaggctttcctgcagcattggcgtggcgatgttctacggcgatctcaccgccgaacagctttacagtcgcgctatttctgcggcatttaccgctcgccataaaggcaagaatcagattcagttctttgatccgcagcagatggaagccgcccagaagcggttgacggaagagagcgatatccttaatgcactggaaaatcatcagtttgctatttggttacagccacaggtcgagatgaccagcggtaaactgcctggcaagagcgcggccattatgctgcccttgtcggtaaacctctctgcgctgcaactgatgcacccgaatatggtggcggatatgctggaactgttaacccgctatcgcattcagccgggaacactgattctggaagtgacagaaagccgacgtattgacgaccctcatgctgcggtggcaatcctccgtccgctgcgcaatgccggagttcgggtggcgctggatgatttcggcatgggctacgcagggctgcgtcagctgcagcatatgaaatcgttggtccggctgaccaagagcgaggtgagtagcgaaacggatcaggatgaattgccgttagcgaaagtcagcgaagttgacgaggcgaagcggcaatggttgcaggggatgcgtcaccccgttgatacggtaaccgaaccagaacctgctgaaatcctggctgagttcattcgccagcattctgcggctgggcagctggtggcgcgcgccgtgtttctctcgccaccctatttggttgcagaagaggaactgtcagttttgctggaaagcattaagcagaacggagactacgcggatatcgcttgtttgacgggaagcaaggatgattactattactcaacgcaggccatgagtgaaaactacgcggcgatgtctttgcaagttgtggagcaggacatcttttccccccattgcacacgccgttcgttttgagtgccagacgtatcctcgtccttacaaagtcgccatgctgatgcaagcgccatattacttccaggaagcgcagattgaagccgcgatcgccgcgatggatgttgcacctgaatatgccgatatacggcaggggatcgtcgggtagaaaaatcgcagtgcatcggctgcagttattgcattggcgctttccgtaccaggttcgctaccttaaccctgtcactaaagtggcagataaagtgatttctgcgctgagtcccgactggcaaaaggctttccgcccatttgagtgcgacagtcgcgtgcttgacgacagtggcggccacgcatgtcgcagtgacatattggccacaagccataatgagtcgagctttgagacctgtctcagtgtcaagcaatcaacaacggcatacggttag

SEQ ID NO: 140255 - DNA, 1164 bp, Homo sapiens
atgcagcagttacagaacattattgaaaccgcttttgaacgccgtgccgagatcacgccagccaatgcagacaccgttacccgcgaagcggtaaatcagctgcaaagaggttccaacatcaacgctctgttagagaaagcggaagatccacagaaactggttcgtctgatgatccaggagatggaagatacactggttgaagtacgttctacttcggcgcgcgcgttggcagaaaagaaacagctgactcgccgtattgaacaagcgtcggcgcgtgaggttgaatggcaggaaaaagccgaactggcgctgctgaaagagagagaggatctggcacgtgcagcgttaattgaaaaacagaaactgaccgatctgattaagtccctggaacatgaagtgacgctggtggacgatacgctggcacgcatgaagaaagagattggcgagctggaaaacaaattgagcgaaacacgcgctcgccagcaggcattgatgttacgtcatcaggcggcaaactcgtcgcgcgatgtgcgtcgtcagctggacagtggcaaactggatgaagcaatggctcgtttcgaatctttcgaacgtcgtattgaccagatggaagcggaagcagaaagccaagccttgagctttccccggctgtggataagggtcttgtccaacaataataatcggacctaccttatattatatcatctatgcaactatgaactctggccaagcagcttcttgtcccctgtgaacacctggattggtttttgcccgtatggtaaacatccgggatttgacctgttccgaacccggtttaaggaattgacacatcggaccaatgataaactgccggatagtcgtccacttgctaaagcataccgagatgcttggcgaggagggggacaacaaaaggctctgggtttcaggacgtggacaagaagtataagagcacctgtttggatcattcgtgtcacgctcaacatgaagaatgttatagtaaccatattagagtccacgggcaacggtatgttcgcaccgaacactcacaatattcagccaccagaccagcaagcaccaatctccattcacatgtggcatgcctctcttgtgtgcaacgtcggccacgcaacccataggactcagcgaccaacagttggagactag

SEQ ID NO: 140256 - DNA, 1041 bp, Homo sapiens
atgcagcagttacagaacattattgaaaccgcttttgaacgccgtgccgagatcacgccagccaatgcagacaccgttacccgcgaagcggtaaatcaggcagatactctggtccaggttgagcaaaaacagggcaacgccattctcagcggcctgagcgatatgatccctaactcatcgcccgagtctgcaccggagatccaactgctgcaatcgcgcatgattctcggtaaaaccattgctgaactgaatctgcgcgacatagttgagcagaagtattttccgattgtgggtcgcggctgggcgagattaaccaaagaaaaaccaggtgagctggcgatcagctggatgcatattccacaactgaatggtcaggatcagcaactgacactcacggttggggaaaacggccactatacactggaaggtgaagagttcaccgtcaatggtatggttttaaagggatccccacacggctttgacgctggcgttcgacttagttgcatggtcgaaaaagatatgatcagcgtggctgatcgcggcaaacctttccactggcaatttgcaaaggagctggaaattgctgtcgcaggaaatatcattctggatgatgttgatgctgaactggaggccgttatgatgggtgctggtatcgggtatatgctctatgaacagatcaaggagtaccttgatactggtcgtttagaatgtgtactgtcagactggagcacagagcgtcccggcttccagatatattatccaaaccgccagtatatgtcatgcggcttgcgcgcatttctcgattataggatccccggcggctgggcgcactatgtgggtcaagaaaaactgcgatcgcataccggctggcagtcgctggcgttcggccttgactggcaacgtccggcgcgttacatgaacaggacttcttatttttataaccactccagccagtggcgttatgaaaccgtcacggcggaagagtgtgctgacaccgatggcggacaaattccgctataccggacactcgatcgactttaa

SEQ ID NO: 140257 - DNA, 2583 bp, Homo sapiens
atggtgcggttatgcatccggttgcccatacgggtgtacgcaaaagtggtggataaaaacgcattaagtctgtggatgcgagaacgtagcgatctttgggtgcagccaaaagttgatggcgttgcggtaaccctggtttatcgggacgggaaactgaacaaagcaatcagtcgcggtaatggcctgaaaggcgaggactggacgcagaaagttagcttaatttccgctgtgccgcaaaccgttagcgggcctttagccaacagtacgcttcagggggaaatatttctccagcgcgaggggcatatccaacaacaaatggggggaataaatgcccgcgcaaaagttgctggcttgatgatgcgccaggacgatagcgacacgctgaattctctgggcgtttttgtctgggcatggccggatggaccgcagttaatgtctgatcgtttaaaagagctggctaccgcaggttttactctaacgcagacgtatacccgtgcggtgaaaaatgctgatgaagttgcgcgcgtacgcaatgagtggtggaaagcggaattacccttcgtcaccgatggcgtagttgtacgagcggcgaaagagcccagaatcccgccattggctaccgggccaggcagagtggctggtggcctggaaatatcaacctgtagctcaggttgccgaagtgaaggcaatgagcccggtaaaatatcggtggttgcgtcactcgcacctgtcatgctggatgataaaaaagtccagcgggtgaatattggttccgtcaggcgctggcaggagtgggatattgcgcctggtgatcagattctcgtcagccttgccggtcagggtattcctcgcattgatgatgtgtgtccctcggatccggcaatcttatctgatatagtaccgtcatgggaacaacacagtggtaaaaaagcgggcggtctcgtcccgtatgatgaaaaatcagggaagaaagggtcagaaaccggctacttcgacaaagacgaagcacgtttccagaaagaaggcttccgcgttgtgccaccagcggcgctacgtcagggtgcgtttattgcccgtaacaccgagctgaggccgtcttacgtcaacatcggcgcatatgttgatgaaggcaccatggttgatacctgggcgaccgtcggttcttgtgcgcagattggtaaaaacgtccacctttccgctggcgtgggcatcggcggcgtgctggaaccgctgcaggctaacccaaccatcattgaagataattgcttcatcggcgcgcgctctgaagtggttgaaggggtgattgtcgaagaaggttccgtcatttccatgggcgtatacattggtcagagcacccgtatttacgaccgtgaaaccggcgaaatccactacggtcgcgttccggcgggaaagttgacgcgaaaactcgcggcaaagtcggcattaacgaactgctgcgtaccatcgactaaaagtatgcacacgggcagcacgacgctgcccgatttttttgcagggatgagcgatgatttcacgccgccgatttttgcaggctactgccgcgacgatagccacgagctcaggtttcggttatatgcattactcctgatttctgacgcgattgctcttggcatagaaccaaagcccgatttgatattactgggcggcgattacgtattatttgatatgtcgctgaatttttcggcgtttagtgacaattatcatctgcagcgtccgcctgctgttgtgttatacgccgatgaactggcaaaattaaaacaaaatgataacgcaccttgcccgcccggttggcagttaagtttgcctgcggcccgtgcttttatccttggcgacgaagcgcaaaatatcagccgtaaagtggtgattagcccctccgctgtcgaacgtatgttagtcactcttgctaccggccgcggtttgatgttggtgggggaaccgggtaccgcaaaatctcttctttctgaattactggcaaccgctattagcggcgatgccgggttaaccatccagggcggggcatctaccaccgaagatcaaatcaagtatggctggaactacgccctgcttatcaatcatggtccgtcaacggaagcgctggtccctgccccgctttatcagggaatgcgcgacggcaaaatcgtccgtttcgaagagataacgcgtacaccgctggaagtgcaggactgtctgttaggtatgctttctgacagggtgatgacggggccggaactcactggtgaagccagtcagctctatgcgcgagaaggctttaatattattgccactgccaatacccgcgatcgcggcgtcaatgaaatgagtgctgcgctaaagcgtcgcttcgattttgaaacggtttttccgattatggatttcgcccaggagttggaactggtcgccagtgcttcggcgcgtttgctggcccatagcggtattccgcataaagtgcctgacgcggtactggaattactggtccgcaccttccgcgatctgcgtgccaacggcgaaaagaaaacgtcaatggatacactgacagcgattatgtcaccgctgaagccgtga

SEQ ID NO: 140258 - DNA, 2964 bp, Homo sapiens
atggctagcggtcgacttaacgcgttagctccggaagccacgcctcaagggcacaacctccaagtcgacatcgtttacggcgtggactaccaggcgtcagtcttcgtccagggggccgccttcgccaccggtattcctccagatctctacgcatttcaccgctacacctggaattctacccccctctacgagactcaagcttgccagtatcagatgcagttcccagtaattccgattaacgcttgcaccctccgtattaccgcggctggattttcgaagaagttccggtcatttccatgggcgtatacaatggtcagagcacccgtatttacgaccgtgaaccggcgaaatccactacggtcgcgttccggcggggtctgtggttgtttcagaaagttgacgcgaaaactcgcggcaaagtcggcattaacgaactgctgcgtaccatcgactaaaagtatgcacacgggcagcacgacgctgcccgatttttttgcagggatgagcgatgatttcacgccgccgatttttgcaggctactgccgcgacgatagccacgagctcaggtttcggttatatgcattactcctgatttctgacgcgattgctcttggcatagaacaaaagcccgatttgatattactgggcggcgattacgtattatttgatatgtcgctgaatttttcggcgtttagtgacgtactctccccccttgccgaatgtgcgccgacgtttgcctgcttcggcaaccacgatcgccctggcagaattgcggcagcaagtattggaccgctcaacaataccgtcaggaagaaagccagcaccagaagctccgattcgattcagggagttaaacgcccgcagtggcgatcccaggtgcatgacagaggcaataaacccgacgcccatcaacagccagaggaaaaacatgccacggacaatacgctgacggtctgcgtcatttttggcggcgaaccagccaattccgctaacaatcagcgcgcctactacgcattgacccaatacggtgggtattacacgggcagttttcaaccagggttccagattcgggaacgaatttttcccagaacggtgagccgatgcgatcttcgaacaggatccgaatgcacgcgttgcttgcgaaacctacgtaatttcggtgatgaaaaagatatcgagcttcaagaaactgaatgcgccgtcatcagagcattggtgcaggtatcgcactggcaatccactctggccgctgcgggccaggtactgaccatcatcgttcgtactattaccgttgctttccagcacgctgcggataaggctgctgataacggcaacctgacagcgatttcctggatccacgtttcttctctgttcctgcaagcaatgcgtgtggctattccggccgtcatcgttgcgctgtctgttggtaccagcgaagtacagaacatgctgaatgcgattccggaagtggtgaccaatggtctgaatatcgccggtggcatgatcgtggtggttggttatgcgatggttatcaacatgatgcgtgctggctacctgatgccgttcttctacctcggcttcgtaaccgcagcattcaccaactttaacctggttgctctgggtgtgattggtactgttatggcagtgctctacatccaacttagcccgaaatacaaccgcgtagcggtgcgcctgctcaggcagctggtgagcgaaatggttgatacaactcaaactaccaccgagaaaaaactcactcaaagtgatattcgtggcgtcttcctgcgttctaacctcttccagggttcatggaacttcgaacgtatgcaggcactgggtttctgcttctctatggtaccggcaattcgtcgcctctaccctgagaacaacgaagctcgtaaacaagctattcgccgtcacctggagttctttaacacccagccgttcgtggctgcgccgattctcggcgtaaccctggcgctggaagaacagcgtgctaatggcgcagagatcgacgacggtgctatcaacggtatcaaagtcggtttgatggggccactggctggtgtaggcgatccgatcttctggggaaccgtacgtccggtatttgcagctcttggtgccggtatcgcgatgagcggcagcctgttaagtccgctgctgttcttcatcctgtttaacctggtgcgtctggcaacccgttactacggcgtacgcctggtggtactggatttagggttacccgacgaagatggactgcattttctcgcccgtatccggcagaaaaaatataccctgccggtactgatcctcaccgctcgcgatacgctgaccgacaaaatcgccgggctggatgtcggtgccgacgactatctggtgaagccttttgcgctggaagagttacatgcccgtatccgcgccctgctacgacgccataataatcagggcgaaagtgagctgattgttggcaatctgacgctgaacatgggtcgccgtcaggtatggatgggcggtgaagagttgattctgacgcccaaagaatatgctctgctgtcacggttaatgctcaaagcaggcagtccggtgcatcgggaaattctctacaacgacatctataactgggacaatgaaccctcgaccaacaccctggaagtgcatatccacaatctgcgcgacaaagtgggcaaagcccgtatccgcaccgtgcgcggctttggctatatgctgctgatcagcgtcttctggctatggcatgaaagtaccgagcagattcagctgtttgagcaggcgctacgcgacaatcgcaacaacgatcgccacatcatgcgtgagatccgcgaagcggtcgccagcctgattgtccccggcgtctttatggtcagcctgacgctatttatctgctatcaggcgcggcgtacgcaccgcgggattatcatcttcaacgatagtcagttcaaccgttga

SEQ ID NO: 140259 - DNA, 1262 bp, Homo sapiens
actgagctcgactctagaggatctgggaatttcgcttcatggtgcccgaattacaaccattggcgagcgagtagaagatttattcataattgccaccgctgaccggcgtgcgcttaataacgagttgcagcaggaagtgcatcagcggttgacagaggccctcaatccaaacgataaagggtgatgtgtttactgatatgaaaagagtttaacaatgcagcagttacagaacattattgaaaccgcttttgaacgccgtgccgagatcacgccagccaatgcagacaccgttacccgcgaagcggtaaatcaggtgatcgccctgctggattccggcgcgctgcgtgtagcggaaaaaattgacggtcagtgggtgacgcatcagtggttgaaaaaagcggtgctgctctctttccgtattaatgataatcaggtgatcgaaggggcagaaagccgctacttcgacaaagtgccgatgaaattcgccgactacgacgaagcacgtttccagaaagaaggcttccgcgttggtgccaccagcggcgggtacgtcagggtgccgtttattgcccgtaacaccgtgctgatgccgtcttacgtcaacatcggcggcatatgttgatgaaggcaccatggttgatacctgggcgacccgtcggttcttgtgcgcagattggtaaaaacgtccacctttccggtggcgtgggcatcggcggcgtgctggaaccgctgcaggctaacccaaccatcattgaagataattgcttcatcggcgcgcgctctgaagtggttgaaggggtgattgtcgaagaaggttccgtcatttccatgggcgtatacattggtcagagcacccgtatttacgaccgtgaaaccggcgaaatccactacggtcgcgttccggcggggtctgtggttgtttcaggtaatctgccgtcaaaagatggcaaatacagcctctactgtgcggttatcgttaagaaagttgacgcgaaaactcgcggcaaagtcggcattaacgaactgctgcgtaccatcgactaaaagtatgcacacgggcagcacgacgctgcccgatttttttgcagggatgagcgatgatttcacgccgccgatttttgcaggctactgccgcgacgatagccacgagctcaggtttcggttatatgcattactgtgagccaggctggtttgaattaatccgtcaccgcctcgccttttttaaagacaacgcagcaccattcaaaattctttttctggcc

SEQ ID NO: 140260 - DNA, 633 bp, Homo sapiens
atgggcaagaaaaactggaacactcttggagagggagtctgcagctgcaggatgtttttgccagatgcaaacacattggccaagaacagtgcttgctctgcagccagcgctgtccaagcagcagaccgcccagacagccaggaagcagaggccctggagcacatggcccacagtcgctgtgcactcaggtgtcagacactcgtcattgtccacgtgtctctcatgagagtcagctggtatcacagcgtcatcatcgtggtgcctctgactgaaccactgctagaaagcttggttcgatgtcggctgcgttcgcgcagagacgacgttccggtcgctcctgctgtgtctgccacccctcgcagagagcctttcagttctgcgtattgcagagaggacgaatgcatgatcagcagagtgacagaagctctaagcaaagttaaaggatcgatgggaagccacgagcgccatgcattgcctggtgttatcggtgacgatcttttgcgatttgggaagctgccactctgcctgttcatttgcattattttgacggcggtgactgtggtaaccacggcgcaccatacccgtttactgacgctcagcgcgaacaactggtgctggagcgagatgctttag

SEQ ID NO: 140261 - DNA, 2577 bp, Homo sapiens
atgtgggcttttcgcggcaaacgccccgtcacgttgaaaatcctacacgtaccaattacgaatctacgaaaaaatattacatcgactcggggcctcaccaaggagtcttcccaaggaaagctggttcgcgcccaggaagaatatactcccgctcgggaaatcgcaaagatgggctggcaatccttgccggcccggcggtattgtctttgctggcgaaagataagacgttacatcaccttacgtctaaacatcgcgtacgccggggggtacaaggcaccagtggaagatatagccctttggatggagaccgatggggcatgtgaccatgtcgattttacctggaacatcccctcaaagtgccagggccctatggacatagtgtcccgcccagtgttttggcatgcccatggcattgtacttttcgcgggtgcccgaaatttgaaccccacgctaacgcgaataccgccctatttgtggcttttgaccctacgcaccggttacgcggctgcaggcatgcaagctttggcgctcgactctagaggatcccccgatgctgtcgtgctttccactcagcactctgaagagatcgaccagaaatcgctgcaagaagcggtaatggaagagatcatcaagccaattctgcccgctgaatggctgacttctgccaccaaattcttcatcaacccgaccggtcgtttcgttatcggtggcccaatgggtgactgcggtctgactggtcgtaaaattatcgttgatacctacggcggcatggcgcgtcacggtggcggtgcattctctggtaaagatccatcaaaagtggaccgttccgcagcctacgcagcacgttatgtcgcgaaaaacatcgttgctgctggcctggccgatcgttgtgaaattcaggtttcctacgcaatcggcgtggctgaaccgacctccatcatggtagaaactttcggtactgagaaagtgccttctgaacaactgaccctgctggtacgtgagttcttcgacctgcgcccatacggtctgattcagatgctggatctgctgcacccgatctacaaagaaaccgcagcatacgctgctgaagcgcggactgaaggctgttcgctggatgtaccggagaatatcgttcatagcggtaaaacctggtttgtggaagcgaaactgaaacagggcattgagagcgcgacccagaagaaaatcgtcaagatgatcaaagacagcaaactgaaagtgcaggcgcaaattcagggcgatgaaatccgcgtaacgggcaaatctcgtgatgatttgcaggctgtcatggcgatggtacgtggtggcgatctcgtttctagcaaacgcacttttaacgcctcgtatgcggcaatgttcgccgggatttcaatgcgcaaactgctgacatacggcggttctttcatggtactggcgactgtcagccacactgcggccagcattgcgccagcgagaaatacccctgaccccgcccagcgaaccggcaatcgccacgccaagaaactggctggtggagtaaaacccatcgccgtactttgtaaactgctggcgatctttatgataagtgaggcagaggttcctcaattaacgcccaagaaagtggagcgaaacattgccgatggttggcgttccaacaattccgaccaataccaggcaaacagatggcattggcaatacgtaaagaaggcacaccaggtatgtcgaaatccggggctacgagatgttgctccaggcgtacctacaggttcctcatcgcaggccaagtggtgtgggcgtggttggacattcaacgggatcagatgtgtaggccacgggtcaactttcgcgtaccagcccattgggggtggcgctcgttgttcgaccaggtcgccttctcaaggtctcgatggcaaaccaggtgcccttgacataccaggcaaagcggtcacgctaatcgacaacgctgccagtattctggcgtcgttaatgccaccggaagtaagcagccgcttgcagcatcggttgacggagatgggcgttcatctgctgttgaaatctcagttacaggggctggaaaaaacggattctggcattcaggcaacgctggaccgccagcgcaatatcgaagtggatgcggtaattgccgccaccggactgcgcccggaaaccgccctggcacgacgcgccgggctgacgattaatcgcggcgtttgcgtcgatagttatctgcaaaccagtaataccgatatttacgcgctgggcgattgcgcggaaattaacggtcaggtattgccgttcctccagccgattcaacttagcgcgatggtgctggcaaaaaatcttctcggcaataacacgccgctgaaactcccggcgatgctggtgaaaatcaaaacgccggaattaccgctgcatctggcaggcgaaacccagcgtcaggatttacgctggcaaattaataccgaacgccagggaatggtggcgcgcggcgttgacgatgctgaccagcttcgcgcctttgtggtcagtgaggatcggatgaaagaggcatttggattgttgaaaacattgccgatgtag

SEQ ID NO: 140262 - DNA, 3774 bp, Homo sapiens
atgtggtccttcgaattacggtttccccgcgcggtgaccgatgcggcaattgttggtcgtcatgtcggaaccacgttaatggtggcgcgttatgcggtcaacacattgaaagaagtggaaaccagtctgagccgctttgagcaaaacggtattccggtgaaaggggtgattctgaactccatcttccgccgcgccagcgcgtatcaggattatggctattacgaatacgaatatagtcggatgcgaaataacgacgcctgcattcgcaccgccccgccggataaggcgttcacgccgcatccggcaagcaaaccagctcataagccgggagaacaacctatgaaaaacaatccgctgatctcaatctatatgccgacctggaaccgacaacaactggcgattcgggcaataaaatcggttttgcgccaggactacagcaactgggagatgatcatcgtggatgattgctccacctcctgggaacaactgcaacatgcgttcaccgaatacgtgcgcaacaaccgtcttccggagcctgtcatacgcgtaaaacagccagcgctggcgcgatttagccccgacgtatccccactgttcgtccatttccgcgcagacgatgacgtcactgcccggctgtatgcgcgagaagcgatcgaccgtctgcgtgacacctcttcttctcaccagcgtatttccgtggtggaagtgatgggccgttattgtggagatctgacgttggctgcggccattgccggtggctgtgaattcgttgtggttccggaagttgaattcagccgtgaagacctggtaaacgaaatcaaagcgggtatcgcgaaaggtaaaaaacacgcgatcgtggcgattaccgaacatatgtgtgatgttgacgaactggcgcatttcatcgagaaagaaaccggtcgtgaaacccgcgcaactgtgctgggccacatccagcgcggtggttctccggtgccttacgaccgtattctggcttcccgtatgggcgcttacgctatcgatctgctgctggcaggttacggcggtcgttgtgtaggtatccagaacgaacagctggttcaccacgacatcatcgacgctatcgaaaacatgaagcgtccgttcaaagaagtgataaaggaatccaaagttgaagagcccaggaaacgggaaactgtatccataatgctgaccaaatatgcagcctataacacctttcaccactgtgaacagtgccgccagtacatggacttcacctctgcctcccagaacgaactggcgctgcacagcaagaaagagatcgacgagtatttcgcgcatgtctggcaaaccatgcaggcatgtatcgatcgcgggatgaacaccgaaggtgtactgccaggcccgctgcgcgtgccacgtcgtgcgtctgccctgcgccggatgctggtttccagcgataaactgtctaacgatccgatgaatgtcattgactgggtaaacatgtttgcgctggcagttaacgaagaaaacgccgccggtggtcgtgtggtaactgcgccaaccaacggtgcctgcggtatcgttccggcagtgctggcttactatgaccactttattgaatcgaactgctgggcggtagcccggaacagggatgtgatgcgcgatggtcgcattgagcaagacggcacgccgcgtgaaatctacgaagagccgaaaaacctgtttgttgccggcttcattggcgaaatcaatatgtttaacgccactgtcatcgaacgtctagacgagcagcgcgtacgcgccaacgttgaaggccgcgaatgtaatatctacgttaacttcgccgttgaaccggggcaaaaactgcatgttctgctgcgcccggaagacttacgtgttgaagagattaacgacgacaaccacgctgaagggctgattggttacgttcgcgagcgtaactacaaaggcatgacgctggagtcggttgttgaactggaaaatggcaagatggtgatggtcagcgaattcttcaatgaagacgatcctgactttgaccactctctcgaccaaaaaatggccattaattgggtagaaagctgggaggtcgtactggctgatgaagaacacaaaatatgttggacttttatcagagctcctatgaattttcacgtttggtttcgatctcaaaaacctggtttcccaatggttcaacagagccggatagttcccgctttcgtcacacaacaaatggtgtttccagactggaaggtcagcttccttttcaccttcacgcaccctggtcatttcaaacttgttcgccggcctgaccagatccacatcctgcggttcggtactcatttcgacgatttgacgataggcctctttacgctcatctttcaacgacttgatttgcggtgtgtactcggccagccacgccttcgccagtctatcggcctcgccatcgaagtaatcctgcacctccatcaccagccccatgccagcaacggtaacacgagcctccatgattgcttccagatattcctctgcatcctcttctcgatccgcaaccttatcggccagatattcgacatagctgtccctcctgttcagctactgacggggtggtgcgtaacggcaaaagcactgccggacatcagcgctatctctgctctcactgccgtaaacatggcaactgcagttcactttacaccgcttctcaaccggaacacttggattcagtgtggttcactgggccggcccatgggtaccctcaaaaacccggcggtagaagaaaataaaaaggcacagcttgagcgtgataaacagcttagcgaacagcaaaaacaagcggcgttggcgaaagaatataaagctcaggtgaagcagcttattgaaatgaaccgaatcaccattgccaatggcgatattggttttaacttcactgacggcaatctgattaagaagatttttgtcgataagctcacacaggcgcagttgattaatggtcgtctggcgattgcccgcttgttggtcgataacaatagcgaaggtgaatacgccattattcccgccagcgttgccgataaaattgctcagcgcgatgccagcagtatagtgttgcacagcgcgctcagcgccgaagagcaggatgaagacgacccgtatgccgacttcaaagtgcctgatgatttgatgtggcctacggtttatgggcgaagtgtagaccggataaggcgttcacgccgcatccggcagtcgtgcgccatgcctgatgcgaagctttgcgcgtcttatcaggcctacggcttacgggcgaagttttattggcgtggtagcatatgttgccgagcagtgctcgagcgtaaccgcgaacagccgatgacccgcaccaaagaactggcggaagtcgtggctgctgcaacgccggtgaaagataagtttaaacatcccgcgacccgtaccttccaggcggtgcgcatttgggtaaacagtgaactggaggagatagagcaggcgctaaaaagctcgctcaacgtgctggccccgggtgggcggctttcgatcatcagcttccactcgctggaagaccgtattgtgaaacgttttatgcgtgaaaacagccgcggtccgcaagttccggcagggttaccgatgactgaagagcagctcaaaaaactgggtggccgtcagctgcgagcactaggcaagttaatgccgggcgaagaagaggtggctgagaaccctcgtgcccgtagttcagttctgcgtattgcagagaggacgaatgcatga

SEQ ID NO: 140263 - DNA, 1275 bp, Homo sapiens
atggaggcaggcaagttccaagatctgcagggtgagtctgcacgctacagacctaggagagccaaagatgcagttccaatcagaaggcaggaaaaaagccgatgtcctagttcaaagtgtaagccattacgcctggccagttatgtgatcggcattgtgatcatcggttcgggcttcgccgcccgccaactggtgaaaaatattcgcaaacaggacgccactattccattaaccctgattgccgccgacagcatggatgagtacaacaaacctgacctcagccatgttatcagtcaggggcaacgtgccgatgaccttacccgccagacggcgggtgaatttgccgagcagtttaatctgcacctgtttccacaaacctgcgtgacggatatcgatgccgaagcccgtgtggtgaaaagccagaataatcagtggcaattcgacaagctagtactggcaaccggtgccagtgcctttgtcccgcctgtgcctgggcgtgagttaatgctgacgttaaatagtcagcaagagtatcgcgcctgtgaaacgcaactgcgggatgcccgacgcgtgttgattgttggcggtggtttgattggtagcgaactggcgatggatttttgtcgtgcaggcaaagcggtcacgctaatcgacaacgctgccagtattctggcgtcgttaatgccacccgaagtaagcagccgcttgcagcatcggttgacggagatgggcgttcatctgctgttgaaatctcagttacaggggctggaaaaaacggattctggcattcaggcaacgctggaccgccagcgcaatatcgaagtggatgcggtaattgccgccaccggactgcgcccggaaaccgccctggcacgacgcgccgggctgacgattaatcgcggcgtttgcgtcgatagttatctgcaaaccagtaataccgatatttacgcgctgggcgattgcgcggaaattaacggtcaggtattgccgttcctccagccgattcaacttagcgcgatggtgctggcaaaaaatcttctcggcaataacacgccgctgaaactcccggcgatgctggtgaaaatcaaaacgccggaattaccgctgcatctggcaggcgaaacccagcgtcaggatttacgctggcaaattaataccgaacgccagggaatggtggcgcgcggcgttgacgatgctgaccagcttcgcgcctttgtggtcagtgaggatcggatgaaagaggcatttggattgttgaaaacattgccgatgtag

SEQ ID NO: 140264 - DNA, 2082 bp, Homo sapiens
atgaattcaaaaaagctttgttgcatatgtgtgttattctcgctgcttgcaggatgtgcctctgaatcttctattgatgaaaagaagaaaaaagctcaagtcacacaaagtaatattaataaaaacactccccagcaactgacagacaaagatttattcggtaatgaaaccactctggccgtatccgaagaggatattcaagctgcgcttgatggagatgagttccgcgttccccttaattctcctgtaatacttgttcaatccggcaaccgcgcaccggaaaccattatgcaggaggagatgcgaaaatattatactgtttccacattctctggtatcccggacaggcaaaaacctctgacttgttacaaaaaccaagataaaaatgagaaccaggatgttgccagtgctgagaatatgaactggattcccgcactgcgttttgtggcttccaaaagacatcataaaacgaatattgttttccccggatatgttgccgaccggaaaaatttgactcttggcccgaaatcaacagggctggaaaaaacggattctggcattcaggcaacgctggaccgccagcgcaatatcgaagtggatgcggtaattgccgccaccggactgcgcccggaaaccgccctggcacgacgcgccgggctgacgattaatcgcggcgtttgcgtcgatagttatctgcaaaccagtaataccgatatttacgcgctgggcgattgcgcggaaattaacggtcaggtattgccgttcctccagccgattcaacttagcgcgatggtgctggcaaaaaatcttctcggcaataacacgccgctgaaactcccggcgatgctggtgaaaatcaaaacgccggaattaccgctgcatctggcaggcgaaacccagcgtcaggatttacgctggcaaattaataccgaacgccagggaatggtggcgcgcggcgttgacgatgctgaccagcttcgcgcctttgtggtcagtgaggatcggatgaaagaagcatttggattgttgaaaacatttgccgatgtaagtgggctactgtgcctaaaatgtcggatgcgacgctggcgcgtcttatccgacctacaaagttatgaaaattcgatgaataggaaagtggcaagggccggcggaattaaacggctggcggaaccaaacttggatggccgaaggcggaatctggccgtaaacccggccggggtttacaggcaaaaggtggaatcaccgggcaggataccggccggatacatggacgactacgcccggacaacctgcaaaccggcgcaatggccggatggaacgcaaaggtgggatcggattcagggtggcgtccgccaaaaccaatgggcgaaaagtgaagccgaaaagcgcggaatcacgttgaaaattgccgatggtcagcaaaagcaggaaaaccagattaaagccggttgggaaccggtattaaaagaggcgaaagatgccgaaatcccggtattcttgctcgatcgttccattgatgtgaaagacaaatctctctatatgaccaccgtcactgccgacaacatcctcgaaggcaagttgattggtgactggctggtaaaagaagtgaatggcaaaccatgcaacgtggtggagctgcagggcaccgttggggccagcgtcgccattgaccgtaagaaaggctttgccgaagccattaagaatgcgccaaatatcaaaatcatccgctcgcagtcaggtgacttcacccgcagtaaaggcaaagaagtcatggagagctttatcaaagcggaaaacaacggcaaaaacatctgcatggtttacgcccataacgacgacatggtgattggtgcaattcaggcaattaaagaagcgggcctgaaaccgggcaaagatatcctcacgggttccattgacggtgtaccggacatctacaaagcgatgatggatggcgaagcgaacgccagtgttgaactgacgccgaatatggcaggtcccgccttcgacgcgctggagaaatacaaaaaagacggcaccatgcctgaaaagctgacgttaaccaaatcattcttaataagataa

SEQ ID NO: 140265 - DNA, 2658 bp, Homo sapiens
ttaaaataggggtttacaccggttaaaggtagttcccggataggtttcggcaatcgtggggtcgttaaagttggtgttgacgaagtattcaaaagtgtggcggcacctttctggttcaataatcgcttgccggatatgaataatttcggtagcgcgttcgctaaagtagtgaatatctagaatctcttttgtttcccgatggaataaaattttcagcgtgcccacgttcatgccgacgatttgtgcgcgtgtcagatgtttaaattgggcgtggcccacttcatatggcactttcattgcggtcagctgctgttcggttttgcccatagagttgatttccgggatggtgtaaataccggtagggatatcttcaatcagatgtgcgagtgttcgccttttaccagcgcggctgtacggatgcgcccactcggcgaccagttcgctctgaatgtgcggcgcgttcaccagcgggttatcttccagcggccagacaccggctttcacctggtcaatttctgcgcggatagccagcatcgcgtcgataaagcgatccagttccactttgctttcagattcagtcggttcaaccatcagcgtacccgccaccgggaacgacatcgtcggcgcgtggaaaccgtagtcgatcaggcgcttggcaatatccagctcgctgatgccggtttcttctttcagcgggcgaatatcgagaatacattcgtgcgccacgcgaccgtcgcgaccggtatacagcaccgggaaggcatcctgcaggcggctggcaatatagttggcgttgaggattgccacctggcttgcttttttcagcccttctgcgcccatcatgcggatgtacatccagctgattggcaggatagaggcgctaccgaacggtgccgcagaaaccgcgcccggaccaccaccgccgtgcggaatgcagatcaccagcatcgccgggagtttcagcggcgtgttattgccgagaagattttttgccagcaccatcgcgctaagttgaatcggctggaggaacggcaatacctgaccgttaatttccgcgcaatcgcccagcgcgtaaatatcggtattactggtttgcagataactatcgacgcaaacgccgcgattaatcgtcagcccggcgcgtcgtgccagggcggtttccgggcgcagtccggtggcggcaattaccgcatccacttcgatattgcgctggcggtccagcgttgcctgaatgccagaatccgttttttccagcccctgtaactgagatttcaacagcagatgaacgcccatctccgtcaaccgatgctgcaagcggctgcttacttccggtggcattaacgacgccagaatactggcagcgttgtcgattagcgtgaccgctttgcctgcacgacaaaaatccatcgccagttcgctaccaatcaaaccaccgccaacaatcaacacgcgtcgggcatcccgcagttgcgtttcacaggcgcgatactcttgctgactatttaacgtcagcattaactcacgcccaggcacaggcgggacaaaggcactggcaccggttgccagtactagcttgtcgtattgccactgattattctggcttttcaccacacgggcttcggcatcgatatccgtcacccaggtttgtggaaacaggtgcagattaaactgctcggcaaattcacccgccgtctggcgggtaaggtcatcggcacgttgcccctgactgataacatggctgcgctccctcgggatgctggcggtagacaaccaggcgcgcgtctgacacggaccaacggtagcaagtcttgctccaacatttggtcgcggtgcgatgaccaaccagtcgtgatggtgatgggcggtaacgctgctgaagcgcatcccgtcggtttccgctgggcgatggaagcgaaaaacaacaacgacgcaaccttgatcgttgtcgatccccgttttacgcgtaccgcttctgtggcggatatttacgcgcctattcgttccggtacggacattacgttcctgtctggcgttttgcgctacctgatcgaaaacaacaaaatcaacgccgaatacgttaagcattacaccaacgccagcctgctggtgcgtgatgattttgctttcgaagacggtctgttcagcggctacgacgctgaaaaacgtcaatacgataaatcgtcctggaactatcagctcgatgaaaacggctatgcgaaacgcgatgaaacactgactcatccgcgctgtgtgtggaacctgctgaaagagcacgtttcccgctacacgccggacgtcgttgaaaacatctgcgtacgccaaaagccgacttcgttggtaaacttgagtaatgcgttgttcgatgcccgtgtatgctcgtattacttgcatgtgctcgataaagtacagggcgcggcgcattttatggtgagtgatgacgaagcacggcagattatgcgtgagttgctgacactggtgtcgggatatctggtgccgaaactggcgcgagaaattggcggcgaacccagcaaaacgccgctggatctccacgtacgcccgcagtaagggctttgaaaattcttcgttgccaggcaccagcagtactgaaggtccaccctggaatgctccaggcttggtgggggaagggcaatccaccat

SEQ ID NO: 140266 - DNA, 1005 bp, Homo sapiens
atggggaatattccgcgagaaagctttaaggcgattatctcctcaggcggcaacgttgattcgctggtgaaatcgttcctcggcaccaaacagcacggcattatcgagttttgcctgctggtgttctctaacttagctgttgccagttcgttctttggtgtcacgctggggttgttcgattatctggcggacctgtttaagattgataactcccacggcgggcgtttcaaaaccgtgctgttaaccttcctgccacctgcgttgttgtatctgatcttcccgaacggctttatttacgggatcggcggtgccgggctgtgcgccaccatctgggcggtcattattcccgcagtgcttgcaatcaaagctcgcaagaagtttcccaatcagatgttcacggtctggggcggcaatcttattccggcgattgtcattctctcctggtaccgagctgattctggaagaccgtatgtgaaacgttttatgcgtgaaaacagccgcggtccgcaagttccggcagggttaccgatgactgaagagcagctcaaaaaactgggtggccgtcagctgcgagcactaggcaagttaatgccgggcgaagaagagttcagttctgcgtattgcagagaggacgaatgcatgatcagcagagtgacagaagctctaagcaaagttaaaggatcgatgggaagccacgagcgccatgcattgcctggtgttatcggtgacgatcttttgcgatttgggaagctgccactctgcctgttcatttgcattattttgacggcggtgactgtggtaaccacggcgcaccatacccgtttactgaccgctcagcgcgaacaactggtgctggagcgagatgctttagacattgaatggcgcaacctgatccttgaagagaatgcgctcggcgaccatagccgggtggaaaggatcgccacggaaaagctgcaaatgcagcatgttgatccgtcacaagaaaatatcgtagtgcaaaaataa

SEQ ID NO: 140267 - DNA, 1725 bp, Homo sapiens
atggggcggacaacacgcagggacgcggcgcaagcgcccggcactcgaagatctggtgactctagaggatacccgtatgttaccaggccagagggcacagatgccgacgacccgcagaaggacaaagcagcgctgggttctcatcgggtagcagggcagcccgagctcttcagcatcgacgagctcacacggagagatccgcacagtgcaagtggggcttggaccgcgagatacaccgtgagcaccatcgctgcattcgcgctagtaatagccaatcgtctctataccatcgaagaagaggccaccacgccgagcggatgtggacccgcgagttcctctactagctcacgtggtgtggatatgtgtcttcggaacttgtgtatgcatggttatgacgccactattccattaaccctgattgccgccgacagcatggatgagtacaacaaacctgacctcagccatgttatcagtcaggggcaacgtgccgatgaccttacccgccagacggcgggtgaatttgccgagcagtttaatctgcacctgtttccacaaacctgggtgacggatatcgatgccgaagcccgtgtggtgaaaagccagaataatcagtggcaatacgacaagctagtactggcaaccggtgccagtgcctttgtcccgcctgtgcctgggcgtgagttaatgctgacgttaaatagtcagcaagagtatcgcgcctgtgaaacgcaactgcgggatgcccgacgcgtgttgattgttggcggtggtttgattggtagcgaactggcgatggatttttgtcgtgcaggcaaagcggtcacgctaatcgacaacgctgccagtattctggcgtcgttaatgccaccggaagtaagcagccgcttgcagcatcggttgacggagatgggcgttcatctgctgttgaaatctcagttacaggggctggaaaaaacggattctggcattcaggcaacgctggaccgccagcgcaatatcgaagtggatgcggtaattgccgccaccggactgcgcccggaaaccgccctggcacgacgcgccgggctgacgattaatcgcggcgtttgcgtcgatagttatctgcaaaccagtaataccgatatttacgcgctgggcgattgcgcggaaattaacggtcagcgcgatggtgctggcaaaaaatcttctcggcaatacacgccgctgaactcccggcgatgcctggtgaaaatcaaacgccggaattaccgctgcatctggcaggcgaaaccagcgtcaggattacgctggcaaataatacgaagccaggaatggtggcgccgggcccttggtaacctgtgttctacttctgatgaatttgcctattctagcgcacaagcaacgcagaagagaaagaaaaaaaaacacaaaaagagagagggactgaacaaacacaaagaaaaaaagagaaaacagaaaggacagaaagatcagaaacacagggaaaagccacagcagccagacaaagaacaagagaacgggaaaaagagaaagaaagagcacaaagagaacaacgagcaaagcaggaaagtaaagagaaaaaaccaagaagagaccaagcgggcaacaaaaacaaagagaaataagaagcgaaacaaacaaaaacaagaagcaaaaacaaaaagaagcaacaataagacaatgcacattcatcgtagccccgtctgtggcctggacaggctctga

SEQ ID NO: 140268 - DNA, 3135 bp, Homo sapiens
atggactacatggtaccagtgggaatggactggctgtgcagagagactgcaggcatgcgagtgtccatcaagaaagggtctgttgtttttcctcttaaccctgaattggtcatgaaagtagttaggcaaagatccacaattgtaaccccttctggcttcaaagccggagcttttaactttgaacgcttcaaggaagcatcaaatcagacactggggagcacatttctatattctctaagctgtcctaagcctaatcttggatcccagcctctggactttgataccaaaaaatcctatacgctaaaggtagaggcagccaatgtccatattgacccacgcttcagtggcagggggccctttaaagacacggcgacagtcaaaatcgtggttgaagatgctgatgagcctccggtcttctcttcaccgacttacctacttgaagttcatgaaaatgctgctctaaactccgtgattgggcaagtgactgctcgtgaccctgatatcacttccagtcctataagactctacagaatccccggggacgatgccaaatgcgttcaattcaaccgtgaaggcgtgaaagcactgaaagccaaaccggttgaaaaagccgcgccagcacccgctgccgcagcaccaaaagcggctccaactccggcaaaaccaatgggggaacagctagcactctacaggatggccgggtccaatgccgatcgaattcaaggtcgtatggacccaacccgtgggcagtcagccgctgaatggctacaaaccgcagaagaagccgatatcgcctgggtattgaaaacctatggtgaagagcgttttgccaaacgcattgcccgcgccattgtcgagcgtaaccgcgaacagccgatgacccgcaccaaagaactggcggaagtcgtggctgctgcaacgccggtgaaagataagtttaaacatcccgcgacccgtaccttccaggcggtgcgcatttgggtaaacagtgaactggagaagatagagcaggcgctaaaaagctcgctcaacgtgctggccccgggtgggcggctttcgatcatcagcttccactcgctggaagaccgtattgtgaaacgttttatgcgtgaaaacagccgcggtccgcaagttccggcagggttaccgatgactgaagagcagctcaaaaaactgggtggccgtcagctgcgagcactaggcaagttaatgccgggcgaagaagagttcagttctgcgtattgcagagaggacgaatgcatgatcagcagagtgacagaagctctaagcaaagttaaaggatcgatgggaagccacgagcgccatgcattgcctggtgttatcggtgacgatcttttgcgatttgggaagctgccactctgcctgttcatttgcattattttgacggcggtgactgtggtaaccacggcgcaccatacccgtttactgaccgctcagcgcgaacaactggtgctggagcgagatgctttagacattgaatggcgcaacctgatccttgaagagaatgcgctcggcgaccatagccggaaaccaaaacgtcaggaagaacatgccaactttatcagttggcgttttgcgttgttatgcggctgtattctcctggcgctggcttttctgctcggacgcgtagcgtggttacaagttatctccccggatatgctggtgaaagagggcgacatgcgttctcttcgcgttcagcaagtttccacctcccgcggcatgattactgaccgttctggtcgcccgttagcggtgagcgtgccggtaaaagcgatttgggctgacccgaaagaagtgcatgacgctggcggtatcagcgtcggtgaccgctggaaggcgctggctcgagtactactggtccggctgacggcaacgctggaccgccagcgcaatatcgaagtggatgcggtaattgccgccaccggactgcgcccggaaaccgccctggcacgacgcgccgggctgacgattaatcgcggcgtttgcgtcgatagttatctgcaaaccagtaataccgatatttacgcgctgggcgattgcgcggaaattaacggtcaggtattgccgttcctccagccgattcaacttagcgcgatggtgctggcaaaaaatcttctcggcaataacacgccgctgaaactcccggcgatgctggtgaaaatcaaaacgccggaattaccgctgcatctggcaggcgaaacccagcgtcaggatttacgctggcaaattaataccgaacgccagggaatggtggcgcgcggcgttgacgatgctgaccagcttcgcgcctttgtggtcagtgaggatcggatgaaagaggcatttggattgttgaaaacattgccgattcgcgcgaccagactcgatacgctgttggatccagcgtttttcttcggtgctggtaatgtgcatatactcggcaccaatcgggccgcagtaggtttgcttgagggcttccagcagctcgccgagtttcatgcgattatggatggcaccactcctcgcgtgctggagaacgccgaaggcgatcgcaccacgccttctatcattgcctatacccaggatggtgaaactctagttggtcagccggctaaacgtcaggcagtgacgaacccgcaaaacactctgtttgcgattaaacgcctgattggtcgccgcttccaggacgaagaagtacagcgtgatgtttccatcatgccgttcaaaattattgctgctgataacggcgacgcatgggtcgaagttaaaggccagaaaatggcaccgccgcagatttctgctgaagtgctgaaaaaaatgaagaaaaccgctgaagattacctgggtgaaccggtagctgtccctaccctcagtactcttgcttggaatgctgtgagagaagggggtctcattcccactaagtgtgagtacacttatgtccttgattgcagctggcagccatcctatgagaatgagcagaatctgatttacgataaaacagacactttgaatggcagaataaaggaaggaaaccaaatatttaaagacaccatagagcccatagatcaactaattgtaaagcctgaccattccagttatgagtcagtaagtcccctctatgatgaaatcagttag

SEQ ID NO: 140269 - DNA, 671 bp, Homo sapiens
attctccagccgatcgccgccgtcgcgcacgtcgccaattccacggcatccagtacggtggtgatgccgctcgccaccatcagcgcgtctggctgctcatcgccgagtgggcaggccagtcaactttcgggcgcgggggaagaatttatccagattatcggtatgcagctcaatcagccccggcagcgccagccgccttcgccgtccatcgcctccggcaggcggctctggctttcgcaaaggcgcggatttcgccgttctgcacctccagcgaaccgcttaccactcgttttccagcaccagcttaacgttattgataatcatgaagaggctccattgggtgcaggcggtcggcgacgtcattacgtacagcttcgtcatggagatgcctacgatggctgcgccacgggttttggcttcgcgaatcagttcaccaccgcggcgctgtttttggcgtccagcgaggcggtgccacaggcgttcggcacgttcaggcgggtgagaagacgcgcggctttagcggcgcaggcttacgcggaacgccggtatcgagcagcggctgcatcaccacttccagtgctagatacgcgggatgacgcgcagaaactggctcacccagccgacggtggtttgcggatttccaccactttgcgcgctggcgcggtgaccag

SEQ ID NO: 140270 - DNA, 1005 bp, Homo sapiens
atggctgcacctgcggtggcccataaagccgacaatgcgtctatgatgatttgtactgcgctggtgctgtttatgactattccggggattgccctgttttacggtgggttgattcgcggcaaaaaactgctgtcaatgctgacgcagatctctggcccaacccactgggtgccctggatctcccccgagaccaccgcccggccccacctggctgtcatcgggctggatgcctacctgtggtaccgctcactctcatgcccacagcagggctggctgggacgggggttcaggggaggtgggctctggcagaggccaagctcgggcagggcaggccccatggggagcggggaggaatggtcacctctgctcaggtctcgccagcacgtttcccgggggacacagcagccagagagcccgaaggtggccggtgccgaggtggccgtcagctggccggaggtggaagaggtgagggcctgtctgagctgggccctggtactcctgcagctctgggcaaacctggacgtgctactggtggcctcttggcaggagctgagtcggcacgtgtgcgccgttaccaaggctctcgcccagtatcccctcaagtgcgtgatgccaaggctgaaggggggcaggatcacctcaaggcagtaccgggaatcccaggccttctccttctgcacagcagggcgctgggcagccggcgagccagtggcaagagacggcgcagggctgcaggcggcctggcggaggcagatcaggcagttcagtcgggtcagcccagccgtggctgatgcagttgtcacagccttcccctccccccgccttctgcagcaggcgctggaggcctgcagcacggagcgggagcgcatgggcctcctggccgaccttcctgtgccgcccagtgaaggcgggcgtccccgcagggtggggcctgacctctcccgccgcatctgcctcttcctgaccacagccaaccctgatctcgtgctggacgtgggctcctga

SEQ ID NO: 140271 - DNA, 1638 bp, Homo sapiens
atgattatcaataacgttaagctggtgctggaaaacgaggtggtaagcggttcgctggaggtgcagaacggcgaaatccgcgcctttgccgaaagccagagccgcctgccggaggcgatggacggcgaaggcggctggctgctgccggggctgattgagctgcataccgataatctggataaattcttcaccccgcgcccgaaagttgactggcctgcccactcggcgatgagcagccacgacgcgctgatggtggcgagcggcatcaccaccgtactggatgccgtggcaattggcgacgtgcgcgacggcggcgatcggctggagaatctggagaagatgatcaacgccatcgaagagacgcagaaacgcggcgtcaaccgcgccgagcaccgtctgcatctgcgctgcgaactgccgcatcacaccacgctgccgctgtttgaaaaactggtgcagcgcgagccggtgacgctggtgtcgctgatggaccactcgccgggccagcgccagttcgccaaccgcgagaagtatcgcgaatattatcagggcaaatactccctcactgatgcgcagatgcagcagtacgaagaagagcaactggcgctcgccgcacgctggtcgcagccgaatcgcgaatccatcgccgcctgtgccgcgcgcgaaaaattgcgcttgtctattgcatctttttggacggatcgtgaaacgctcgcagaacttctgccaatcaactaccgacgacacccggactgtatgcccctggacttgccaggttctccagcgtttagtgggccaaaatcgggtaaacgttctttccgagggcacctttggtttatgcccgatttccgaagcctggccgggatgccgtcggctcttatggaattctcgtccgaacgttcccaggcccggatactggtcacgcgaattgcggttcgtcgtagtccattctccgacgtcaatttgatcaatgggcgagagcacattgaaaccggcaaccgatttcatacctccgcgactccgtatgcctgccatgaagaaactttcggtctggataaactctacgaactgtgcgaaatcgcccgtgaagagctgaccaacggcggctacaatatcggtcgtgttatcgctcgtccgtttatcggcgacaaagccggtaacttccagcgtaccggtaaccgtcacgacctggctgttgagccgccagcaccgaccgtgctgcagaaactggttgatgaaaaacacggccaggtggtttctgtcggtaaaattgcggacatctacgccaactgcggtatcaccaaaaaagtgaaagcgactggcctggacgcgctgtttgacgccaccatcaaagagatgaaagaagcgggtgataacaccatcgtcttcaccaacttcgttgacttcgactcttcctggggccaccgtcgcgacgtcgccggttatgccgcgggtctggaactgttcgaccgccgtctgccggagctgatgtctctgctgcgcgatgacgacatcctgatcctcaccgctgaccacggttgcgatccgacctggaccggtactgaccacacgcgtgaacacattccggtatctggtatatggcccgaaagtaaaaccgggctcactgggtcatcgtga

SEQ ID NO: 140272 - DNA, 1533 bp, Homo sapiens
tcaacgaaaaaacaacgcggcgaaattcaccacccagacgggcatggtatagctcaggatcgccaccttccccgcacctccgttgaccaacgcccactgcgccagaccaaccatcccgcaggtttgtaacaggccaatggctaaggtgtatttaaacggtgtcgggcgcattccgcgaccacgtaataaaaggacgatgaataaaacgagagcgccgaaaatgcagcgtaaggcggtaaagtcgaaggcaccgatgtaactggtgacttgcttcatgaaaatccagctataactccagataagtgtgagcacaaccaggccactgattgccagtgggttgctctttcctgcggcagacatgagagatccagtgtgtagttttcgttcgcccactatacgctggtaaagaacgttcagcgactgccagcaagcagccgggtctacgtaatagatctccaatactaattgccgacgttcagcccgcgcgcttgcggcattaccaccaacttcttgaatttcgccgatccagttgacatgatgcagatgaaactgcaaatgcaggccgatcatgccgacaatttcgccatcaagcagcgccagatggtagcgcatgtttgggtcgcgcagattggcgttaaaacccacgcgaaacgcgtggtggtcaaactccgcttgttttagctcacaaatcagcgcgtaaaccgcgtcggtgtcgtactgcgtggccgggcgaagctcacaagcaggcatggtgtttctcctttggcgcaggctgccgtcattgttgagcgtatggcaatcctgtggagtatagcgggcggcgcgcgccaggcgggcgttaatttcactggcgttttcacggccacggttttccaggcgctggcggaggatctccggcgaaacctgtaaacagacgggcagcagcgccgattgatagcgcgcccgcgcctgcggcagatgggcgcgtgagccgttgaccagcacgtcgaatccggcgtgcagccagagatcaatctcgacgccgacgccataatacagaccgttagcgtgccagcttaaggccaacagattttggacttcagcacccggcttggtgccgtcaactttcgcgtatttggtattacccgcttctgcttctttggagtagtagccgatcagcggtgctgtcatctgatggtattcaaccagacgtttacgtacggtctcttcctgatcatctttacgggtagtcagttcttcaccggtaacgtcgtctttgccttctactttcggcggattgaatttaacgtgataaacacgaccagacggcgcatgaacgcggcgaccgacgatacggtcaacgatcagttcgtccggtacgtcgaattccagaacgtaatcaacattgatgcccgcttctttcatcgcgtctgcctgcggaatggtacgcgggaagccgtccaacaggaaaccattacggcagtcttcctgagcaatgcgctctttaaccagcgcgatcaccagttcgtcggtgaccagtttgccagcatccat

SEQ ID NO: 140273 - DNA, 2160 bp, Homo sapiens
ttatttccagatacgtaactcatcgtccgttgtaacttctttactggctttcattttcggcagtgaaaacgcataccagtcgatattacgggtcacaaacatcatgccggccagcgccaccaccagcacactggttcccaacaacagcgcgctatcggcagagttgagcagtccccacatcacaccatccagcaacaacagcgcgagggtaaacaacatgctgttgcaccaacctttcaataccgcttgcaaataaataccgttcattatcgccccaatcagactggcgattatccatgccacggtaaaaccggtatgttcagaaagcgccagcaagagcaaataaaacatcaccaatgaaagccccaccagcaaatattgcattgggtgtaaacgttgcgcggtgagcgtttcaaaaacaaagaacgccataaaagtcagtgcaatcagcagaatggcgtacttagtcgcccggtcagttaatttggtattgaatcggctggcgtcgttatatgtaatggcttcggcggataaatttcgaatatccgcagctgcccggtggtttctcataatgctgaagtcacgatagctggtttcagatgtgaccagatgacagcgctgcaggtacgtaccagccagcgtcatgcgtttgacccgcgcggtgtacatttgtgacggcacagtgcgaatgcgccaacgtttagcgcctgccttcgccttggaggcgcgaatcacatccagccagttttgtttggttggtaaaaagtaattcggcgcgtagtcatcctgacgacaggcgcacatataaaacgatgttgcacgcttgtcaaaaccaacccgcagcggcaggtatccatttgcaacggcatctggcttgcagtggcctccaccagcacagtcggagattcgataaggatttccctctttgcgcgcgtaaccgggctgattgcagataaacgccgagaggttctgcgccccggcagatgtgccgagataaagatcgaaaggattaaactgcgcgcgcataaactcatccagcacgccagccgtgaaaattccacgctgtccgccgccttcgcacaccagagctattcgtccaggctggaacggcccccactcccgcatccgctgatgcagcgtcagtgacggcttctcggaaaacagctgctggtaatccgtggcaaattgccccagatgccagaatccccactgcatggcggcgtcttttaccgtcatactttgcgaccacggacttatcagttcgcggcgtacggcgttcaggcgaatgcgtttcagccacgcgttcgggccaatgcctaaaatagcgtgaaacgcgttttgtagcgtgcggcggctgacatgcagttgattacacaaatccagcaccgtcaccggttcggacatgttttccagcacatattcacgggcgcgggaaagcaatcgacggtaactctgatgactgatgctttccgccgtcaccattggttgcgcttcttccagcatggcccccatcgccattagcaaattatcccccagcacttttcgcactgcaggctgatggagattttccggattctcgcaaaacgtcgccagcgcctgttggacaaagccccacagcgcggctttatgctgctctttcacttccagcgccgactggttacgcaacatatgtaatacccgatccgggttatgcaaaaagttagcctgccgggtgatgacatcttcagaaagcaccacgcccaggatcgtgtaatcatccggcgtgctcagttcaaattcagtgccaccagggcgggtggcgatttccgcgcttcccagacattgcgaaccgataaatccctgctcaccgcgcgtcgccggaatgccaaaccagaacgagttcggccagaccaggcacgactgacgcagcgccagaccggtgtattcacgaaaaacctgaatatcatcgagtagaatttccgtaaattcaccatgaaacttgcccggatgcagctgatcgtaaatctgctgccaggcggtaatcgttaaagcatgttcatagacatccgttgtctgtcgttgatgaacattatccacttcgaccttcggcgtgagcttcaggttttcgggtaagggttcatgataaagatggtgcaaattggctgtacgggtctttttcat

SEQ ID NO: 140274 - DNA, 1182 bp, Homo sapiens
atgcggcgtaaacgccttatccggcctacaaatgcgctccccgtacgtcggataagacgcgtcagcgtcgcatccgacacccgaaccacgaggcgaaaaatgattaacgtacaaaacgtcagtaaaaccttcatcctgcaccagcaaaacggcgtgcgcctgcccgtcctcaatcgcgcctcgctcaccgtcaacgcgggcgaatgcgtggtgctccacggccattccggcagcggcaaatcaactctgctacgctcgctgtacgccaactatctgcccgacgaaggtcaaatccagatcaaacacggtgacgagtgggtagacctggtcaccgcgccagcgcgcaaagtggtggaaatccgcaaaaccaccgtcggctgggtgagccagtttctgcgcgtcatcccgcgtatctcagcactggaagtggtgatgcagccgctgctcgataccggcgttccgcgtgaagcctgcgccgctaaagccgcgcgtcttctcacccgcctgaacgtgccggaacgcctgtggcacctggcaccatcgacattttccggtggcgaacagcagcgcgtcaacatcgcccgcggctttatcgtcgactaccccattctgctgcttgacgaacctaccgcctcgctggacgccaaaaacagcgccgcggtggtggaactgattcgcgaagccaaaacccgtggcgcagccatcgtaggcatcttccatgacgaagctctggtgctggaaaacgaggtggtaagcggttcgctggaggtgcagaacggcgaaatccgcgcctttgccgaaagccagagccgcctgccggaggcgatggacggcgaaggcggctggctgctgccggggctgattgagctgcataccgataatctggataaattcttcaccccgcgcccgaaagttgactggcctgcccactcggcgatgagcagccacgacgcgctgatggtggcgagcggcatcaccaccgtactggatgccgtggcaattggcgacgtgccgacagaacgagactgtgtctcaaaaaataaaaataaaaatgaagaaaagaacaaaaaaaagattgatgttatgagtcccttccattttccaaaccacctttccatcagtcccatcaaggggccatctattccagagtttatggctaattcatttgttaggtcgtgctag

SEQ ID NO: 140275 - DNA, 811 bp, Homo sapiens
ttacgcgttatagccattctcgcctgggctgttgacatccagccctttctcgctccttgctcgtcccggtacacccagaccacccgtcagatccgccaatttgtagccgataaatgccacaacaccggaccagacgatcgtaatggcgatgctgtccagctgtaccagcaactgatggcccatgcgtcacaccttcagcgaagcccacgccgcccagcgagctggcggcaaaaatcccggtcatgatacagccgactatgccacgaacgccgtgcacaccgaagacatcgcagggatcatccacccgcagcaagcgtttgagcatggtaacgccccacaagcccgccagaccagctaccacgccgataatcaacgcgccgccaaccccaatgtagccgcaggctggcgtcacgccgaccagaccggcaatcgcgccagaacacgcccccagcagtgaaggcttaccacgcagcgcccattcaccgaagatccagccaagaattgccgccgccgttgcgaccacagtattcacaaatgccagtgccgcgatttcattcgccgtgcccgctgacccggcgttaaagccaaaccaaccgatatagagaatggcagtcccggtgaagaccatcggcaggttgtgcggtttaaacgcctctttaccgaagcccacgcgttttccccttaagcgttgatcctcgcgacagcgaacaggccaacaggtgggcagtttcttccactgtttccgcaaatacttaaagcgctttcggagtttgttactctcgccgacgaaattgaacatgtgaatgctaat

SEQ ID NO: 140276 - DNA, 2311 bp, Homo sapiens
atgcttatggcaaactacggtttttgcaccattttcgctgccacgtcgggcaacaaaggaagaaaaatccatatgaaatggctatgttcagtaggaatcgcggtgagtctggccctgcagccagcactggcggatgatttattcggcaaccatccattaacgcccgaagcgcgggatgcgttcgtcaccgaactgcttaagaaaatgacagttgatgagaaaattggtcagctgcgcttaatcagcgtcggcccggataacccgaaagaggcgatccgcgagatgatcaaagacggatcaggtgatggaattaagccgcctgaaaattcctcgttttctttgcattacgaacgattgcctggcacaggtcagcgcacggtgttcccgattagcctcggtctggcctcgtcttttaacctcgatgcagtgaaaacggtcggacgtgtctctgcttatgaagcggcagatgatggcctgaatatgacctgggcaccgatggtcgatgtctcgcgcgatccgcgctggggacgtgcttccgaaggttttggcgaagatacgtatctcacctcaacaatgggtaaaaccatggtggaagcgatgcagggtaaaagcccggcagatcgctactcggtgatgaccagcgtcaaacactttgccgcatacggcgcggtagaaggcggtaaagagtacaacaccgtcgatatgagtccgcagcgcctgtttaatgattatatgccgccgtacaaagcggggctggacgcaggcagcggcgcggtgatggtggcgctgaactcgctgaacggcacgccagccacctccgattcctggctgctgaaagatgttctgcgcgaccagtggggctttaaaggcatcaccgtttccgatcacggtgcaatcaaagagctgattaaacatggcacggcggcagacccggaagatgcggtgcgcgtggcgctgaaatccggaatcaacatgagcatgagcgacgagtactactcgaagtatctgcctgggtggattaaatccggcaaagtgacgatggcagagctggacgatgctgcccggcatgtactgaaccaaaacggcgtgcgcctgcccgtcctcaatcgcgcctcgctcaccgtcaacgcgggcgaatgcgtggtgctccacggccattccggcagcggcaaatcaactctgctacgctcgctgtacgccaactatctgcccgacgaaggtcaaatccagatcaaacacggtgacgagtgggtagacctggtcaccgcgccagcgcgcaaagtggtggaaatccgcaaaaccaccgtcggctgggtgagccagtttctgcgcgtcatcccgcgtatctcagcactggaagtggtgatgcagccgctgctcgataccggcgttccgcgtgaagcctgcgccgctaaagccgcgcgtcttctcacccgcctgaacgtgccggaacgcctgtgggcacctggcaccatcgacattttccggtggcgaacagcagcgcgtcaacatcgcccgcggctttatcgtcgactaccccattctgctgcttgacgaacctaccgcctcgctggacgccaaaaacagcgccgcggtggtggaactgattcgcgaagccaaaacccgtggcgcagccatcgtaggcatcttccatgacgaagctctggtgctggaaaacgaggtggtaagcggttcgctggaggtgcagaacggcgaaatccgcgcctttgccgaaagccagagccgcctgccggaggcgatggacggcgaaggcggctggctgctgccggggctgattgagctgcataccgataatctggataaattcttcaccccgcgcccgaaagttgactggcctgcccactcggcgatgagcagccacgacgcgctgatggtggcgagcggcatcaccaccgtactggatgccgtggcaattggcgacgtgcgcgacggcggcgatcggctggagaatctggagaagatgatcaacgccatcgaagagacgcagaaacgcggcgtcaaccgcgccgagcaccgtctgcatctgcgctgcgaactgccgcatcacaccacgctgccgctgtttgaaaaactgccatgtgaccgtaacgatggtaagaaaagcggattacagcggatatcgttgttcatcaccccagagatggaaggctacccgacagatgaaaatcaagccgctgcctatatgaacaagattatcgagaaagagatcatgcgcgcaccggagcagtacctctggatccaccgtcgctttaaaacgcgcccggtgggagaatcgtcgttgtacatttaa

SEQ ID NO: 140277 - DNA, 2930 bp, Homo sapiens
cgcgggggcccaaaaaagccgccaaggctgttaaaaataatttgtcctgcccgggtctcgtttatgactattccggggattgccacatgttttacggtgggttgattcgcggcaaaaacgtgctgttcgatgtgtacgcagagatgtacggtgacatttgcactggtttgtattctctgggtggtttacggttactcgtctggcgtttggtgagggcaacaacttcttcggcaacattaactggttgatgctgaaaaacatcgaactgacggcggtgatgggcagcatttatcagtatatccacgtggcgtttcagggatcgtttgcctgcattaccgtcggcttgatagttggggcgctggcggaacgaatccgcttctcagctgtgttgattttcgtggtggtatggctgacgctctcttacattccgattgcgcatatggtgtggggcggtggtttgctggcttctcacggtgcgctggatttcgcgggtggcaccgtggtgcacattaacgccgcaatcgccggtctggtgggcgcgtatctgataggaaaacgcgtgggcttcggtaaagaggcgtttaaaccgcacaacctgccgatggtcttcaccgggactgccattctctatatcggttggtttggctttaacgccgggtcagcgggcacggcgaatgaaatcgcggcactggcatttgtgaatactgtggtcgcaacggcggcggcaattcttggctggatcttcggtgaatgggcgctgcgtggtaagccttcactgctgggggcgtgttctggcgcgattgccggtctggtcggcgtgacgccagcctgcggctacattggggttggcggcgcgttgattatcggcgtggtagctggtctggcgggcttgtggggcgttaccatgctcaacgcttgctgcgggtggatgatccctgcgatgtcttcgctggtgctggaaaacgaggtggtaagcggttcgctggaggtgcagaacggcgaaatccgcgcctttgccgaaagccagagccgcctgccggaggcgatggacggcgaaggcggctggctgctgccggggctgattgagctgcataccgataatctggataaattcttcaccccgcgcccgaaagttgactggcctgcccactcggcgatgagcagccacgacgcgctgatggtggcgagcggcatcaccaccgtactggatgccgtggcaattggcgacgtgcgcgacggcggcgatcggctggagaatctggagaagatgatcaacgccatcgaagagacgcagaaacgcggcgtcaaccgcgccgagcaccgtctgcatctgcgctgcgaactgccgcatcacaccacgctgccgctgtttgaaaaactggtgcagcgcgagccggtgacgctggtgtcgctgatggaccactcgccgggccagcgccagttcgccaaccgcgagaagtatcgcgaatattatcagggcaaatactccctcactgatgcgcagatgcagcagtacgaagaagagcaactggcgctcgccgcacgctggtcgcagccgaatcgcgaatccatcgccgccctgtgccgcgcgcgaaaaattgcgcttgccagccacgatgacgccacccacgcccacgttgctgaatctcaccagcttggcagcgtgatcgccgaatttcccaccacgttcgaagcggcggaagcctcgcgcaagcatggcatgaacgtgctgatgggcgcgccgaatattgtgcgcggcggctcgcactcccggcacgtggcggccagtgaactggcgcagcttggcctgctggatatcctctcttccgactactaccccgcccagcctgctcgatgcggcatttcgcgtcgccgatgaccagagcaaccgctttacgctgccgcaggcggtgaagctgggcaaacgcgccgacctggtgctggcgcatcgcaaggacaatcatattcatatcgaccacgtctggcgtcaggacagcctgctggcggaactccgcctgcgggaacaaactcagttactggtggcgcatcgctacatcacgcgcgatgccagcgccggaagtgaaaaccatatcgccctgagcgagcaggagttttttacccgcgcggggcaaaatctgttggccttaagctggcacgctaacggtctgtattatggcgtcggcgtcgagattgatctctggctgcacgccggattcgacgtgctggtcaacggctcacgcgcccatctgccgcaggttctgttgcgtgtttcttacgttgttttttttttaggtgattttctaccagccaaacgggaagttagcgagtcaggttttcaggcgcactgccaaagcagctggtttgctaataatctcggtgagcgttttgcttcaggcaatgataccgtctgggaaaacttcccggcgtttagcgtcgcagtaacgacgccagccgatccatacccattaactgaccgggcgactaagtacgccattctgctgattgcactgacttttatggcgttctttgtttttgaaacgctcaccgcgcaacgtttacacccaatgccatatttgctggtggggctttcattggtgatgttttatttgctcttgctggcgctttctgaacataccggttttaccgtggcatggataatcgccagtctgattggggcgataatgaacggtatttatttgcaagcggtattgaaaggttggtgcaacagcatgttgtttaccctcgcgctgttgttgctggatggtgtgatgtggggactgctcaactctgccgatagcgcgctgttgttgggaaccagtgtgctggtggtggcgctggccggcatgatgtttgtgacccgtaatatcgactggtatgcgttttcactgccgaaaatgaaagccagtaaagaagttacaacgggacgatga

SEQ ID NO: 140278 - DNA, 1066 bp, Homo sapiens
  misc_feature (1)...(1066): n = a,t,c or g
acgcccaccattcatcgtcaagtatgtattctcaaactctgccgactgtgtcgtaaaaatacacgacgttcgatcgatcgacgcacttctgcaagcgtacggtcgcggactgttacgtaagggcatcgccacggccaccgaaantgtgaaggaactggaaaatcatactggtgttcgcctgctggacagaaccacgcgtgaagtggtgcttacagatgcagggcagcagctggctttgcgtcttgagcgactgctggatgaactgaacagcacgttgcgcgataccgggcgtatggggcaacaactgagcggaaaagttcgggtcgctgccagccagaccatttccgcgcatcttattccgcaatgcatctcgagctgcactcgtgaagtccactctagaggatcccccgttcccgtttttaaatttttccgcgcaatatattctgcagccaaccaaaaatgtcatctgccatggggctttatgatgagcaaaataaaccaaacggatatcgatcggttgattgaactggtcggcgggcgcggcaatattgcgacggtgagccactgtattactcgcctacgctttgtcctcaaccaaccggccaatgccagaccgaaagaaattgagcaactccctatggtgaaaggctgtttcaccaatgccgggcaatttcaggtggtgattggcaccaacgtgggtgattactatcaagcactgattgcgtcaaccggacaggcgcatgttgataaagagcagctgcccgcgttgattagcggcggtttgatcctcggtttttggaatgtgatcggtgattggcccatgaccaacggtcatacgctggcgcaaatgtacccttccctggaaaagatatacgaatttcttgggaggatcaggaaaacgatcttcttatacctgccaggaggatttggatctgtacgattgcactggtatgaccgcacggtcggcacggatggcgaaggacagtcgcttacggtcagaccgccgtatgtacgtaagtatgcgagcgatgcgcaaaattatgatacgctctgtgcgtccttctag

SEQ ID NO: 140279 - DNA, 3546 bp, Homo sapiens
tcatgatcgtctcctccgtcgtgatggtcgtttttggtgttgcgacgaaccagcacggttaagcccggccagcacagcccagtggtagcaccatgcctttataccagggtgcgttgaatattttgcgaacgcggcaccggtagaaagatcgtccagtttcggcaggtcgagattttcataaggcacacccgtcagtaccagaacctgagtaccgccgccctctttctcgccgtacagatgcggataatatttcggcaccgtatgcaggtaagtgtcgccagatttcagcgtctgacgcggatagtggtattcgctgccaggcttcagcgccagacgttttttcgcctccgccatcagctctttctggttgcacagctcgcacttatgcagcgcaccaaacgggttgttgtagtcgtacttcggcacgttgtacggacaggcgaccatgcagtaacggcagccggtgcacacatctttgtcgtaatggacaatgccggttttcggatcttttttcagtgcagagaccgggcacacagagacacagttcggatcgacgcagtgcatacactgtttcttaatgtacgcgtagccgttctcctcctggtctttgttgacccctgtgccgctggtccacacctgaatgatgttattggtatacggcgacagtttgtcgttgttcgaccaggtctggtgtccttgcgggttacgttcagggaaattgatatcctgacacttggtgacgcaagcctggcagcctacgcacaaggtcgagtcgtacaacatccccagcgatcccggaattggcgggcggttttcagcagccgcatgaccgtccgattccagtttgatcatgcagttagcctgatcgatatccgggatacccgatttctgcatgataatggcgacgccgcgaccgatgtgccagtcaccattttgcggtttcggtgacgaccattggatcatctcgcgaccctgacgcaggatctcttccagtgcacagctggcggcggatggaacggaggtcggcgctttaccttcaccgattgcaccgagaattttcagctcttgcccttcgtgtacccggttacgttcgataatttccagttggtcgatctgtaactgttcagccagttccgctaatgccatggtgatagcgaagttaccattcggtgcgccataaccctgataagcaccatttgggcaaatgttgctgtagtaggtggtgacctggaaatcgacgttatcgcacggatataacggcagcgacagcgccgttccgttacacggtacggtgagtgagtggttgccgtaagggccagtgttggcgcggaaatccattttcactgccgtcaggcgaccattttttttcgctcccagtttgacggtgactttcgcgacgtgacgagaggtgttagcaataatcttttcttcacgggtgtagcggaacagtaccggacgcccggtcacgcaggttgcccaggcgcacacttcttccagcaggatgtcctgtttggaaccaaaaccgccgccaactcgctctttaatgacatgaactttatgctgtttcatgcccacgaggcgcgcgacctggcggcgtaagtgccatggtacctgggtggaggcgtggataaccagacgatcgccgtccatacgagtaaagcagatatgtgtttcagtcgggcactgctgcgcttgcgttgagttataggttcgctcaatgatcacatcggcatcggcaaagcctttgtccatatcgccaatatgaccatgaatactggcggcgatatttttgcgagggcgagaaccgatcgggaagttgatgatcagatcctcgccgcgctgggctgaatggaggggcacctctggatccgtatcgacctgagccagtcggcagtgagtcacagtgtgaaggaactggaaaatcatactggtgttcgcctgctggacagaaccacgcgtgaagtggtgcttacagatgcagggcagcagctggctttgcgtcttgagcgactgctggatgaactgaacagcacgttgcgcgataccgggcgtatggggcaacaactgagcggaaaagttcgggtcgctgccagccagaccatttccgcgcatcttattccgcaatgcattgctgaaagccatcgccgctatccagatattcagtttgtcctgcacgatcgtccgcagcagtgggtaatggaaagtattcgccagggagatgtcgattttggcatcgtcatcgatccaggcccagtgggcgatctgcaatgtgaagcgattctttccgagcctttctttctgctttgccatcgcgatagcgctttggccgtggaagattatgtacctggcgctaccattgcctgaaggtagcccactggtggtaaagcgcattacgccggttgttgaacgccagttgatgctggtgcgcaggaagaaccgttcactttccaccgccgctgaagctttatgggacgtggtacgagaccagggcaatgcgctaatggccgctgcataggtagcgtcacggtcaaactcgtactcgttccagttggtaagagtgaatttctcgctgcccagcataaagttgtaacctgcaacccagccggcgacatagccgttgtcgccagtgtaataggtttgatctgtataacgcttagcaaagtacggtttgaagccccaaccgctgccggtgaaaagccagctgcagcggaactctaatcctgggttgcgcgtttgataacgtaaggagaatctctgtctattcgccaaccgcgaaaaccagcattgaatcggtggtactgtagataaggtcgctatgaggaatgaacgtttcccaggtaatgttgtgggtcgcaatatgcacttcagtaattgcaggcgcggtaccgccatcgccacatacaggagtgacataacaaacatggcaatccctgccacagaaccgacgattttcagcgatttcataccgcgtgaagcaacccacataaagaagataaacagcaccagcgttaacccctgtaacgctacgactgaatattctttgattagcgaaccgtcgcctttcatcgcccaaccgagcgcaatcagaattgcctggggtttttgtgccagatagggaatatgcaccacccagtaggtccacgcggcgagataagccagtccgggtcccatcgtgtgtttaatccaggtactgaccccgcccttcccatctttgaaggtcgagcctaactgaccaacaattagcgcataaggtgtgaaatagagtgcaaagataaacacccatgaaaaaacaaccaccagcccctggttggcatagttattaacaacgttgccaaaaccccagacagtgataaaagacatcagcgcaatgttgtaccatcgcaactgtttttcctgaacattcccagccatagacaaatccttcgccaaaattaaaggggcatcggtaaaacgagggattatgcgcggcaaataagaagtgcggaaatgacctgcaaacattgcacataccacagttataaacgccgtcaatacactatttttcat

SEQ ID NO: 140280 - DNA, 1657 bp, Homo sapiens
gaggatacgaaaaagtttcataaagactccagatgatcgatggttctattgtgcttcttccagtttgagaaataaaattgatttattgcatccattcatgaagaaaacagatgaattattctttaaaacaattaaaggttttcgtcacagtagcgcaggagaaaagttttagtcgtgcaggagagcgtatcggcctgagccagtcggcagtgcagtcacagtgtgaaggaactggaaaatcatactggtgttcgcctgctggacagaaccacgcgtgcagtggtgcttacagatgcagggcagccgctggctttgcgtcttgagcgactgctggatgaactgaacagcacgttgcgcgacaccgggcgtatggggcaacaactgagcggaaaaagttcgggtcgctgccagccagaccatttccgcgcatcttattccgcaatgcattgctgaaagccatcgccgctatccagatattcagtttgtcctgcacgatcgtccgcagcagtgggtaatggaaagtattcgccagggagatgtcgattttggcatcgtcatcgatccaggcccagtgggcgatctgcaatgtgaagcgattctttccgagcctttctttctgctttgccatcgcgatagcgctttggccgtggaagattatgtaccctggcaggcattacagggagcgaaattggtgttgcaggattacgcgtcaggcagccgaccgctgattgacgcagcgctggcgcgcaatggtattcaggcgaatattgtgcaggagattggacatccggcgacgctgttcccgatggtagccgcaggcatcggcatcagtattcttcccgcactggcgctaccattgcctgaaggtagcccactggtggtaaagcgcattacgccggttgttgaacgccagttgatgctcataaacgttattcagacgctgcgctttgctttcatattccggttgtcgcgacggcaacatttcgctaaagtcacgccccttcttcaccggcatggggattatttcgtgtttattggttttgattacggtacagcaaactgttcagtggcggtcatgcgtgacggtaaaccgcatttgctaaaaatggaaaacgacagcacgctgctgccttcaatgctttgcgcgccaacgcgtgaagcgtgcggaagggttgacgtaatagaggtttcaaagtcaaaagtgcgaaaaaacacctatgccatgcgctatgttgccggacaacctgcggaaaggatcttaccgccggggtcttttgcgagcatcggccaggcattaccacctggggaaccgttaagtaccgaagagcgtattcggatcctggtgtggaacatatacaaacagcaacgcgctgaatggttgtcggtattaaagaactacggcaaagatgcacatctggtgttattgcaggaagcgcagacaacgccagagttagtacagtttgcgaccgctaactatcttgccgccgatcatgtacccgctttcgtgctgccacaacatacttctggcgtaatgaccctttcggcggcacatccagtgtattgctgcccgttacgtgaacgaaaacccattttgcgtctggcgaaatcggcactggtgacagtctatccaattttcccgtatttgtctaactcataa

SEQ ID NO: 140281 - DNA, 456 bp, Homo sapiens
tcaaatctgtcgtaactgcgcctcaacatacaaatagccaattcccagcacctgttgtgcgcggcttaattgcccaaagccaatttgcgtcgctttcacgctcggtccttcgtcgcggtcgaacgggttaaatcctgtctggcgaataatagtattaagccagttctcaccaaaggcacaactgcgaccgtacaaccaaatccgcgcctgtttttttaatgcgcttaacgaggcgacagtttccaggcagccataacgtccacagtcgcagacgacgccatccgtattaacgatggtgtgaccaatctgtccgctaccatacaaaccgagaattttgctggcttcgcgcgcgacattatccatctcgtccaacagttccagcagctccgggttcaaatcttcttctttagtaccgctacgtagctgttgttcgatcaggtggcagagattcttcat

SEQ ID NO: 140282 - DNA, 969 bp, Homo sapiens
ccttagtccccactgcaggcgaaccgacacggcacacacagaccacacgggctggaatagctcatgcagcaggcagattttgcggctgatattttgtttctgctctgtggaaaggatatttccaccgctggtggattcagctttgtctgactggctgataacaaacagcatcttatgccggtatgcttcgccaatcacctgacggtaaaaatgctcatcagtcgccagtgcccgatcatcagccttaatcagccacagaatcaggtcgagccggggaagttgttcgcggtacagcgcagataactcggtatcgcgaacgccactttcgcccacgccgggcagatccacgatggtcataaagtgttctccaatctgcaggcgaaagcgtaaaggatcacgtgtacaggccgctacatcgctgaccggcgatacttcaccggcaaacagggcattgcaaaggctactctttcccgccccagttttacccatgatgccgatcactggctcgtagtgggttaactgatttatctgatcatcgggagacaaaacagaggcttctaggtactcaggatgattacgtaaagtaaaagtcagtttgctcaggatatgtgtcggaacgtcctgctcatcaataattttggccgtatccagcatgatccggccatatttcatttccagcgtaacgaagcggttccactctggaccgttagcgcacaagaggtcaaaaaggatttcaccagtggtctcagacacggctcggtacgtggggatctctagagtcgtaatcacgcatggacactgccggaagaaagcagccgtcccataattaaacgtgcactggaaggcggcataaatttctttgataccgccaacagttattctgacggcagcagcgaagagatcgtcggtcgcgcactgcgggatttcgcccgtcgtgaagacgtggtcgttgcgaccaaagtgttccat

SEQ ID NO: 140283 - DNA, 933 bp, Homo sapiens
ttatttagagtctatgaataatttcttaagcatagcaggagtggagtagggatatgccagccaggccttgattttggcttccataccagcggcatcgaggccgagttcggcgcgcatttcttcctgagttccttgcggaataaagaagtccggcaggccaatgttcagcacgggtactggtttacgatgggccatcagcacttcgttcacgccgctgcctgcgccgcccataatggcgttttcttctacggtgaccagcgcttcatggctggcggccatttccagaattaacgcttcatcaagcggtttcacaaaacgcatatcgaccagcgtggcgttcagcgattcggcgactttcgccgcttcttccacgaattcgaggaatgcgccgccgccagtggagatgtaggagattttgtcagcaatgccgaacaggtcgattgctgccagagccccgcagccgccagcgctggagaacgtttcgctgtatgcgatagcgttagccacgatttcagtacctttgcgcactttttcgatttccacgccgcttccgttggagcccataaagaccacacgacgggaactacggtcaacaacggcaccgagatacagctctttagcgatatcggtcgctgcttcaaccagaatctggttaaccggttgcccattggcatctgtttgatacgttaccagacgcttgcccagccagttttctgcaaaagcacggatgtcttctttgctgtttacaactttcacaccgcccgctttaccgcggccaccagcgtgaacctgacatttcactacccacggaccggcaccgatttttgaagcggcttcttctgcttcgcgcggagtagtacaggcataacccaccggtgctggtaagccatagcgggcaaaaagttgttttgcctgatattcatgtaagttcat

SEQ ID NO: 140284 - DNA, 663 bp, Homo sapiens
atggcttaccagcaccggtgggttatgcctgtactactccgcgcgaacgagaagaagccgcttcaaaaatcggtgccgcgcgtgcaaattgcggcgggagagttgcgggtagttcggcatcacgagaatggtgtcggcccaggcgacgttctcgatccagataacttccgcgccccattctgcgaacatttgcccggcaaacggtccggcgatttcgataccggagaagacaacgcgcaatccggccaacggccgaatttcggcatggacgcatcaggtcgcatcaggcagcgcacggacttagcggtattgcttcagcaccgcacgacccagcgtcaggatctgcatttcgtcagatcccccggagacgcggtctacacgcagatcacgccagaagcggctgatgcggtggttgcccgcaatcccgacaccgcccagcacctgcattgcgctatccacaacttcaaatgccgcattgggcagaagtatttgcacatcgctgcatcgccagaggccagcggtgtcgacgatcgcttttacgttatccagcgactgacgtgcctgtgcagcgacgtctgccggtacttcgcccgttttcggatttaccgggatctgaccggaggtgatgatcatattgcccagatcaacgccctgtaccggtaa

SEQ ID NO: 140285 - DNA, 1528 bp, Homo sapiens
aatgcagactgcgctacggaccacggtatctccacgagcctggataatgcaggagcacgtcgagccgcgaactgcatattcaatcgtgacgttagcatctacttcattagagcatctcccaaggcttacactactagtatgcatttccgtgcatccgatatgtttgtgctgggaatttcgctgacacaggatcaacacatctacactacaatggaccacagcttaatgcaaccattgatgtatcgaatctcgagtctcggctacccaccgtatacttactacgaagtttattactctatgtcgggtgcggagaaagaggtaatgaaatgtgccccgcttacgcagggcatccatttattactcaaccgtaaccgattttgccaggttacgcggctgcaggcatgcaagctttggcgctctatgtcgggtgcggagaaagaggtaatgaaatgtgccccgcttacgcagggcatccatttattactcaaccgtaaccgattttgccaggttacgcggctgcaggcatgcaagctttggcgccagatcctgactgaagagcagtatctgacgcgctggaagagttcggcagacgcgatgaaagaagcgggcatcaatgttgattacgttctggaattcgacgtaccggacgaactgatcggatggagcacgaacgctatgtcgggagctcttatgtccgaagatatctttgacgccatcatcgtcggtgcagggcttgccggttcggttgccgcactggtgctcgcccgcgaaggtgcgcaagtgttagttatcgagcgtggcaattccgcaggtgccaagaacgtcaccggcgggcgtctctatgcccacagtctggaacacattattcctggtttcgccgactccgcccccgtagaacgcctgatcacccatgaaaaactcgcgtttatgacggaaaagtcagcgatgactatggactactgcaatggtgacgaaacctcgccatcccagcgttcttactccgttttgcgcagtaaatttgatgcctggctgatggagcaggccgaagaagcgggcgcgcagttaattaccgggatccgcgtcgataacctcgtacagcgcgatggcaaagtcgtcggtgtagaagccgatggcgatgtgattgaagcgaaaacggtgatccttgctgatggggtgaactccatccttgccgaaaaattggggatggcaaaacgcgtcaaaccgacggatgtggcggttggcgtgaaggaactgatcgagttaccgaagtcggttattgaagaccgttttcagttgcagggtaatcagggggcggcttgcctgtttgcgggatcacccaccgatggcctgatgggcggcggcttcctttataccaatgaaaacaccctgtcgctggggctggtttgtggtttgcatcatctgcatgacgcgaaaaaatcggtgccgcaaatgctggaagatttcaaacagcatccggccgtttgcaccgctgatcgcgggcggcaagctggtggaatattccgctcac

SEQ ID NO: 140286 - DNA, 1755 bp, Homo sapiens
atggtcatagcaattctggcatcttctactgtatggtctgctgataatgctccggtaacggcacaagagcttactcaacaagttcagcaaaccctgaactcggctgcggcattgagcgtcatctctgaacaaggtttatatgctatgcgtgtacgtgcagagagacatcatgtttttacagaaattcaaggcgctacatgtgattttcccggcagctgcgcggtgctggcggcaacccaggtggaagagattgaagaagtgcactggacagagctcgcaatgccggcgtcactgtgggtctgccgggtcacagagttcggcccgctgattgtctctattgatacccacggcaacaacctgatagccgacaacaaaaagctgttcgccgaacgccgcgatccctcggcgaatctttcatgcctgcaggccgcgcagttcgtcgcgtttgcccgcaacggctgcttcgccgtctcatactccagcaccgcgaagcccttcagctgcccatcctggccgcacgccagctgccggaggaagaccgagatggtgatctcccgcgttctgcatctggcgcgccgcattattacgccgctggtttctggcgttgtggtgatgattatcggcctgtcgctaattcaggttgggttaacgtccattggcggcggttacgcagccatgagcgataacaccttcggcgcaccgaaaaatctgctgctggcaggcgtggtcttagctgcaggtcgaaaagtagcggcggtttgccgagctattcacaaatctttggcgactggttcgaaagacaacaagctgatggcgattactccggcgatgcgtgaaggttccggcatggtcgagttttcacgtaaattcccggatcgctacttcgacgtggcaattgccgagcaacacgcggtgacctttgatgcgggtctggcgattggtgggtacaaacccattgtcgcgatttactccactttcctgcaacgcgcctatgatcaggtgctgcatgacgtggcgattcaaaagcttccggtcctgttcgccatcgaccgcgcgggcattgttggtgctgacggtcaaacccatcagggtgcttttgatctctcttacctgcgctgcataccggaaatggtcattatgaccccgagcgatgaaaacgaatgtcgccagatgctctataccggctatcactataacgatggcccgtcagcggtgcgctacccgcgtggcaacgcgggcggcgtggaactgacgccgctggaaaaactaccaattggcaaaggcattgtgaagcgtcgtggcgagaaactggcgatccttaactttggtacgctgatgccagaagcggcgaaagtcgccgaatcgctgaacgccacgctggtggaagatgcgttttgtgaaacccttcccgaccgatatgcaggcccagttcacgctgttgaacctgaagggaccgggtttatcaccgaaacggtctttgaaaaccgctttatgcatgtgccagagctgagccgtatgggcgcgcacgccgaaatcgaaagcaataccgttatttgtcacggtgttgaaaaactttctggcgcacaggttatggcaaccgatctgcgtgcatcagcaagcctggtgctggctggctgtattgcggaagggacgacggtggttgatcgtatttatcacatcgatcgtggctacgaacgcattgaagacaaactgcgcgctttaggtgcaaatattgagcgtgtgaaaggcgaataa

SEQ ID NO: 140287 - DNA, 2481 bp, Homo sapiens
gaacctgtttattcgtcgtatgaaccagctgctggtttcctgatgtaatgccggatgaccttcgtgtcatccggcatttttcttttcatcatctgcactttccgcaaattatctcgccattaaccgtttcagccccaggtgcctttcttgaggcaatcgcctgttggtggtatcgtttatcgctttttcaaaaaattcgacacattttaaggggattttcgcaatgcgtatcattctgcttggcgctccgggcgcggggaaagggactcaggctcagttcatcatggagaaatatggtattccgcaaatctccactggcgatatgctgcgtgctgcggtcaaatctggctccgagctgggtaaacaagcaaaagacattatggatgctggcaaactggctcaccgacgaactggtgatcgcgctggttaaagagcgcattgctcaggaagactgccgcaatggtttcctgttggacggcttcccgcgtaccattccgcaagcagacgcgatgaaagaagcgggcatcaatggtcattacgttctggaattcgacgtaccggacgaactgatcgttgaccgtatcgtcggtcgccgcgttcatgcgccgtctggtcgtgtttatcacgttaaattcaatccgccgaaagtagaaggcaaagacgacgttaccggtgaagaactgactacccgtaaagatgatcaggaagagaccgtacgtaaacgtctggttgaataccatcagatgacagcaccgctgatcggctactactccaaagaagcagaagcgggtaataccaaatacgcgaaagttgacggcaccaagccgcaaatttatcgcggcagtttgtatgttagcgaccagattggtcacaccatcgtcaatccggatggcgtcgtctgcgactgtggacgttatggctgcctggaaactgtcgcctcgttaagcgcattaaaaaaacaggcgcgggtatggctaaaatcacaaccggttagtactcaacttgatcctgaaaaactgactacagcgcagttaatcgctgcctggcaaagtggagaaccgtggatcaccagctgggttgatcgctctgccaatgccattggtttgagtctgtataacttcctcaacatcctcaatattaatcagatttggttgtacggtcgcagttgtgcctttggtgagaactggcttaatactattattcgccagacaggatttaacccgttcgaccgcgacgaaggaccgagcgtgaaagcgacgcaaattggctttgggcaattaagccgcgcacaacagggcgttgatctgggcaatatgatcatcacctccggtcagatcccggtaaatccgaaaacgggcgaagtaccggcagacgtcgctgcacaggcacgtcagtcgctggataacgtaaaagcgatcgtcgaagccgctggcctgaaagtgggcgacatcgttaaaactaccgtgtttgtaaaagatctgaacgacttcgcacccgtaaacgccacttacgaagccttcttcaccgaacacaacgccaccttcccggcacgttcttgcgttgaagttgcccgtctgccgaaagacgtgaagattgagatcgaagcgatcgctatgctctataccggctatcactataacgatgccccgtcagcggtgcgctacccgcgtggcaacgcgtcgggcgtggaactgacgccgctggaaaaactaccaattggcaaaggcattgtgaagcgtcgtggcgagaaactggcgatccttaactttggtacgctgatgccagaagcggcgaaagtcgccgaatcgctgaacgccacgctggtcgatatgcgttttgtgaaaccgcttgatgaagcgttaattctggaaatggccgccagccatgaagcgctggtcaccgtagaagaaaacgccattatgggcggcgcaggcagcggcgtgaacgaagtgctgatggcccatcgtaaaccagtacccgtgctgaacattggcctgccggacttctttattccgcaaggaactcaggaagaaatgcgcgccgaactcggcctcgatgccgctggtatggaagccaaaatcaaggcctggctggcataatccctactccactcctgctatgcttaagaaattattcatagactctaaataattcgagttgcaggaaggcggcaaacgagtgaagccccaggagcttacataagtaagtgactggggtgaacgaatgcagccgcagcacatgcaacttgaagtatgacgagtatagcaggagtggcagcatgcaatacaaccccttaggaaaaaccgaccttcgcgtttcccgactttgcctcggctgtatgacctttggcgagccagatcgcggtaatcacgcatggacactgccggaagaaagcagccgtcccataattaaacgtgcactggaaggcggcataaatttctttgataccgccaacagttattctgacggcagcagcgaaga

SEQ ID NO: 140288 - DNA, 1020 bp, Homo sapiens
atggccttcacgttcaatatcatcctgccagtcccagttactccagcgatccagcccaatgcgcgtatacggcgtcaccgagtggttgccgagcgtcagcggcaaataggcgcgaatttcttgcgtggaaaactcaccgttattgcggctgtcgtccatattgaagccgcgctcgagataatagttcactcgcaaggcaagcgccattcccgtacacatcaccagtgcggtacaggcgatccgacggttgcccgaagtttactgcgttatcgctggcacaacttgccaggcgcgcaggagaaagcgcgacgcaacggctggcagggcgcgctatttccgtgggaaagcgcgcgcagcggcgaagaagagacgccggaatttgccgccattaacattcgcaccgggctgcggcaaaaagtggcctcggcgcaggcggaacatcatctggtggccgatatcgcctgggcggttattcaatactggcagaccacgggggatgaaagtttcattgcgcatgaaggcatggcgctacttctggagacggcaaagttctggattagccgcgcggtgagagttaacgatcgtctggaaattcatgatgttattgggccagacgaatataccgaacatgtcaataataatgcatacaccagctatatggcccgctacaacgttcaacaggcgctgaatattgcccgccagttcggctgtagcgacgatgcgtttatccatcgcgccgaaatgttcctcaaagagctatggatgccagaaattcagcccgacggcgttttgccgcaggatgattcgtttatggctaagccggcgattaatctggcgaaatacaaagcggcggcggggaagcaaaccatactgctggattattcacgcgcagaagtgaacgagatgcagatcctcaaacaagctgatgtggtgatgctccattacatgctggcggaccgaagaagaaaagggttactggtttcatgcttatcaacccgaagatctttgtaccatccataa

SEQ ID NO: 140289 - DNA, 1699 bp, Homo sapiens
tcatataatactgaatacgcggtagtctgccgtgcctattatcttccgactggcctgacggtacttgtgtagtggtaatgtgtacgatctacctatggcaacgcacgcatacctgcaggtcgaatctcgagtatccactggtgacgagctggacgtcgcagggcagtaggaaagagaagcggcttccgtaatgtacgccagctcgtttttatccccaggcgcgtttttcgccgaaggccagccagtagtttttatcattacgcgccatcagaatcggaaaggccgcgttggagatattcaccaccgcctgaccgcgcgcattacccgtgctgccatagaagttggtggagtcatggaatacatggaacttgctgacagatttgtagttcgtatccacgccccacagcttgttgataacgccctgaatctggccgtcattaacattgcgcgtcgtcagcgagaaccagcgagcctcgttacaaccatcggttttcgcacaaatcgcggtatcgatctctttggcctgacccgtattaaactgctcaataaattcgttaggcagattaacgacttgctcaccttcccccagcgtcgcaccgttggataacgagagattgataatctcgttgatcacgttgggatattcggcaaagaccttgcgtacatcgtccggaacaacacgggtattattttgcccggtcgtcgaatagcgatgaataagctgatcaatattcgccccgcgaacttcatcacccagttcagtcagcgcaatggtcgacttattgccgcgcactgaacccagtgactctagagatccccggtaccggccaggtccgggcctggggctgctgctggcgtttaccttgtttggtaaagggatgagtaaacgttctggcccggggcgatgattattcacttcctcggtgggatccacgaactgtatttcccgtatgtgctgatgaagccgctgaccattattgccgacgatgcgggcggtatgtctggcactggacggtggtctgggacctgcaggcacgataaatgcgcgaaagaggcggatacggcagcgttttcccggctggcacagggggcgatgcaggcgctggtgaaagcgatgcccgcctggctgacccacggctttgaagtggctggcggtattctgcctgccgttggttttggcttgctcgtgcgcgtaatgttcaaagcgcaatatatcccttacctgatcgccggtttcctgtttgtttgctacatccaggtcagcaacctgttgccggttgccgtactgggcgcaggctttgcggtgtatgagtttttcaatgcgaaatcccggcagcaagcgcaaccgcagcccgttgccagtaaaaatgaagaagaggactacagcaatgggatctgggcgatgttgccgatccttgagggcaaaaccgctctcctggcccggataaagaaaatcatcgtcgctataaactttaagcagcacagactggattcgcccggccttcaccgccgccgcagaaacttcccgcgctttgtcgagagtaaacacggtgatgacgtcggtgccctgttcaacggcgtcagcaaccagcgcgcgcatgactcgcgcctctttgtaatccaccgccacaatgccgctgtagcctaatgccagcaatttttccgccagccacggattacgaccaaactgcttggtcat

SEQ ID NO: 140290 - DNA, 1865 bp, Homo sapiens
atgggacgcttgaacacgctggcgggagtgcgcggcaataagtcgaccattgcgctgactgaactgggtgatgaagttcgcggggcgaatattgatcagcttattcatcgctattcgacgaccgggcaaaataatacccgtgttgttccggacgactgtacgcaaggtctttgccgaatatcccaacgtgatcaacgagattatcaatctctcgttatccaggtagagtatgatgttactgcgaaaaggcccacatgtctaagtcatcgaaacccactaacaattcgcgaggagcaattttgctcagctaatagagtagacacgtggttaaaagctaatggaactaagcggcgtacttacctccaatggaaagcctcaaagttccgacggatccaatacggcgttatgacgggaatagtaagattactggggcccacgggaaaagaaaaagctggcttcacttctatcccctaccaagaatgttaccaaacgaaattgcgcccatacgatcggaaggaagcgccattaacggggcaacaaacgtctagacttaatgttcaaacaaagccatgcatctatgtatataaagcaaccggaacagttggactaccaattgaacttgaaagaggtgataacagcggtgtttatcagtatggtcgtgctgaacatttcacccacattatatctgacaaaccttccccaaaagataaatatgttgcatatgctattaacattcctgactatgagctggcagccgatgtatataatattaacgtgacgtcaccttccggacagcaagaaacatttaaaatattaatcaatctagaacatctacggcaaacacttgaacgtaaatctcttactgctgttcagaaatcacaatgtgaaatcatcacccccaaaaaacctggcgaagcgattcttcatgcttttaatgccacctaccagcagatcagagaaaatatgtctgaatttgcacgttgccattatgggtatatacaaatccctccagtgacaactttccgcgccgacggaccagaaactcccgaagaagaaaagggttactggtttcatgcttatcaacccgaagatctttgtaccatccataatccaatgggagatttgcaggattttattgcattggttaaagatgctaaaaaatttggtagtcgatatcattcctgattatacctttaactttatgggaattgggggtagtggtaaaaatgacctggattatccctctgctgatatacgagcgaagatcagtaaagatatagaagatccagtaacaaaagaacgtaaacaaatccatccagaagatatacatctcactgcaaaagacttcgaagcaagtaaagataacatctctaaggatgaatgggaaaacctccatgcattaaaagaaaagcgtttaaatggaatgcctaaaacaacacccaaaagtgaccaggttattatgttgcaaaatcaatacgttcgtgaaatgcgaaaatatggcgtacgaggtttacgttatgatgcggcaaaacactcaaaacatgaacaaatagaaagatcaataaccccaccgcttaaaaattataatgagcgggtacacaatactaacttatttaacccaaaatatcataaaaaagccgttatgaattacatggaatatctggtaacttgtcagttggatgaacaacaaatgtcatcactgctttatgaaagagatgatttaagcgccattgatttttcattgctcatgaaaacgataaaagccttttcatttggtggagatcttcaaacccttgcatcaaaaccgggttccacaatctcaagtatcccatcagaaagacggatattgattaacattaaccacg

SEQ ID NO: 140291 - DNA, 2034 bp, Homo sapiens
atggagctactagctcatagtattgtcatagcaacatggcgattacgccagaatcgcagcggtgctgagcattttggcctccagcggttaatgctacatgccagtcagttgtcattgacgcatccttttactggcgagccgctgactattcacgcgggcctggacgacacctggatgcaggcgttatcacaatttggctggcgcggtctgcttcctgaaaatgaaagggttgagttcagtgcgccatcgggtcaggatggagatccaaccttaggtctcatcaaggaagtggcatgtgagctgagtgggatgatgagaaggagccagccatgggaagaggccgaggaaagcattccagacagaggggagagcctgctggaagtgtctgggacaccgaacgcaggctggggtgctgagggccttgcagaacgggaagcgctgctcttatgctgctgttgcgggcccatggggccagaccccctcgggctgggctcccccgggtctgtccggggccgtagccgtttgattcaccacgctattagcggcgaggcgttatgggaagtgaccagtgaaggtcttgatatggcggctgcccgccagtttgccattgaaaaaggtgcccccgcccttcgcgctatgacctttatcgaacgtgcggcgatgcttaaagcggtcgctaaacatctgctgagtgaaaaagagcgtttctatgctctttctgcgcaaacaggcgcaacgcgggcagacagttgggttgatattgaaggtggcattgggacgttatttacttacgccagcctcggtagccgggagctgcctgacgatacgctgtggccggaagatgaattgatccccttatcgaaagaaggtggatttgccgcgcgccatttactgacctcaaagtcaggcgtggcagtgcatattaacgcctttaacttcccctgctggggaatgctggaaaagctggcaccaacgtggtctgggcggaatgccagccatcatcaaaccagctaccgcgacggcccactgactcaggcgatggaatttgaagataaggcgcaacagcgagatgtggaaacggcgaggcacttcacattttttcggattattgcaaatgaggataaaaaaaccgggtttccccggtttcagacaatagtgattacggcttcgcacaaaaccatcgatcgtacacgttatacgtacggagcgtggcgctgttatcggccacttctcactgttgaggagtatcgtgcgacgggaagtctgatcacccaaccgaagttccctcctcataaatcttctgaagttcatcgagtgccgcggaatcagggacgctttgtggcggtcaattccacgttgccgactgaacccgcaacggttgcgcctgttcgcaatggcaatgcatcgcgtgacacggcgaaaacgcaaaccgctgaacgtccgtccactacgcgcccagctcgtcagcaggcggtgattgaaccgaaaaaaccgcaagcaaccgtgaaaacggagccgaagccggtagcacagacgccgaagcgtactgaaccagctgcccctgtggcgagcacgaaggcaccggctgcgacttctacgccagcaccaaaagagacggcgactacggctccagtacagacggcatccccggcgcaaaccacagcaacacccgctgctggggcgaagaccgcaggtaatgttggttcgttgaaatcggcaccgtccagccattacactctgcagctgagcagttcctctaactacgacaacctgaacggttgggcgaagaaagagaatctgaaaaactacgttgtctatgaaacgacgcgtaatggtcagccgtggtatgtcctggtttctggcgtgtacgcttcgaaagaagaggcgaaaaaagcggtatctacattgccagcagatgtccaggccaaaaacccgtgggcgaaaccgctgcgtcagcggcaccgggatcttcggggcgatgaacgaagggatgaccggcgatccgagtattttaatcgccaagtcatttcttga

SEQ ID NO: 140292 - DNA, 1692 bp, Homo sapiens
atgaacaaagaaattttggctgtagttgaagccgtatccaatgaaaaggcgctacctcgcgagaagattttcgaagcattggaaagcgcgctggcgacagcaacaaagaacaaatatgaacaagagatcgacgtccgcggcggtttgctgactgatgcggtcatcaagcatccacatgcggtgctgctgctggacgaaatcgagaaagcgcacccggacgtgttcaatattctgttgcaggtgatggataacggtacgctgaccgataacaacggacgcaaagcagacttccgtaacgtggtgctggtgatgaccaccaacgccggggtacgggaaactgagcgcaaatccattggtcttatccaccaggataacagcaccgatgcgatggaagagatcaagaagatctttacaccggaattccgtaaccgtctcgacaacattatctggtttgatcatctgtcaaccgacgtgatccatcaggtggtggataaattcatcgtcgagttgcaggttcagctggatcagaaaggtgtttctctggaagtgagccaggaagcgcgtaactggctggccgagaaaggttacgaccgggcaatgggcgctcgtccgatggcgcgtgtcatccaggacaacctgaaaaaaccgctcgccaacgaactgctgtttggttcgctggtggacggcggtcagtactttcttgcgggattgcgagaaaggcatcagtttgacatgaagctaaacgaaccggaagatcatattggttcactgctgtatgatggctgcgtggttggcggagaatggtcgccagacagaatgcgaagaattgctggcatggcacctttttccgtgtcgcccgtgtttcattgcccatttctgctcatgcatcatctacacatctatccggatctgcgcactatgttccaccgtctgcttatcgcaacagtcgtcggtattctcgcggcctttgccgttgccgggtttcgtcatgcgatgctgctactggagtggttgttcctcaataatgactccggcagtctggtcaatgcagcgacaaacctttccccctggcgacggttgctaactccggcgctcggcggactggcggcgggtttgttgctgatgggctggcagaaatttacccaacaacgccctcatgcgccgaccgattatatggaagcgttgcaaaccgatggacagttcgattacgcagcaagcctggttaaatcgcttgcctctctgctggtagtaaccagcggcagtgcaattggtcgcgaaggtgcgatgattcttttagctgcccttgccgcctcctgttttgcccaacgttttacgccacgccaggagtggacattatggatcgcctgtggggccgcggcgggaatggctgcggcctatcgtgccccgcttgctggcagtttatttatagccgaagtgctgtttggcactatgatgttggcctctctcggcccggtgattatttccgccgtcgtggcattgctggttagcaatctgattaatcatagcgacgcgttatctacaacgtacactctcagtgacggtcaggtcgtgatatgcctgatagccgaatttggctacctaacaatgctcccaatcggggagctacgtaagaacggttacactctcccatcaatcgtaatgggtctgaggagtaatcattttcgtttataa

SEQ ID NO: 140293 - DNA, 3090 bp, Homo sapiens
atgagttccgatctgatcatcgccgccagtacctcaaccttctcaatgacgcctgtaaacctcggcgtcccgtataacctggtcggcattcacaacctgacccgcgacgcgggcttccacattgtcaaagagctgatttttacccgcgcgctggctgtcggcatcctcaaccatgttgtggaagtggaagaactggaagatttcaccttacaaatggcgcaccacatctctgagaaagcgccgttagccattgccgttatcaaagaagagctgcgtgtactgggcgaagcacacaccatgaactccgatgaatttgaacgtattcaggggatgcgccgcgcggtgtatgacagcgaagattaccaggaagggatgaacgctttcctcgaaaaacgagtaaaaatggaaactcagtggacaaggatgaccgccaatgaagcggcagaaattatccagcataacgacatggtggcatttattagctcggcgtccacagtgcgtcagagttcaaccttcgctgattgggtactgatggttgcgccgccgctgatctttttcctggtggcggttattttgtggggaagcctacgcagctccggcgcaattatgcggctggtgggcaagggtggcattgaagcgatctcccgtctgatgggattcctgctgcgccatcgcgacgtcggtagcatctggtgccagcgccagcactttaacctgcataccaagcccgatgatcatcatcgcgatcccccagaaaatactcagcaccccgaggtgtatttcactgttcgccgcagtaagggaagtaacttaatcaggcacaaaagggtgataagcgccccaataccaatcgcgaagaaggtcattcgccaaccgaaatactggcccacaatgcgcccgagaggtaaccctaagaccatcgccagtgctgtaccggtggcaattaaactcaatgcctgtgctcgcttcccggccggagccatacggatcgccagagacgccgtaatcgaccagaaaatcgcatgtgcaaaagccacaccaatgcgactgatcaccagaacggtaaagctccactacaaaaacgacagtacgtggctggcaataaccagcgatggtactgtggcatggcaaactaaagtcgcgggtgaagcactttcgcgcccggtggtcagcgacggtctggtgttaatccacaccagtaacggtcagttacaagcgctgaacgaagctgacggcgctgtcaaatggacagttaacctcgatatgccttcgctctctttgcgtggcgagtctgcgccgacaacggcttttggtgcggccgtcgtggggggcgataatggtcgcgtcagcgcagtgctgatggaacagggccagatgatttggcagcagcgtatttcccaggcgaccggttctaccgaaattgaccgtctgagcgatgttgacacgactcccgtcgttgttaacggcgttgttttcgcgctggcctataatggtaacctgacggcgcttgatctgcgcagtggtcagattatgtggaaacgcgaactgggttcggtgaatgatttcatcgtcgacggcaatcgcatctatctggtcgatcaaaatgaccgggtgatggcgttgaccattgatggcggcgttacgctgtggacacaaagcgatctgctgcatcgcctgctgacttctccggtgctgtataatggcaacctggtggtcggtgacagtgaaggttatctgcactggattaacgtcgaagatggtcgtttcgttgcccagcaaaaagttgatagttccggtttccagactgaaccgggtgtgaacatttccacggcgacagtttgccgtcagtgtgaagatgcaccgtgcgctaacgtctgcccgaatggtgctatcagccgtgataaagggtttgttcatgtgatgcaggaacgttgcattggttgcaaaacctgcgttgtggcttgcccgtatggtgcgatggaagtggtggtacgtccggtgatccgcaacagcggcgcgggtctgaatgtacgggctgacaaagccgaagccaataaatgcgacctgtgcaaccatcgtgaagacggcccggcgtgtatggcggcttgcccgactcatgcgctgatttgtgtcgatcgtaataaacttgaacaactgaccccagaaaaacgccgccaggcaaaattgcgagcgatgaagccagatgagtttgcgcaaatccagcaggcggtaattacccagatgctgcagcacccgcaaacgctcggcgaagaagcatcgaagttaagtaaagatttcgatcgcggcaatatgcgcttcgattcgcgtgataaaatcgtggcccagataaaactcgtgacgccgcaaaaacttgctgatttcttccatcaggcggtggtcgagccgcaaggcatggctattctgtcgcagatttccggcagccagaacgggaaagccgaatatgtacaccctgaaggctggaaagtgtgggagaacgtcagcgcgttgcagcaaacaatgcccctgatgagtgaaaagaatgagcaaaacctttacgattgcggcgctctatttgcgcctgttacttggactagcggttccgccgcctttccccgcccgctgaccgttgaagaactgctggtggtcacctttaccgaggctgccacggcagaattgcgcggtcgtatccgtagcaatatccacgagttgcgcatcgcctgtctgcgtgaaaccaccgacaatccactgtacgaacgcctgctggaagagatcgacgataaagcgcaagccgcgcagtggttgttgttagccgaacggcagatggatgaagcggcagtctttactattcacagcttttgccagcgcatgctcaacctgaatacaaacgaatgttgtttccagcggacgaccaagactatccacagggatagttttaagtccacgcccagagcagcaaaatcttgctcaggtttactccctgcgctggcacctagccagatctccagtaacacgccaatccagcctttatcgcgttttaaattctctggcgtaaccagcccgacaagtgccgccagttctcccaatgtataa

SEQ ID NO: 140294 - DNA, 2238 bp, Homo sapiens
atggtcgatttccagcaggatggtgagttgttgggccgtatacgcagtatccgcaagaaatttgcccaggagatgggatttctgccgccagtggtgcacattcgcgacaatatggatctgcaacctgcccgctatcgcattttgatgaaaggcgtggagattggcagtggtgatgcttatccggggcgctggctggcgattaaccctggaaccgctgccgggacgttacctggtgaggcgaccgtcgatccggcatttggcctgaatgctatctggattgaaagtgcgctaaaagaacaggcgcagattcaggggtacacagtggttgaggccagcacggtggtagcaacgcatcttaaccacctcattagccagcatgccgcagagctgtttggtcgtcaggaggcgcaacagctgttggatcgcgtcgcccaggagatgccaaagctgacggaagatctcgttcctggcgtcgtcacgctcaccacactgcataaagtgctgcaaaatctcctcgatgaaaaagtaccgattcgcgatatgcgcaccattctcgaaacgctggcggaacatgcgcccatccaaagcgatccacatgaattaaccgccgtcgtgcgcgtggcgttgggacgggcgattacccagcagtggtttcctggcaaagatgaagtccatgttattggcctcgatacaccgctggaacgtttgttactacaggcgctgcagggcgggggaggactggagccagggctggcggatcgtttactggcgcaaactcaggaagcgctatccgtcaggagatgctgggtgcgccgcagtatggtgggtaaccagcgctggaacctatgcgataaagtggtcgccatcattgttacccgtctggattcgttgtcagaaaatctcgccgttcaaaccatgctgccagcgttctatgaacaaggttacgacccaatcatgatggaaagtcagttttccccgcaattagttgccgaacatttgggagtgctgaaacggcgtaatatcgacggcgtagtgctgttcggttttactggcataacagaagaaatgttagcccactggcagtcatcgctggttctgctggcgcgtgacgcaaaaggctttgcttcggtctgttatgacgacgaaggggcaatcaaaatcctgatgcaacggctgtatgaccaggggcatcgtaatatcagttatctcggcgtgccgcacagtgacgtgacaaccgggcttgctatgaagcaaggctatgagaacgttgcaaaagtgattacgcctgaaactaccgccttactgtgcgcaaccgacacgctggcacttggcgcaagtaaatacctgcaagagcaacgcatcgacaccttgcaactggcgagcgtcgaaatgccggtagcgaccggacgttacccgaccacgcgctacggcctggtggaactggagccgaaaaccggacgcaaacatcagcttcgccgacatcttgcccatttgcgtcatccgattattggcgatagcaaacatggcgatttacgccagaatcgcagcggtgctgagcattttggcctccagcggttaatgctacatgccagtcagttgtcattgacgcatccttttactggcgagccgctgactattcacgcgggcctggacgacacctggatgcaggcgttatcacaatttggctggcgcggatggagagataagttcctaatccagggagaaaacggtatggcggaaattggtatttttgtcggcaccatgtacgggaattcactgttagtggccgaagaagcggaagcgattctgaccgcgcagggccacaaagcaacggtatttgaagatcctgaattaagcgactggctgccctatcaggataagtatgttctggtggttacgtccacgaccgggcagggcgaacttcctgatagcattgtgccactctttcagggaatcaaagatagtctgggcttccagccgaatctgcgttatggcgtgattgcgctcggcgacagtagttatgtgaattctgccatggggggaacaggtcgaagcctgttggcggaacagagcgctcaccgggtggcgaatgctgctgaagacgccagtgaaaaccggaacggaacggatcaaatcggggtccacatgggggagcgtcatcattccaaccacttctctctgctacactttgaccagaatatccccatcatacacgcaacacacaacaccctaatgtag

SEQ ID NO: 140295 - DNA, 993 bp, Homo sapiens
ttaagtcgatcgccggcctccaaaggagcgctttgggtttgaaaggggcggctctcgatgcgtgcgggtctttttgctgcgccaaaagttgcggtcggtaagtaacgttttaacccttcgggaatcacgctgcttgagctcggcacggtgacgttcggctgctaatgtcacgtcgtgggacctttccgagtacggcgaaacctgatcagtgcacagcatgccacttacactgaactccgcgccacacgacgacgagggcagcacggcggctattgcgatacttcgggacgcctcgttaccgacattccatcgacatccacatgcagctcgacatgacgacatcgcgatcgctatcgagccttcgcgaccaattgcactgccgctggttactaccagcagagaggcaagcgatttaaccaggcttgctgcgtaatcgaactgtccatcggtttgcaacgcttccatataatcggtcggcgcatgagggcgttgttgggtaaatttctgccagcccatcagcaacaaacccgccgccagtccgccgagcgccggagttagcaaccgtcgccagggggaaaggtttgtcggtctcctccggcgttcaaaaagcggcttaaagccctcggttgaaggaacgggccgcaatcctagctgactcaattcctgatgggtcggttccgtgcctttttcggcttttttttgacaaaaatggggtctattcttcccaatggtgtctttggggttgggttccgctagatccgatgtgtgaggctcccttgataagtttcgaagaaggtgaagccgtgttgccccctgtgtgcaactgtgttgggatgcgatgtgcaatgcccacgtgtcgctgctgtgatctgacgaagagtgaaacggtggttgctgcttgtggatgctgctgcatgttgcctgctgcacgtgtgcacgatgaggcctagccaagatactctggatggattgctggccttgccgaatggacat

SEQ ID NO: 140296 - DNA, 4347 bp, Homo sapiens
atgctgtttccgctggcgaccagcggcgcgatggagccgttccccttcctggcgggcacggctggcgcgctggtcggcggtctgcaaaacattggttccggcgtgctggcgtcgctctctgcgatgttgccgcaaaccgggcagcctggggttgttgatgaccttaatgggattgttgatcgtgctgtgctggctgccgctggcgacgcggatgtcgcatcaggggcagcccgtttaagcgcacgtcaccgcagcatcgtcatcagctccatgggagaacgatgctgctttatcagatcacgcatcacccgcatatgcggtcactggatttgcccgcagggtaatgagattccagtggtcgccgttgccagccatgataccgccagcgcggttatcgcctcgccgttaaacggctcacgtgctgcttatctctcttctggcacctggtcattgatgggcttcgaaagccagacgccatttaccaatgacacggcactggcagccaacatcaccaatgaaggcggggcggaaggtcgctatcgggtgctgaaaaatattatgggcttatggctgcttcagcgagtgcttcaggagcagcaaatcaacgatcttccggcgcttatctccgcgacacaggcacttccggcttgccgcttcattatcaatcccaatgacgatcgctttattaatcctgagacgatgtgcagcgaaattcaggctgcgtgtcgggaaacggcgcaaccgatcccggaaagtgatgctgaactggcgcgctgcattttcgacagtctggcgctgctgtatgccgatgtgttgcatgagctggcgcagctgcgcggtgaagatttctcgcaactgcatattgtcggcggaggctgccagaacacgctgctcaaccagctatgcgccgatgcctgcggtattcgggtgatcgccgggcctgttgaagcctcgacgctcggcaatatcggcatccagttaatgacgctggatgaactcaacaatgtggatgatttccgtcaggtcgtcagcaccaccgcgaatctgaccacctttacccctaatcctgacaattcactctacacgacagacaaaggagctttgcgcatgaccactcaactggaacaggcctgggagctagcgaaacagcgtttcgcggcggtggggattgatgtcgaggaggcgctgcgccaacttgatcgtttacccgtttcaatgcactgctggcagggcgatgatgtttccggttttgaaaacccggaaggttcgctgaccggggggattcaggccacaggcaattatccgggcaagcgcgtaatgccagtgagctacgtgccgatctggaacagcactttaagcttatcgggatcgaattggtttaaccgcaaggctttggggagtcccgcgcgttatgacgtgttgccaaaatggtggcggaatgtcgttaaaccgaccaggacccgcctgtatatcggtatcgccttctataaagtgggtgaaccttcaaagatagagccagactggatgattaacggcggcgtaccggaactgaaaaagcagctcgatcttaacgatgctgtgcccgaaattagcggcaccatcttgttccgtgaggactatcggaataaaccgcagactcaacaagcggcagatccgcccattcgtgctaaagccgcggaaattgccgttgcgcatgctcattatctgagtatcgagttttatcgaattgtccgcatcgacccgcatgccgaagaattcttgagtaatgaacaagttgagcggcagttgaagagtgcgatggaacgctggattattaacgtgctttctgcccagataaggccgcagccagcagtgacgctattatcgcggtctggcgaccgtagaaatgccggtagcgaccggacgttacccgaccacgcgctacgcgcctggtggaactggagccgaaaaccggacgcaaacatcagcttcgccgacatcttgcccatttgcgtcatccgattattggcgatagcaaacatggcgatttacgccagaatcgcagcggtgctgagcattttggcctccagcggatggagagataagttcctaatccagggagaaaacggtatggcggaaattggtatttttgtcggcaccatgtacgggaattcactgttagtggccgaagaagcggaagcgattctgaccgcgcagggccacaaagcaacggtatttgaagatcctgaattaagcgactggctgccctatcaggataagtatgttctggtggttacgtccacgaccgggcagggcgaccttcctgatagcattgtgccactctttcagggaatcaaagatagtctgggcttccagccgaatctgcgttatggcgtgattgcgctcggcgacagtagttatgtgaatttctgcaatggcggcaaacagttcgatgccttgttgcaggaacagagcgctcagcgggttggcgaaatgctgttgattgacggcccgttgaaaacccggaaccggaaacggcaatccaatcccggggtccaaccgtggggcccccagcgtgtcccgatatgttccctgcagccgaaaataacggacaagaccaagaggaaaaggagagaggaggggaagagagaagagcacgagagagaatcgaaacacggaggagaaggagagagaccaccgaagcaggaaagacggcagagagaaaagaaaggagacacgaggggacgggaagggcaggggcgggaagggaaacagaaggacgcgaggaacggagaggaaggaggggaggaaaaggggaggaagagggaggaaaggagagagccaggaaaagcgggaacgcgagatggaggaggtggaaaagagagaaagagagagcgacgagaagatgagagagggacaagggagaaggagaagaaggagccagacgagggagaaacggccaagggaggaggacggagaacagaagagaaggaaagaagaacagaggaagagaagaaagagcaggcaggggacaggaagcaggacgaggagacgaagaagagaaggagagagggcagaaagagggagaggaagaagcggagacggaacgagaaaaggagaagaaagaaagagaaaaaagaacgaaaccagaaagagagggaaaagtacgcgagagggcaggaagagggaacagcgaaggaaggaaggaaagaggagggagcagggcgagagacacagagagggaaggaacggacggtagagacgaggagaaacgcagaggacaagaaagaaggagaggggaaacgagagaaagagataaagaggaggagacacgcacagaaagatgcgctagacgagacaaagaggcgagacagaaagagagggacgcagagggagcgcgaaggagagcaaggagggagtcttagtttttttgtgtttgatgtggtagttggtgtatgtgccgaaaatcgcgtggacgggcgctgggcattggcgctcaatcggtgtagtgctcggcgttctgctgtcgcgtcgttaattatggcggacactcatcacgcacaagggcccggtaaaagcgttctgggcatcgggcagcgaattgtttctatcatggttgaaatggtagagacacgtctgcggctggcggtggtggagctggaagaggaaaaagcgaatctctttcaacttttactgatgctgggcctgacgatgcttttcgctgcatttggtcttatgagcctgatggtgctaattatttgggcggttgacccgcaatatcgcctgaatgcgatgattgccaccaccgtggtgttgctgctactggcactgattggcggtatctggacgctacgtaaatcgcgtaagtctacgttgctgcgccatacacgccatgagttagcaaacgatcggcagctgctcgaggaggagtcccgtgacagtaaagtcgaacgtgaacgaccattaccccgtttaacggtgctgccgctggtgtgtatccgaactcggggcgagcattacgatgtccgtgagcaaaacctggccatcatcacggtgaacattgcgcgcagctgcggattatctgccgcagtggcaggccgctggcgcacggttgattggcgggtgctgtcgcaccacgcctgcggatatcgccgcgttaaaagcgcgaagctgagggtttatcgggtctacatcgttcattgtaggcctgataagcgcagcgcatcaggcattgccggatggcggcacaagcgccttatccggcctacaaaaccacaaaacgttatgccgcatccgccagaacaaacatgccgtacggatggatttcaagataatactgctcgccgacgtccggttgcagacgcgtag

SEQ ID NO: 140297 - DNA, 2874 bp, Homo sapiens
atggatggtcctgccaacctgcgtcattttgatcgtcaactggaaggtattaccgggcgcgatgtgatcgttctaccggagatgtttaccagcggctttgccatggaagcggcagcttcgtcgctagcacaagatgacgtagtgaactggatgacagctaaggcgcagcagtgcaatgcgctgattgcaggcagtgttgcattacaaacggagtctggttcggttaaccgctttttgctggttgagccgggcggcacggtacatttttatgataagcgtcatctgttccgcatggcagatgagcatctacattataaagcgggcaatgcgcgagtgattgtgaaatggcgcggctggcgtattttgccgctggtgtgctacgacttacgttttcctgtgtggtcgcgcaatctcaacgattatgacctcgccctgtacgtcgccaactggcctgctccgcgctctctgcactggcaggcattgctgacggcccgcgcgattgagaatcaggcgtatgtggcgggatgcaatcgcgtcggcagcgatggcaacggctgccattatcgcggtgacagccgggtgattaatccgcaaggagagattatcgctactgccgacgcgcatcaggcaacgcgcattgatgcggagctgtcgatcaaatcccttacagcctttttaagtagtgttatagcatcagccttcctgtatgggaacggttcttacattgaatatatctctaggaacatgggcaggacctggaaggatccccggcgttctcggagactgaaccctgagctgggcccctggctgacatttgcagatgagccgctggtcccctcggagccccaaggtgctctgccgtcactgtgcctggctcccaaggcctacgacgtagagcgggagctgggcagccccacggacgaggacagtggccaagaccagcagctcctacggggaccccagatccctgccctggagagcccctgtgagagtgggtgtggggacatggatgaggaccccagctgcccgcagctccctcccagagttggagcagatcttcagaagaacacctatgcatctctgagtttttcatcttgcatgggcaagcagcgcaatggtgaaaaatgcgccgccaattgccatcagcgtcagaaactgcggccagacgatttcgaatccggcaccccgaggatggcctgcgcgaggctaacaaagtgtgtcgtcggcatggtcagcataatgtcctgcaccatctgcggcatactttcgcgcggcgtggaaccaccggaaagcatttgcagcggcagcagcaccagaatcaccagcagccccagttgcggcattgaacgcgctatcgtccccataaaaatgccgattgacgtggtggcaaacagactgagcgccacgcccagcataaacagcgggatcgagccttcaatcggtacgcccagtacacctttcaccatcagcaccagcgataatcccgataccaccagcaccaccagccccatcgaccagatcttcgccatcatgatctcaaacggcgttatcggcatcaccaagcctctggagaggaatagttctgattctttgatgttggccttgggcgatcctgagcagaggtttctgttggacctgcctggatttcggatctacagaaactgtgagataataaagggtcccctccgtaaatttcctgaactgaggcggatagcggttgtaataggtcggaccgtggctgccgatggtgtacaatcactgctcaaacgtgcggaagacattgtgctggcgacgcttattctgctgctgatctccccggtgctgtcctctgaagcgcacaccacttacggtgtaatcggcgttaaagtgtggatcttcaaaggcgagatcctgggtggtatggctgctgttgaacaaccggaaacctgctcgccagatccagcttcccagcctgcaacgcgcatttgtaactgggttcaggataattatgcccagccgctcacccgcgagagcgtggcgcagttttttaatatcacgcccaatcatctgtcaaaactgtttgctcagcatggaacgatgcgttttatcgagtatgtgcgttgggtgcgaatggcgaaggcgaggatgattttgcagaaatatcatctgtcaattcatgaagtggcacagcgttgcggttttccggatagcgactatttttgtcgcgttttccggcgtcagtttggcatggattatgtcgatatcctgcaaattcatcgctgggattacaacacgccgatcgaagagacgctggaagccctcaacgacgtggtaaaagccgggaaagcgcgttatatcggcgcgtcatcaatgcacgcttcgcagtttgctcaggcactggaactccaaaaacagcacggctgggcgcagtttgtcagtatgcaggatcactacaatctgatttatcgtgaagaagagcgcgagatgctaccactgtgttatcaggagggcgtggcggtaattccatggagcccgctggcaaggggccgtctgacgcgtccgtggggagaaactaccgcacgactggtgtctgatgaggtggggaaaaatctctataaagaaagcgatgaaaatgacgcgcagatcgcagagcggttaacaggcgtcagtgaagaactgggggcgacacgagcacaagttgcgctggcctggttgttgagtaaaccgggcattgccgcaccgattatcggaacttcgcgcgaagaacagcttgatgagctattgaacgcggtggatatcactttgaagccggaacagattgccgaactggaaacgccgtatagggtaccaactcattggctatttctggtttttccgggaggatcagcgcaataa

SEQ ID NO: 140298 - DNA, 3159 bp, Homo sapiens
ttactgaatctgacaccgaattccattcagaataatagattgtgctattttttctgcttctgggctttgttgataatgcgcaagacaacttacgggtttactttgttcgagccatttaatgctgatatttccctgctgctcaataccacgaacaaatgcttgtccaccctgtccaacattaccaatgacattgccttgctcatcataaatatctgcagcaaatggaatatttttaccatcacttcgtgtgatgttcataatggctgattgcccttgcacggtttcaaaatcagcaaagacgactgaaccctgacgcggtacagctactgcactggtactttttaattcaacatcgttctcaagatcgttgatatccagcgcgatacggttttcatgataaggagaaagagcgctggtgacaccataaccccatcgatcgatagtactgttgccataatttattcgcgctccttgagcacctggagcctgaactaccgccagtgtatcggagtcgctaaaactatcattactgaaagtcagtccaccgctatgcaatacaaaaccaccgtcggtgctgagagaaacttgacggctgttatcgctatttgcagaaattgaaccgggcacgtttcccggtttaccttttatggaggcattaaattgttcccagcgagttttattcaagttgagccgctgttcatactttacggttttattttgcacacctccgctgttcgttctttggagcgcattttggaggttcccttttactcggtccttgtttgggctccgcacgatgcagcagcgagatacaacaagactaacgacgaagctagtaataatcgcgccatcgcgaacgcctgtcagctgcagcgggagctgggcatcgtgaccgtatggcgggcaacttgtcgaggccggtggtaagcgcacagcgcgacgttctgatgcgggcagccagtgttccagcggtagcggccagacatttatcatttcttgtcgcgcttgcgggcaatcagcggcaacacgtttgccattttcatccagccagatggggaaacgaatgccattaatgccttcctgctccggcagtaatagagttggcggctgactcccgtccagcagccaggttgccaggcggcggcgacagttaccgtcaccttccggcaaagactgtccgcccggccagcagataacgccacgagtgactgagttcgggcgcgggtcttccggcagattcgcactgcgcgacagtaagatattattgacctgattcaacaatggtacggcactggcaaagccaaactgaccaacaacgggcgtgccgtccggtctgccagtccagatcccaatgacatagcgagcgttaaccccaatcgcccaggcgtcacgatagccatagctggtgcccgttttccatgccagtggggcgacgcgcggcaaggcactatccggcaagggttgcgcttcatcaggcataatccggggaatgatccacggcggccccgaagaacaacagagtagcggaccgacatagaaggcagcacaaagccccaggcacgagtaggcataggtgtttatttcaccgcttatcagcttttcaacctgttggagatctttattgagatcctccggccaggtcagttgctgaaaggtgagtccgcgcagctcttcctgactgtacccgagaaactggcagagcgctttgttggtttgcagccattgtccctcggtgcccactaacgccataccgatagcggaatattccatcgcgttccgaaagtgggtttcgctttcggaaatgtgtttgcgttccgcacgaaaggcatacatcaccatggtcatgatgttggcgggcagcaggatcagcaaaaacggtagccacggcatatggctcatcaggtacgtacgcggcgtagcaagcagggagggatccgcggccatcatcagcgacaccatcatcaccgtggtaaggaagatcaaaaaggcttccattcgtggcagacgcacggcgctccacatcaacagcacaataatgaaagtaaaaggccacggcagatacagcatcgaaagccagcttaacgtcagtgtgatggctaacgtgagcagcgactcaaaaagcaaccgtgggttgcgatggcgcagcagatagtgtggtttaaataacaatcccagcggcaccagtgccagagcgccgatggattctgacagtacccatatcaaaaatgccctgagaggatcgtctccgggcgtcagcaggacaaccagaacaccccccaacagaggcggaacaatggcgctgccgagtgccagacgcagccagtcagccagattttgcaaggggttataccacggcagcaatttacgtagcagcactgccccgaccacggcttcaacaatattgatggtcgtccaggtcatgttcagcgagctggtggaaaaaagcaggatggatgcggcgatatttcccagcgaacagctcagcgcaattcccggccacatgcgcccggcatggcgataaaacgccaccatcatgatggacgtcgggaaccacagtggggcgagttgggtgccaaactgcgaaagctcaagcgagaaaagggtaaagataaacgagactaaacctaaactgaccaggtgaagcagcgggtggggcagggcaattaatacatgctgtgattggttgctcattaccgctttatccgccagacctgggcgccaagattcgtttctgtggttatgctaggacaaaagttctacattttatatgcgaaatgctcataaagtgacgtaaaggcggaaaatttgcgcacctgcggtaaacattttttacctttactaaaactgatcctctaggagtcaccctgctcgccgttcaagttgggcaggggggggcggttgtaacaggtgcaggagatctaatacccctgccgctcaccactgttagacacgacgtcgcgcgggggccggtctgtcggctcgcatgttggtagctcctcccactattcagcactctcaccagtactctcggtgctgtgtctcctcctccttcgtcgctcgggccccgggccggtctactggctctatctctcgcgcgcgctcgtcgcgctgatcgcaatatcggcacagtgtcgcacgatcgtcgcatgcgtccctgcc

SEQ ID NO: 140299 - DNA, 1484 bp, Homo sapiens
ctgccccgtgggaaacttgaataagtgggtcatgccagacgatatcattaatgcctgtgccactgttgagaggttgcaggcaatcaccagcacaatctggcggtcaaagcgcagaaaatgattcttatagaaccccttcaccaccttctcgcagtaataattaaagcgctcgcgcagcattccggcattggtatgcttatcggcctgcgccagtttggactcgccccaggtatcgacatccggccacgggaagaattgcagcgcgggcgcacctgccatatctcccggcaagacaaagcgcccaggctgaataaagtgcagcccctgctctttacagtggtggagataatcggtccacgcggcggcaatgtccgccagccggttttcgtcggcaggcgctagcgggtccagcccttcgctcatcattcgccatttcgccgaccattctccgcgctgaccattgagtaagcccgtcatctggcgcgaccagcttaaatagtcctgcgccagcatcggcaggtcgagcaaccattcgccgggataatccacaatttccagatacagcgtggaggtatccttaaagtggcgtagcagcgaatcattcgatttaaaacgtagcgccaggcggatttcactgacgccgcgcgttggcgttggccaggcgggtggatcgccatataactgcgccagcccttcgtcataggtgaagcgcggaatgccaaagtcacgctggggaatgcgtttcacgcccagcaggcgctcttcacgcaccgcattaacagcggcaaaaagtggtaccgttcgctggggtatcatttcggcaaggcaagcagggcaagtagcggcatcgggaacaatttgcgtattcatggtgccgcctgtgctctggcgtatagtgaactcggtgggcaaatttgaccaaaaaaacgggtctcgcgttgaaccataacaaagggccccaggggcggacagtgctgatacaattgaacaagaaacgtttccgggtcttcccgcagccggacttctacgccatcgccgtcattacagacatcgccgtgaagatttaattgctgtgccagctgccagacaaacggacgaaaaccgacgccctgcactttgccacgaatacgcagttggacaccgcaagatgtgttttttgccattgagttattcccgccatcatgaattgcgtaacccgccctgccggacacgacagcgtcgcatccggcagtcacaggtcggcgataccgcccgctccgtattctacgaatatttccgggaattcggcggcgtttttctgcgctcagttgttcaagtttattacgatcgacacaaatcagcgcatgagtcgggcaagccgccatacacgccgggccgtcttcacgatggttgcacaggtcgcatttattggcttcggctttgtcagcccgtacattcagaaccgcgccgctgttgcggatcaccggacgtaccaccacttccat

SEQ ID NO: 140300 - DNA, 3002 bp, Homo sapiens
atggtggcgttttatcgccatgccgggcgcatgtggccgggaattgcgctgagctgttcgctgggaaatatcgccgcatccatcctgcttttttccaccagctcgctgaacatgacctggacgaccatcaatattgttgaagccgtggtcggggcagtgctgctacgtaaattgctgccgtggtataaccccttgcaaaatctggctgactggctgcgtctggcactcggcagcgccaactcagccggtgtgaacatttccacggcgacagtttgccgtcagtgtgaagatgcaccgtgcgctaacgtctgcccgaatggtgctatcagccgtgataaagggtttgttcatgtgatgcaggaacgttgcattggttgcaaaacctgcgttgtggcttgcccgtatggtgcgatggaagtggtggtacgtccggtgatccgcaacagcggcgcgggtctgaatgtacgggctgacaaagccgaagccaataaatgcgacctgtgcaaccatcgtgaagacggcccggcgtgtatggcggcttgcccgactcatgcgctgatttgtgtcgatcgtaataaacttgaacaactgagcgcagaaaaacgccgccgaattcccggaaatattcgtagaatacggagcgggcggtatcgccgacctgtgactgccggatgcgacgctgtcgtgtccggcagggcgggttacgcaattcatgatggcgggaataactcaatggcaaaaaacacatcttgcggtgtccaactgcgtattcgtggcaaagtgcagggcgtcggttttcgtccgtttgtctggcagctggcacagcaattatctcacgggagtcgtatgcgggatggcacatgcaacttgaagtatgacgagtatagcaggagtggcagcatgcaatacaaccccttaggaaaaaccgaccttcgcgtttcccgactttgcctcggctgtatgacctttggcgagccagatcgcggtaatcacgcatggacactgccggaagaaagcagccgtcccataattaaacgtgcactggaaggcggcataaatttctttgataccgccaacagttattctgacggcagcagcgaagagatcgtcggtcgcgcactgcgggatttcgcccgtcgtgaagacgtggtcgttgcgaccaaagtgttccatcgcgttggtgatttaccggaaggattatcccgtgcgcaaattttgcgctctatcgacgacagcctgcgacgtctcggcatggattatgtcgatatcctgcaaattcatcgctgggattacaacacgccgatcgaagagacgctggaagccctcaacgacgtggtaaaagccgggaaagcgcgttatatcggcgcgtcatcaatgcacgcttcgcagtttgctcaggcactggaactccaaaaacagcacggctgggcgcagtttgtcaaaagcgatgaaaatgacgcgccagatcgccagagcggttcaacaggcagtcagtgcaagaactgcggggcagacacagagccacaagttgcagctggccctggattgtctgagttaaacccggtgcattgcccgcacctgcattatcgggcacacttccgcgccgacagacacagcgttgcatgcagcctattggacacgccagtcacgggccatcaggtggcaccaacgtacagacagcaagtaccccgagcgggccaggtgcatgacccgagtaaacatacacggatgccgtgcgagaacatcgaccccgtgcgaacaatcatccgtcgaatcagtgatccaccagtgcccgccagtgcgacacttggcgcatccaaagccagccggatccggccacggcgttcccacagtatcccagaaatcacggcaaaatcacgaaagcccggcggacaacccaaatggcaagtcatctgctggctggatcgcgacgagaaagtagtggtcatgcaaaccgtgcgtgaccagataggccagcatgtttttactgctcatcgtctggaccgacccacttctggtgtgttgttgatgggattatccagcgaggccggacggctgctggcacaacagtttgaacagcaccaaatccagaaacgttaccatgcgattgtgcgcggctggttgatggaagaagcggtgctggattatccactggtggaagaactggacaaaatcgctgataaatttgcccgcgaagataaaggcccgcagccagcagtgacgcattatcgcggtctggcgaccgtagaaatgccggtagcgaccggacgttacccgaccacgcgctacggcctggtggaactggagccgaaaaccggacgcaaacatcagcttcgccgacatcttgcccatttgcgtcatccgattattggcgatagcaaacatggcgatttacgccagaatcgcagcggtgctgagcattttggcctccagcggttaatgctacatgccagtcagttgtcattgacgcatccttttactggcgagccgctgactattcacgcgggcctggacgacacctggatgcaggcgttatcacaatttggctggcgcggtctgcttcctgaaaatgaaaggggtgagttcagtgcgccctcgggtcagggatggagaaataagttcctaatccagaaaaacgatggcgaaatggcttttggcgcccatgtcggattctcgtgtggcaaaaggacgccctaccgcgggccaacaggattgaacgaaaacagggccatcgaaatgtgggtatcccaggggaacttattgactggaaaaaaggccacttaatgggaatattgggatcgcaccttcgcgacaattgcactgccgctggttactaccagcagagaggcaagcgatttaaccaggcttgcggcgtaatcgaactgtccatcggtttgcaacgcttccatataatcggtcggcgcatgagggcgttgttgggtaaatttctgccagcccatcagcaacaaacccgccgccagtccgccgagcgccggagttag

SEQ ID NO: 140301 - DNA, 1836 bp, Homo sapiens
atgcatgcacagattggccccatgaaaaagtttcggacaggcatttggtcagtaatgccagcattctttatttggcacgcagtgctgcgcgagaagcgccaggtaatttgcgctcaaaacaaaatcacgttatcgccacacccgctttcatcaaaagtgtctgtacatcggccagtttttgcgacggcgatgccatcaggtggtgcccagtgcgccaaaaccttgccagatcaactgctttttgacatcgccagcgttgatttatctaaaccttccgagagcaacaggagccatttacatcccatgcaggttgctctgcgcgataaattttactttctgcccgtcgctcaggcgcaagcctttatcactgaggctatagaaactgcgtcgcccgatcgggaaacatccagccagccttctttattaagacgaaacaaagcggtgccacgaaacgctcaccaaatcccagcccttccagcaaagcagccagactaccaaccagatttcaccaccacgatgggaaagcgaatcaccatacagagagagatcaaagatgtgccactgaccggaacagcgtttacagcatgttggaaaaaacgattgcctggctggcggtactttgtgtaccgctctgcaccacagcatccgcgtaaaccacgtttcaacaattcgccaaggtgctcaacaacatcgcattttcgccaagctgcattttcagccgctctggctcgatacgaatcataccggaatacggtaatcatcgttaaatgtctgacgcatattcggcgcaagaatggcactttgcttacgtgctgcgctcctctggcgacagtgaccagacaatcgagcaaagatgcggatcctaagcgtaaaaaggccagaatgcttcgccatggaaaacctgccgcgccacggcacatgcggttcttccgtgcgaatggtcgctaccagcgcgtgatgctgatatcccagaaagtcagcggaatatcggctttgttgcgcaaccaggaatctagccctggccctacgagagagaatgtcctgccagagccaagacgggtgagtaatttttcgctggcggcattgatagccgaaacggcagttgtggtggtgcattcgccgccagaggttcatgtacgcgctgctcagtacggcaacgcgcaaccgccaccccaccatgccgccgccaacaatggctacatcaacactttgcattgttattccttaaaaccgcgttcaacgcgccacccaaccgagggtgcgctgcgcagcacatcgcgtgccggggtgaataattccatcgtcatcagcccgatgtgcgcccgacaaccagcggtgcccaacggttggcaaaaagatgtacaagctactgggaagcgcacgaggcttcattttgagtgggtcaacgcaaacaaccagacctctgcttcattcagcaaagtattctcggcgttgacaatacgttgcgtaaaaccaaagaggtgccacgcattgatgttatttcagtctgtatttcgacatatcgtcgagccgcgcagtgctggtcggcttctcggttcttattccgacattggcgcatttgtggtgaccattccggtggttggcgtggcgctattcagtttggcgcagcccggaaaaccagattacaaactgaaacaggcaatacctgccagattaccgcggccaccagaagtcgttaatcagccaagttcgccaactaataacgccccgactttttgccataccgtcattaccgacgaggtgaacaggctggtgcccaaaccgccagcaaataaagccgagtgtaaagcaaaggccggccaccagatgggttaa

SEQ ID NO: 140302 - DNA, 1353 bp, Homo sapiens; identical to SEQ ID NO: 135938

SEQ ID NO: 140303 - DNA, 4815 bp, Homo sapiens; identical to SEQ ID NO: 138370

SEQ ID NO: 140304 - DNA, 2829 bp, Homo sapiens
cagcaccaccagcagcaccaccgcgttcagtgccaccactgcgggtacgccatcgacgggaaatacaccatcagcgtcacccatctggcgcaggccaaacttctgggccaggaaagtgtacttgctccactggttttgccaccgccagccctcgaaagaggtgctctttcatctggcgctgtatcgcaacaatccgcgctgtaaagcggtggtgcatttgcacagcacatggtcgacggcgctttcctgcctgcaagggctggacagcagcaacgttattcgtccgttcacaccatacgtggtgatgcggatgggaaatgtcccgctggtgccttattaccgaccgggcgataaacgcatcgcacaggatctggcggaacgggaaacacacagatcatgcttttttactggcaaatcatggcccagtggtttgcggtgaaagcctgcaagaagccgccaacaatatggaagagctggaggaaacggcaaagctgatttttattctcggtgaccgcccgatccgttatctgaccgcaggtgaaattgcggaattaaggagttaatgcaatgcctcgttttgcagctaatttatccatgatgttcaccgaagtgccttttattgaacgcttcgccgcagcgcgaaaagccgggttcgatgggtaccgagatcgagtcgtatcgtggctttggatctttcttcaggggtagccaatgcaccggccaggttgggtaaatcaccgtgtgaccgatgcaatgcaaggcaatggcaatgcatggggtatcaagtgctgtccaagcgttgtacgatatttggggagcgtctagccacaggttgctgcacgtgttccgactggacttgtacgcatgggagtgcatgcacccggcagctggtagaacactacctcggaccgtgcaaggcattgcatccatggctcgtggtactcggaggatctctagagtctgaccagggctccaggtgatcgacggaacttgtatcagggaggcatgcaccgcgtggtgaatacacgtcgaccatggctccagcttaacgatatttggaggtagctcggtgctcacgtgtcgacggaatcttggtccatggagggcatgcactgatggtggtgaatacacgtgcgacctgcaggcaggcatgcatgctcggtactggaggatccttgtcgaccgtgcaaggccattgccattgcattgctctggtgtcacttggcagtatccctcatcagcagtcagaccgaaggcctcctcaacgagttcaactgctaatatttggcagtgtccaggcaccggctgcatcaaccgttgtctgcactgcacacgtttgtcaccagtgggcatgggcatagcgtggtcactgggcagggatccttcgtcaacaggagagacaccaatatcccaagcgtctaaccgacaattcacggcacggacatgcacctgacgcatcacggatgtccgaccggcacacttgcaccaagggtatggaaattgcaccgtaagatgggttgaacttacacccgtaggcccaagcgcaaccacgacaaaaccaagcaaaacgcgcccgcccaggcaagggcggcgtaaccgagcaacgacgggaaacctcgccaccgcggcaacggcccccgcaccggcaaacggccaacacaaccccgaacgaacacctgcccaggccgccacatctccaacacgacggcaacccggacggaccgccacatggtgcaaaagtaattgtggttttgccattactgttgacttgtttactacatccctccaaattatagctttctctgaagaaatctccttgctcgccgcagccgcctccgccacgcgcctcctccgccgccgggactccggcagctttatcgccagagtccctgaactctcgctttcttttaatcgcctgcatcggatcaccggcgtgccccaccatgtcagacgcagcctagacaccagctccgaaatcaccaccaaggaaggagaagaaggagttgtggaagaggcagaaaatggaagagacgcccctgctaacgggaatgtaatgaggaaaatggggagcaggaggctgacaatgaggtagatgaagaaaggaagaaggtggggaggaagaggaggaggaagaaggtgatggtgaggagaggatggagatgaagatgaggaagctgagacagctacgggcaagcgggagctgaagatgatgaggatgacgatgtcgataccaagaagcagaagaccacgaggatgaatgttaacacccactggcttggaattccagctggccagtgcaggaagctggagactgcctgaaatgaaccaagttcctgaggggcttggagtgggggcagctgccatctctgtggttccagcctgccggctcctctgggagtccaggaggtctctgaaatgtggctgaataatcaggcaggtgtccccgctgattaaacacaaaggaaagactgtcttcccaagtctgtgactggcaccgagttttaggttcacggataaaacgcgtctcctctgtctcctcctccgaaggccgctgccggctgcagtcccgcccccagccccgcggtcacctgcagcgggtgcactcaggcctccgtcggccggctccaccggcagctcccacagcccgtccgcactgtcgtcgtcgcctctgcgcccagggcagccgccgccggcactgcgccgccctcccgcgctccttgtcgttcggcgtctgagagcttgaggccccagaaggccgcgcacgggctcctggagtgttcgtgcctctttctgcgactccatggcggacatccggtcaggccgtggcat

SEQ ID NO: 140305 - DNA, 1483 bp, Homo sapiens
cccggaaaaccagattaacaaactgaaacaggcaatacctgccgattaccgcagccaccagaagtgcgttaatcagccaagttcgccaactataacgccccgactttttgccatcaccgtcattaccgacgagcgcggctatgcaaccggttcggctggcaatctgtcgctgctttacctgacgggaatttactggcgacaccgacagttcatgcctgggcaattcgatccgcagcggttttccaaagtcgccgcggatggcgaatggttaagggtgacaaaccctcgaaagagtgctctttcatctggcgctgtatcgcaaaatccgcgctgtaaagcggtggtgcatttgccagcacatggtcgacggcctttcctgcctgcaagggctggacagcagcaacgttattcgtccgttcaaccatacgtggtgatgcggatgggaaatgtcccgctggatctggcggaactggcagcagaaatcaggcttttttactggcaaatcatggcccagtggtttgcggtgaaacctgcaagaagccgccaacaatatggaagagctggaggaaacggcaaagtgatttttattctcggtgaccgcccgatccgttatctgaccgcaggcgtctgcccgctggcgaagatgctgaacggtaccgggcagtatttatcgataaaacggtgtaccaacaaccgatccgttcgcggtacatgctctgctccccgcgccgggccaaaagggtatggcctgatgatgatgattgacgtcctctcagcgtcttactcggcttaccgttcgggcgacagaactttactatattcctaccacagggcctctgcctgtgctgactccaccaccttgacagtcctcatctcctacacctttcacttagttaattcctacagcactgtaccacctcttgaaggatcagggacccaaccagcttcaccgtcctttcctacccgggtgtctgatgaccataatcgtgactttttcttcctcttgtctccctgtggtctactacagaatttggcacaatgtattagacaagttggaatccagcttgattttggttgtgttataatttcagctcagacagaaactgatgggcctttggtctgtggacgttttgaggaagggaccccctttagtccccaaacaccgagagactgtgatcccaacaggagctacagtggaaacacacaaggagtcagaggagcaacctctagtcctggctctgccatcagctttgagcaaacagtgaatgctcggagccatgttttgagagtcacactgactttgggtttgacaagacctatgctttatgtcactgggtcattgaaatggattaatatatgcattcttcctatctctctgaagcctctccggtattacattcacctggctgctcagttccccacagctcctatttccctaggaagaagtctccatgtagtgccccatgaagaggttgctatgtga

SEQ ID NO: 140306 - DNA, 413 bp, Homo sapiens
atgcaagttgatggcggcgaaggtgtactgttgattatcaaaaattacaccggcgatattcttaactttgaaacagcgaccgagttactgcacgatagcggcgtaaaagggaattctacccccctctacgagactcaagcttgccagtatcagatgcagttcccagtcagagggatctttctaaagcacaaatccaattatgggtacgagacaggattgtctaaatcgcacaacctaaatattcaaaaaaatgaatatttaattcaaggaacagaaacgaggcaacaagatgtttgtagaagcattgaaacgccagaacccggcgctgatttccgccgcactaagcctgtggcagcagggcaagatcgccccggacagctgggtgatcgacgtggatcagatactggaaaacg

SEQ ID NO: 140307 - DNA, 359 bp, Homo sapiens
tggaaactccaactcccgggttgcaggtagaaggtgggcttcaggaagaaggtgggcttcaggtaagaggtgggcttcaggtagaaggtgggcttcagggaagaggtgggcttcaggaagaaggtgggcttcagggaagaggtgggcttcagggagaaggtgggcttcagggaggaggtgggcttcagggagaaggtgggcttcagggagaaggtgggatcatcgggagacaaaacagaggcttctaggtactcaggatgattacgtaaagtaaaagtcagtttgctcaggatatgtgtcggaacgtcctgctcatcaataattttggccgtatccagcatgatccggccatatttcat

SEQ ID NO: 140308 - DNA, 2493 bp, Homo sapiens; identical to SEQ ID NO: 123342

SEQ ID NO: 140309 - DNA, 1857 bp, Homo sapiens
atggagggagatcgacttaattcagagtaccccacattcgggaatagacgaaagacatataccgttggacgtacgctgtcaacatatcaggtgcttcgctgcttctgcaagcaactggttacgcgcctgagtcagtttttcgtgaccaaggccagcctggtcaatcagctcaaagtcaaagccggttgcagtacccagttccacgattgcgggcaggttaaaggcgaaaaccatcgcatctttgatttgcgagaaagcgcgtgttgcacgcatggtaatcgcttcaactttgttttcttcgcccggacgatcggcccagtccttcaaggaaacgaacgcaataccggtattctgaccacgtcccgcaaagccgaagccgttaacggcgaacaccgactcaacgttgttcttttctttggtcagatagtaatgcgttacctcattgagcactttctgtgtacgttcctgcgttgcacctgctggcagctgaaccatggtcataaacacgccctggtcctcatctggcaagaaggagcttggcagacgcacgaacagataggccatgccgaccacgatgatcagatacagcaccaggtaacgccccgtactgcgcagaataccgcctacgctgtcggtgtagtggtgcgtgctcttctcgaacatgcggttaaaccagccgaagaagccttttttaccttccccgtgatcgcctttggcaatcggtttcagcatggtggcacaagagctggagtcaggatcaacgccaccagtaccgacagcgccattgctgaaacaatggcaaaggtacaaccattcgttgctttgctcctcgtcagcctgttagtcgcacttgcggcaggtataccggcgggcgaagtgggtaaagtgatgatcgccgggatgggcggtgtgcttggttccgtcactattattattggtctgggcgctatgctggggcgtatgatcgaacactctggtggtgcagagtcactggctaattatttcagtcgcaagttaggtgacaaacgaactatcgctgcgctgactctggcagcgttcttcctcggtattcccgtcttctttgatgtcggctttattattcttgcgccaatcatttacggttttgccaaggttgccaaaatatcgccactcaaatttggcctgcctgtcgctgggatcatgctcactgttcacgtggcggtaccgccgcatccaggccctgtcgccgcagcggggttactccacgcagacatcggctggctaaccatcatcggtattgcgatttctattcccgtaggggttgttggctactttgcagcgaaaataatcaataagcgccaatatgcgatgtcagtagaagtactggaacagatgcaactggctccggccagtgaggaaggcgcgacaaaattaagcgataaaataaatccaccgggcgtcgcgctggtcacctcgctaattgttattcctatcgcgattatcatggcgggtacggtttccgcaacactgatgccgccttcgcatcccctgcttggtacgctacagctgatcggctcaccaatggtagctctaatgattgcgctggtgctggcattctggttattggctctacgtcgcggctggagcttacaacacaccagcgacattatgggctcagcgcttcctactgcggcggtagtgattttggttactggtgctggaggggtatttggcaaagtgctggtggaatcgggcgtcggcaaagcccttgccaacatgctaccaatgattgacctgcctctgttaccagccgcatttattatttcactggcgctgcgtgcatcgcaggggtcagcaacctctcatatgaaagaatag

SEQ ID NO: 140310 - DNA, 1614 bp, Homo sapiens
atgaaaattgaactgaagattacaatcaatttaacaacaagttacacaaccaattcagactccgccagcccaccaatcatgattggacggtgtaaggacaacaccaacaaaaacaggaagttagaagtctcagcaaaacaccgaccagacggctttaatacctgcctggtatattccacgtctgcccgacaaataattgacgaaattaccgtcactattcactttcacccggttatcatcggggggagacgctttgaactccttcaattttgcgcaacgttaccgcttctggcgccgatcccgctggtgattttgtggtttggcattgatgaatccgcaaaaatctttctggtggcgctcggtacgctattccccatttatatcaacacctggcatggcatccgtaatatcgatcgcgggttggtggagatggcgcgtagctatggattatccggcataccgctgtttatccatgtgatcctgcctggtgccctgccctcaattatggtcggcgtgcgttttgcgttgggcctgatgtggctgacgctgattgttgccgaaaccatttctgccaattcaggcattggttatctggcgatgaatgcgcgggagtttttgcaaacggacgtggtggtagtcgctattattctttacgccctgctcggcaaactggctgacgtcagcgcgcagctgttagagcgcctctggttgcgctggaacccggcttatcatttgaaggaggccacgggcacgccattgttgctcaatgcagtaagcaaacattacgcggaaaatatcgtcctgaaccaactggatttacatattccggcaggtcagtttgtggcggtggtgggccgcagcggtggtggcaaaagtaccctgctgcgcctgctggcaggtctggaaacgccaaccgcaggcgatgtaatgggccttatgaacgcatttgattcgcaaaccgaagattcttcacctgcaattggtcgcaacttgcgtagccgcccgctggcgcgtaaaaaactctccgaaatggtggaagaagagctggaacagatgatccgccgtcgtgaatttggcgaaggtgaacaattaccgtctgaacgcgaactgatggcgttctttaacgtcgggcgtccttcggtgcgtgaagcgctggcagcgttaaaacgcaaaggtctggtgcaaataaacaacggcgaacgcgctcgcgtctcgcgtccttctgcggacactatcatcggtgagctttccggcatggcgaaagatttcctttctcatcccggtgggattgcccatttcgaacaattacgtctgttctttgaatccagtctggtgcgctatgcggctgaacatgccaccgatgagcaaatcgatttgctggcaaaagcactgggggatcctctagagtgggcgtcaacgttaccttgctggaacgcggcgcgggcatcagcgggcgtcaggcgaggattctgcagcaaccgcaaaagtagagacgctaagcaatcccgccagcgccagtttaatgatgttacgcatgggcattacctcgcagagacagaaggtcaggaacctgttgcccaaccaacaatgtattcagcgagttgctcttcatga

SEQ ID NO: 140311 - DNA, 2133 bp, Homo sapiens
atggggtcattcatgtgccaggaagaggctggtgagggagcctcgggagaactgtacatcaagagcatccccaagggtgactcattaggatcaacatccagtggggctgagagcagcagcagcgagtgttatctcagagacagacccacagcaagacaggagatgtgcacagcgctatatcagaataatgtcggcgttaccattgccgcagatcaccctggtcgcgaagtgatgcgtacaaatacccctttagtttattcaggcaggcaggtgcgcggcgatattttgaattcaatgctccccattgagcgtaatggtgaaatcctcggctatatctgggccaatgaattaaccgaagatattcgccgccaggcctggaaaatggatgtgaggattatcattgtgctcaccgctggtttgctgataagcctgctgttgattgtccttttctcccgtcgcctgagcgccaatattgatatcatcaccgatggcctctcgactctggcacaaaatattcccactcgattaccacaattgcccggtgaaatggggcaaatcagtcagagtgttaataacctcgcccaggcactgcgtgaaacgcggacacttaacgatctgattattgaaaacgctgccgatggcgtcattgccattgaccgccagggtgatgtaaccaccatgaacccagcagcagaagttatcactggctatcaacgccatgaactgtcgactctagagatcccctatccccaggggattgcggaaaccgacccacgcgtggcggtgaaaattttcaacgtcgcccgaagcgataaaaacgaaatcctgactaatgtcttccgctcaaaaggcgtgctggtcggcacttcgacgatgaataacgtgatgatgccgaaaatcgccgggctggtggaggagatgactggtttacgcttccgtaacaaacgcgccagtgctttcggctctcacggctggagcggcggtgcggtggatcgtctttccacgcgcctgcaggatgcgggtttcgaaatgtcgcttagcctgaaagcgaaatggcgaccagaccaggacgctctgaagttatgccgtgaacacggtcgcgaaatcgcccgtcagtgggcgctcgcgccgctgccgcagagcacggtgaatacggtagttaaagaagaaacctctgccaccacgacggctgacctcggcccacggatgcagtgcagcgtctgccagtggatttacgatccggcaaaaggcgagccaatgcaggacgttgcgccaggaacgccaactggcatcggaaggcaaaatgagaagcaaattgaagatctgacccgcgaggcgatgggcttttctgaaaaacgcggtgactcgctcaatgtcgttaactcgccgttcaatagcagtgacgaaagcggcggagaactgccattctggcaacagcaagcgtttatcgatcagttacttgctgccggtcgctggttgctggtactgctggtggcgtggctgctgtggcggaaagcggtacgtccgcagctaacacgtcgcgctgaggcgatgaaagctgtacagcaacaggcgcaggcccgcgaggaagtggaagatgcggtggaagtccgcctgagcaaagacgaacaactacaacaacggcgcgctaaccaacgtctgggggcagaagtcatgagccagcgtatccgtgaaatgtctgataacgatccgcgcgtggtggcgctggtcattcgccagtggataaataacgatcatgagccgtggctactgccgatgctctctgctgctgtacctctgccgctggagcctgctaacaccaccgtttctcaaccgatgatcacgttgctgctgattgcctgcccgctgctgccattcatcattatggcgatttgcaaaggcgatcgtttgccatcgcgttcccgcggtgcggcctgggtgtgcggttacgaccacgaaaaatcaatggtgattaccgctcacggttttgccatgccggtgaaacaggcgtttgcgccggtgctgaaactacgcaaatggctgaatccggtgtctctggtgccgggctggcagtgcgaggggagtgcgttgctgttccgccggatggcgctggttgaactggcggtactggtg

SEQ ID NO: 140312 - DNA, 4218 bp, Homo sapiens
  misc_feature (1)...(4218): n = a,t,c or g
atggaacactttggtcgcaacgaccacgtcttcacgacgggcgaaatcccgcagtgcgcgaccgacgatctcttcgctgctgccgtcagaataactgttggcggtatcaaagaaatttatgccgccttccagtgcacgtttaattatgggacggctgctttcttccggcagtgtccatgcgtgattacgactctagagatccccacgtaccgagccgtgtctgagaccactggtgaaatcctttttgacctcttgtgcgctaacggtccagagtggaaccgcttcgttacgctggaaatgaaatatggccggatcatgctggatacggccaaaattattgatgagcaggacgttccgacacatatcctgagcaaactgacttttactttacgtaatcatcctgagtacctagaagcctctgttttgtctcccgatgatcagataaatcagttaacccactacgagccagtgatcggcatcatgggtaaaactggggcgggaaagagtagcctttgcaatgccctgtttgccggtgaagtatcgccggtcagcgatgtagcggcctgtacacgtgatcctttacgctttcgcctgcagattggagaacactttatgaccatcgtggatctgcccggcgtgggcgaaagtggcgttcgcgataccgagttatctgcgctgtaccgcgaacaacttccccggctcgacctgattctgtggctgattaaggctgatgatcgggcactggcgactgatgagcatttttaccgtcaggtgattggcgaagcataccggcataagatgctgtttgttatcagccagtcagacaaagctgaatccaccagcggtggaaatatcctttccacagagcagaaacaaaatatcagccgcaaaatctgcctgctgcatgagctattccagcccgtgtggtctgtgtgtgccgtgtcggttcgcctgcagtggggactaaggcagacgaccaatcagagtacttttgccgtcatcgacgctaccacaggtcagaaaacgcagcaggcttttatgttgttgcgcaatcatccaggcttcgacgccgccttcattggcgatttgttgtgcaagaaaaccttgccagatgccaaaccgttgcctctcagcaacgaacagatgaagcaaattgaagatctgacccgcgaggcgatgggcttttctgaaaaacgcggtgactcgctcaatgtcgttaactcgccgttcaatagcagtgacgaaagcggcggagaacntccattctggcaacagcaagcgtttatcgatcagttacttgctgccggtcgctggttgctggtactgctggtggcgtggctgctgtggcggaaagcggtacgtccgcagctaacacgtcgcgctgaggcgatgaaagctgtacagcaacaggcgcaggcccgcgaggaagtggaagatgcggtggaagtccgcctgagcaaagacgaacaactacaacaacggcgcgctaaccaacgtctgggggcagaagtcatgagccagcgtatccgtgaaatgtctgataacgatccgcgcgtggtggcgctggtcattcgccagtggataaataacgatcatgacgtcatcctgctgatgaccattggcgaagaccgggcggcagagggaacaactggcaggactggcgaaacgcatccatcgctgacactgcatcaggatccggtgtatgtcacccgagctgatgcccctgttgcaggaaaagtcgccctgctgtcgggtggcggcacggaacacgagccgatgcactgtggttatatcggtcaggggatgctttcgggggcctgtccgggcgaaattttcacctcaccgacgcccgataaaatctttgaatgcgccatgcaagttgatggcggcgaaggtgtactgttgattatcaaaaattacaccggcgatattcttaactttgaaacagcgaccgagttactgcacgatagcggcgtaaaagtgaccactgtggtcattgatgacgacgttgcggtaaaagacagtctttatactgccgggcgacgcggcgttgccaacaccgtattaattgaaaaactcgtaggcgcagcggcggagcgtggcgactcactggacgcctgtgcggaactggggcgtaagctgaataatcaaggccactcaataggtatcgctctcggtgcctgtaccgttcgctccgcgggcaaaccttcttttaccctggcggataatgagatggagtttggcgtcggcattcatgctattttgaaaggcgatattcccgaagcggaagctattcttgccagcattaaaccggcaggcgtggtcagccgtgccgatgtagtgctgcctaaccagttccaggcgctgcgtaaaagttttattccagagcgcccggtgccggtaatggttactcgcctgtttgagctaccggttcaaatctcgctgggcgtttactcgctcgaacgtccggcaaacccgcagccaattgcctatctggtactacagccgcgacgtaaagccaataaccagaatgccagcaccagcgcaatcattagagctaccattggtgagccgatcagctgtagcgtaccaagcaggggatgcgaaggcggcatcagtgttgcggaaaccgtacccgccatgataatcgcgataggaataacaattagcgagggcctggatgcgcggtaccgccacgtgaacagtgagcatgatcccagcgacaggcaggccaaatttgagtggcgatattttggcaaccttggcaaaaccgtaaatgattggcgcaagaataataaagccgacatcaaagaagacgggaatagacgctgcaggcatactaaccaaccgcattgccggattgaggctgtagaatatgacgatggacgattatgcccgctacatggagcacataggggccagtcgagcgatggtgagcttgttaagccaaccgttaaaactcaatcgctcgccgtacattattctatcggcaaattacgtcatcggccaaatcatggcgcagtatattaccagcgactccggtctggaatgggccttatgaacgcatttgattcgcaaaccgaagattcttcacctgcaattggtcgcaacttgcgtagccgcctggcgcgtaaaaaactctccgaaatggtggaagaagagctggaacagatgatccgccgtcgtgaatttggcgaaggtgaacaattaccgtctgaacgcgaactgatggcgttctttaacgtcgggcgtcttcgcgctggcagcgttaaaacgcaaaggtctggtgcaaataaacaacggcgaacgcgctgcgtctcgcgtccttctgcggacactatcatcggtgagctttccggcatggcgaaagatttcctttctcatcccggtgggattgcccatttcgaacaattacgtctgttctttgaatccagtctggtgcgctatgcggctgaacatgccaccgactctagagatccccggtaccggcccaaattctattccatctcgagatcagtaccggtcagcgacaacattactctgcagcagcttctgctttctctgaacgatcaaccagctcgatgtaagccatcggcgcgttgtcgcctgcacggaagccacacttctcgctacgagtgtaaccaccggcacggctcgcgaaacgcgggcccagttcgttaaacaggacctggacgcccgtgctgtgttctcgggcgatgcagcagtttaccggtatgaacatcatcatgtactgacgccgcgtatcttcaaaatggcgggctttacgaccacagaacaacagatgattgcgactctggtcgtagggctgacctttatgttcgccacctttattgcggtgtttacggtagataaagcagggcgtaaaccggctctgaaaattggtttcagcgtgatggcgttaggcactctggtgctgggctattgcctgatgcagtttgataacggtacggcttccagtggcttgtcctggctctctgttggcatgacgatgatgtgtattgccggaatatgcgactgagcgccgcgccagtggtgtggatcctgtgctctgaaattcagccgctgaaatgccgcgatttcggtattacctgttcgaccaccacgaactgggtgtcgaatatgattatcggcgcgaccttcctgacactgcttgatagcattgcgctgccggtacgttctggctctacactgcgctga

SEQ ID NO: 140313 - DNA, 1938 bp, Homo sapiens
ttactcgcgcagacgattaacggtgttcgcagttatgccggtccatttgaacggacgcttcatgttttcgatagcgtcgatgatgtcgtggtgaaccagctgttcgttctggatacctacacaacgaccgccgtaacctgcgattatcgcaaggtcaaggcaaagtccggtaatggcgttctgaataccagagatattctctggcgaaacccaccttaaggtttcaactttatcgaagccgactttttccatctcttctttaatacgatgtactacgcgtttctcgtcgcagctttcactgggaatagcaaccatgtcgcacaggaagcgagtcatatccgctttaaaatcgctgtccaggttgtcagcgaattctttggtgttcgcaaaccaggtagagcgatcatcactcacaaacttgggctgcacgcgctgttctggatgatcgctattctggcaacgaccggcattgcgttgaccatttgggttgtgcccaacagtagcactcacgtacttaatcgtgagtccggaatggtgaaaggcagtttcagtaaagtgctggcggaaccgcaggctgactttgatgacttcgccgatttgtacaaacagcggaactttaaccacagcgccagtagacagggtagcccaggtcaccttccagtccccggaatgcctgcaacacatgcggctcacgattgccttgcgatatttccgagttgccttgagcaggaggttactggtatatgctagtgtttgtttcaccttctcggggtgagttgaggccttccccaccagaactgaaaaggcacaagaggtgacaaaggtgctactaaaagacatcatatcaaggtttgggttgcctttaacccgcagctggcgaacgtcaaagcggtggatgatatctacccgatgtatggcgatctgcaaactaatccccctggcctgaaaccgcaggcgggcagcgtattgctggccccacgcctgatggcactgcttaacctgaaaacgggcgacaccattgacgtgggcgatgccaccttgcggattgccggagaagtgattcaggaaccggattccggttttaaccccttccagatggctccgcgtctgatgatgaatctggcggatgtcgataaaaccggagccgtgcagccggggagtcgggtcacctggcgttataaattcggcggcaacgagaaccagctcgacggggtctggaacaggacgaaggcgcgctggggcgatcgatggaacgctcgcaacagttcctgctgctttcggcgcttctgaccttgctgctggcagtggcagcggtggacctgcaggcatgcatgacacgcggataaggccagatcgaggttcgctttccataaagtttccagcgtacccacatcgcgccaagtacggctcggcatccgggtcggattgtacgcaagagagcgggaacgggtgcgcataggccagaccggcttcggtgatcttgggaatcaaatctttgccaaagtcgtggctggagttctcatcgcgatcgtcttcttccagcagttcatacagatagtcggcgtcaaagacgtagatacccatactcgccagagatttgctcggatcgttcggcattgacggcgggttagcaggtttttcaacgaattcgataattttatcgttctcatcaaccgccataacgccaaatgcggaggcttcttcaatcggtactggcatacaagcaacggtgcaacgtgcgcctttttcgacgtgatcgataagcatacgcgagtagtcttgcttgtagatatggtcgcccgccaggatcaccacgtattccgctttataacggcggataatgtcgaggttttgggtgaccgcatctgcggtgccgcgataccagttttcccctttcattctctgctgtgctggcagcagatcgacaaactcgttcat

SEQ ID NO: 140314 - DNA, 2323 bp, Homo sapiens
tatcactctgattacgcgattcctgtccgtcgccgtacaacggcgtgaccgctgaagccctggcgatgcccgccataatctgattgcttctaacgatcacagcggcgcgtcccatggcagcgtaaaaacctacatgacaggctttatcctgtcgatcattctgacggtgattccgttctggatggtgatgacaggagctgcctctccggccgtaattctgggaacaatcctggcaatggcagtggtacaggttctggtgcatctggtgtgcttcctgcacatgaataccaaatcagatgaaggctggaacatgacggcgtttgtcttcaccgtgctaatcatcgctatcctggttgtaggctccatctggattatgtggaacctcaactacaacatgatgatgcactaagagcggcggttatgatgtttaagcaatacctgcaagtaacgaaaccaggcatcatctttggcaacctgatctcggtgattgggggaatcctgctggcctcaaagggcagcattgattatcccctggttatctacacgctggttggggtgtcactggttgtggcgtcgggttgtgtgtttaacaactacatcgacagggatatcgacagaaagatggaaaggacgaagaatcgggtgctggtgaaaggcctgatctctcctgctgtctcgctggtgtacgccacgttgctgggtattgctggctttatgctgctgtggtttggcgcgaatccgctggcctgctggctgggggtgatgggctttgtggtttatgtcggcgtttatagcctgtacatgaaacgccactctgtctacggcacgttgattggttcgctctccggcgctgcgccgccgggtgatcggctactgtgcggtaaccggtgagttcgatagcaacgcagcgatcctgctggctatcttcagcctgtggcagatgcctcactcctatgccatcgccattttccgctttaaggattaccaggcggcaaacattccggtattgccagtggtaaaaggcatttcggtggcgaagaatcacatcacgctgtatatcatcgcctttgccgttgccacgctgatgctctctcttggcggttacgctgggtataaatatctggtggtcgccgcggcggttagcgtctggtggttaggtatggctctgcgcggttataaagttgctgatgacagaatctgggccgcgcaaagctgttcgggtttctctatcatccccatcactgccctctcggtgatgatgtccgttgattttatggtaccggactcgcatacgctgctggctgctgtgtggtaaccacaccctctctattaaaaaggtgctacggcaccttttttattagcattagaaacatatccctctcgaaatatttactaaaaaatccgcatgtttaccccattcgtttgccgctttacactagtcgcgaatttaaaacagaggtggtaatgaacgattataaaatgacgccaggtgagaggcgcgcgacctggggtttagggaccgtattctcgttgcgcatgctgggcatgtttatggttctgccggttctgaccacgtacggcatggctctgcaaggtgccagcgaagcagtaatccggtattgccattggtatttatggtctgactcaggccgtttttcagatcccgtttggcctgctttccgaccgcattggtcgcaaaccattaattgtcggtgggctggcggtgtttgccgccggtagcgttatcgctgcgctttccgactccatctgggaaattattctgggccgggcgctacaaggctctggagcaattgccgccgccgttatggcgctgctttccgatctcacgcgcgaacaaaaccgcaccaaagcgatggcgtttatcggcgtgagctttggcattacctttgccattgcgatggtgcttggcccgatcatcactcacaaacttgggctgcacgcgctgttctggatgatcgctattctggcaacgaccggcattgcgttgaccatttgggttgtgcccaacagtagcactcacgtacttaatcgtgagtccggaatggtgaaaggcagtttcagtaaagtgctggcggaaccgcggctgctgaaactcaactttggcattatgtgtctgcatattttgctgatgtcgacgtttgttgccctgcccggacaactggctgatgcagggttcccggcggctgaacactggaaggtctatctggcgacaatgctaatcgcctttggctcggtcgtgcctttcattatttacgctgaagttaagcgcaaaatgaagcaagtctttgtcttctggtcttag

SEQ ID NO: 140315 - DNA, 5622 bp, Homo sapiens
tcaaaaaatgtctaacagcactatgcatttgacaaggatatacacataggccattgtgttttgtttgctctcaagtccattcctcattcttccacctttaggctgcatttccacaggtcccttgccaactaccttccggttaggtttgactaatggaagcgctggttggacttcagatagcctggggttgaaggccaacatctgaggatcattaggatctaccacagaaggatatggctcgaaaatcacaacttttctaggagattccaacgcagacctacacatggatactagtagatctaccaccttgggcagtatggctattttcacgaaattgattcttcctatccatgaccatggaatattcttccatttgtttgtatcctcttttatttcgttgagcagtggtttgtagttctccttgaagaggtccttcacatcccttgtaagttggattcctaggtattttattctctgtcctccgtaataaaattcttcggaatcattgtcaccttcagaatcttcctccactgtactattctgtcttgattcctgcaatcgtgtattagaagcaacaaccagaccattcctcaggatggagtgccagttttcaatgtgtgagccatttttcagctgatgtcccaatccaaatcgctcttttgtggaaatctgaaagacatcaacagtgggcacaacagtgtgaaagtgttcctgttgagtcacatcctctccatgcacctgttgtttcctgactttgtaatgtggaattctaagtggctcccagggtttgaaaagcaaacacacacagctcccgttcacatacggtaggcagatttcttcaatctccatatcgaaacgccagctcggcgcaactgcctgccattcgtctttgccttcggtcacttcgcagccgagacgacgcagaatgtcagttacctgctcatccgcaatatgatggccgatcaggcgatccagtttgctacgacgtagagtgatggttgcacgcttcggcagcgttgcttcgttggtgatatcaattaccgggccagcctcaccaccgcagatgtcgatcagcagacgggtcgcacgttccatcgctttgtgctgcagtgccggatcaacgccacgctcataacggtgagacgcatcggtatgcaggccatgacgacgagcacgaccggtgatagacagcgggctaaagaacgcgcattccagcagcacgttttgtgtttcgtcattcacgccagagtgttcgccaccgaagatgccgcccatcgccagcgccttgttgtggtcggcgatgaccagagtgtcagcattcagcttcgcttcagtaccgtcgagcagcaccagcgtttcgccctctttcgccatccgcaccacaatgccgccttcaatgcgatctttatcgaaagcgtgcatcggctggcccagttcgagcagcacatagttggtgacgtcaacaactgcatcgatagaacggatcccgcaacgacgcaatttttctttcatccacagcggagttggcgccttaaccgttaatgccacacggccaagataacgcgggcaggcttccggcgcttcgactgtaatcggcagcgtgtcgtcgatggtcgcaccaaccggaacgatttccggttgaaccagcggcagctggttcagcacggcaacgtcacgcgcaacaccaatgatgcctaagcagtcggcacggtttggcgtcacgctgatttcgatggtgttgtcatcaagtttcaggtattcacggatatcggtgccaatcggcgcatccgcaggcagttcgataatgccgctgtgatcgtcagaaatgcccagttcagagaaggagcacagcatcccttcagacggttcgccacgcagtttcgccgctttaattttgaaatcacccggcagaacagcaccaatggtcgctaccgctacacgcaggccctgacggcagtttggcgcaccgcagacgatgtccagcaggcgatcgccgccgacattcacttttgtcacacgcagtttgtcagcgttcggatgctgcgcacactcaaccacttcaccaacgaccacgccgtggaagctgccggcaaccggttctacaccgtcaacttccaggcccgccatagtgatttgatttgccagcgcatcgctatcaatcgccgggttcacgggatcctctagaatacatccccactggttaagcagaagaccaagttggcctctgaaagaagtaagcgtaggagcagtggcactaacaaatgccttttgtctgctgtgcagaggcaccgtggattgcatcgtgttagtaggaaggggtcgcttatttctccataaagtaaggtgaccagccatacaggctgaaaatatgacccgtggaacaaccggcgtgtgtgtgctggcagaacaagcgggcgctaacgtccacgtaattgatgttggtattgcgcgatgagcatcgtgtgctgcaatgtgatccccgccaagagtatggcgattgactatcaggaagggatcaagaatccggtaggactttcgggcgtgcggatgcagggcaaaagtgcacctgatcacatgtcgaccaaccggaagtaattggcggaaaaacatcgtcaaagcggttgaacgttgtggggcctttggcacgccgccaagcgacgccgaagcgattaaagttcgcacacgggttgtgcgctgggttccatcgttggaaaagatgagagcgtggaagtgccgagcgtaggtgtcgtccgccggagtctgcaacgtcagctggcagaggtacacgcgtctgcgtagatgatgacgggctgggtgagaagctacgtactgtgctgctttgattttacgcagcaggtcagacgcgtcacggccaatgccttcagcggtaacttcgattgcctggatgataccctgcgggtcaacaacgaaggtcgcacggtcagccagaccttcatcttcacgcatgttgtcgaagttacgggtcagggcgccagtcgggtcgccgatcatcgcatatttgattttagcgatggtttcagagctgctgtgccatgctttgtgggtgaagtgagtatcggtagatactgcgtatacgtctacgggatcctctgcacaggagtgttttggtttcaggtgaacataagcgccatccgacgtttcagcgtgagtctccggcaaatacaggaggtttacaatgaaacgcgcgtctttgctcgtcacggacagcgtatcggtcgtcgtagcgactggaaaaaagcttacgtcaccctgaaagaaggccagaatctggacttcgttggcggcgagatcgccagagagattttccagccctttcaactgttccagcgccgcgcgcattttctcctgacgtttggcatcgtaacgtttcaggcgaatcagcggttcaatcagacgtgaagccacctgcgggttacggctgttgaggtcggtaagcatttccaccaggaacaggtaaccgctgccatcttcggcatggaacgctgccggattgctgcccgcaaacgcgccaatcaacgaacgaatacggttcgggttgctcatggtaaatgagcgatgctgcaacaggccgcgcaccgtctccagcacattcgccgccgggataggtagtgttttctcaatttcaagacactgctgctggtccatctgtttagacgggttttcctccgcatcagactccggcatcgcaaactgcacccggtcggtcttggagggccagtgaataaagccgcttatgcattctgcctgggcgcaatggcgaacggcgtttacggcccgtatgccattttcgcctccgtcaaaatggtttcggcatttaccgtaaccgcttccacgatgctcgcaccgcgcctggctgttagggctggcaggtattaccgaaggggcgatcccgatggcgattgaagatccgctgcgggttattggttcgtttgtgctgggctctatggtaacgggcgctattgtcggtgcgatgaatataataaatcgcacgctcagggtcgaagcgagcgtaacgagtgcgcaaatcgtacaaacaatcattcgattacgacgataggttttaatgatccgttgtgctttttgcatgcgggccacctggactttgattgccagaccaccgcgtgaggtttcgcggtatttggcgttcatgtccttaccggtttcgtacatcgtttcgatgaccttatccagcgagacgcgcggtgcactggtgcggcgcagagccatccgcgcggcgttaatcgccttcacagaggcaatggcattacgctcaatgcacggcacctgaacctgccctgcaaccgggtcgcaggttaaaccaaggttgtgttccatgccaatttccgccgccacgcaaacctgttccgggctaccgcccagcagttcggcaacctctgttctcatcaggtcaccctccagacggacgaatccatagctgccgctgctttccggcgtggccccacgggcaataccgccattgttatcgtgaccgagatgacccccctgaatgctgagacggacgctgttgttttcaccatttacaccggtctgatggctgcgggagcctgccacaatccggtcatagtcccttgcctgtgtcagcatggaggcatacagggggacttctgcacgataagcattttcactgcgcagataccagctctcatcactgtcccggttgagggagtagttaaaggcaccggcctgcagcctgttcccctggacaaaggccccttcctccgtggtggcaccgttaatggcttccaccacctgaaaaccctggaccgccatcttcatgaacccggcgtggccttcacctccacccgtgcagcacgggaatggctgattctgaacatggaactcgacgttcgtaccccacgctttcgcgccaatcttacgcgctgcttcttcggcatcggctttaatcttcgccttacgttcttcgtaatcggcgatgactttcccacgctcacgcagaatttccggatactgatcggcgttatcgatggtgaattccggctcgcccataaagcggtggccgcgaatcacgcgatcggactgaatgcccagaatggttgccggaatgactttgtcgcccagcagcagggtcacggtgtgcaccggacgcacgaagtgcacgtcgcttgcgccccaacgcatcagtttcgggatcggcagtttcgccagagaagtcgcaaccatattcggcagcagtgcttcggtgctttcgcccttcacatgggcgcgatacagcagccattcgcctttatcggtagtcagacgctcagcctggtcaacggtaataccgcaaccacgcgcccaaccttctgccgctttgctcggtttgccttcagcgtcgaacgcctgggcaatcgccgggccgcgtttttcgatttcacgatccggttgcgcttccgccaggttagctactttcagcgccagacgacgcggagcagcaaaccattgaacggtgccgtgtgcgaggccagcgttatccagctccgcagtaaagttcgcagcaaaggactcagccaggctgcgcagtgcttttggtggcagctcttcagtgccgatttccaccagaaaagttttctcagacat

SEQ ID NO: 140316 - DNA, 2128 bp, Homo sapiens
atgaccaggctgcaggcaacagtgactgatggaaacggcaacccgttagccaatgaggcggtgacattcacgctaccggcagatgtgagcgcaagctttactctcggacaaggcggttccgccattactgatatcaacggcaaggctgaagttacactgagcggtacaaaatccggcacctaccccgtgacagttagcgtgaacaattatggtgtcagtgatacgaaacaggtgactttgattgccgatgctggtaccgcaaaactagcctccttaacctctgtatactcattcgtcgtcagcacgaccgagggcgcaaccatgacggcaagcgtcactgacgctaacggcaacccggtagaaggcataaaagttaatttccgcggaacctccgtcacgctaagcagcaccagcgttgaaacggatgatcggggtttcgctgaaattcttgtgacaagcaccgaggtcggactgaaaacagtttcagcctctctggcagataaacctactgaagtcatctcgcgattactgaatgccagtgcagatgttaattctgcgacgattaccagtctggagataccggaagcgcgtgatagcgctcgccgtccaccagataacgccctttacatagcgtcggataacctgcgttttcgccgtcctgataacggtcgatcagcacttcgttcaggcgggattccagcccctgcggcgtttgttgccagcgcacgaaacgggccggagaacacgcgcctatggtgttgggcgactcacccgtcagatacgacgacagatagcaacgaccttccgacataatgcacaggctgccgaaagcaaagacttccagtggtacagggctttgcggctggacttgccgccaacatgatcggctccgggtttctcggcgcggtcgttggcggattgatagccggttacttgatgcgctgggtgaaaaatcacttgcgtcttagcagtaaattcaatggattcctgactttttatctctacccggtgctcggtacgttgggagcgggcagtctgatgctgtttgtggtgggggaacctgtcgcctggatcaataactcgcttaccgcctggctgaacggtctgtcaggaagtaacgcgctgttgctgggtgccattctcggttttatgtgttcctttgaccttggagggccagtgaataaagccgcttatgcattctgcctgggcgcaatggcgaacggcgtttacggcccgtatgccattttcgcctccgtcaaaatggtttcggcatttaccgtaaccgcttccacgatgcttcgcaccgcgcctgtttaaagagtttgaaattgagaccggggaatccaccttgctgttagggctggcagatattaccgaaggggcgatcccgatggcgattgaagatccgctgcgggttattggttcgtttgtgctgggctctatggtaacgggcgctattgtcggtgcgatgaatatcggcctttcgacacccggtgccggcattttctcgctctttttacttcatgataatggcgcgggcggtgttatggcggcaattggctggtttggcgcggcattggtgggggctgcaatctctgaaggaaaacggatcttcaggtacagggacctcataatcgtaaatagcaaccagctctttttgcacgatcatcgctttccccgctgggaagggctggagtcggtctttttcctgctggcggcatttcaacaagatgtcgggatctggccgccgctgggtgcaatgctcggtcttgctactgccgtggtgctaggcttcctgctctactggggcggtattcgcctcaatcttggtgcattttttaaatggaccagcctgtttattctcttcgtcgccgcagggctggcagctggtgccattcgcgcatttcatgaagccggattgtggaaccactttcaggaaatcgccttcgatatgagtgcggtgctctcaactcactcgctgtttggcacgctgatggaagggatttttggctatcaggaagcgccgagcgtcagcgaagtcgccgtctggtttatttatctcatcccggcgctggtggcatttgctctgccaccacgcgcaggggcgacagcgtctcgctccgcgtaa

SEQ ID NO: 140317 - DNA, 525 bp, Homo sapiens
atgagcggctacgtttacaacctcggtaacgagctggcatccatgcagggcctggttgatgtggtccgcctgtcaccgcagggttcttcagcgcgagaagcattctcccactctctcgatctcgcccgtctggctgaaaagcgcggctatcatcgctactggctggcagaacaccacaatatgactggcattgccagtgctgccacgtcggtattgatcggctatctggcggcgaataccaccacgctgcatctggggtctggcggcgtgatgttgcctaaccactcaccgttggtcattgcagaacagttcggcacgcttaatacactctatccggggcgaatcgatttggggctgggtcgtgctccgggtagtgaccaacggacaatgatggcgctacgtcgtcatatgagcggcgatattgataatttcccccgcgatgtggcggagctggtggactggtttgacgcccgcgatccaatcttagagccgacacataacgggcgtcgattgtgctctacagtt

SEQ ID NO: 140318 - DNA, 700 bp, Homo sapiens
atgaatgcccgctcgaaaactgtggtgcgttatcaaaatcaggcgctttcgcagctggtgcaaaaggccgtgccacgtaactacgatgattcgctgccgggtgacagtaaagcattcctcgcgcaactctcgctgcccgcccaactggcaagccagcaaagcggtgtgccacatcatttgatcctcgctcaggcggcactggaatctggttgggggcaacggcaaatccgccgcgaaaacggcgagccgagctataacctgtttggtgtcaaagcctctggcaactggaaagggccagttactgaaatcaccacgactgaatatgaaaacggcgaagcgaagaaagtaaaagcgaagtttcgcgtctacagctcgtatctggaagccttgtcggattacgttgggctgttaacgcgtaacccgcgctacgccgccgtgacgaccgccgcgagtgcggaacagggggcgcagcccctacaggacgcgggctatgccaccgatcctcactatgcccgcaaactcaccaacatgattcagcagatgaaatcgataagcgacaaggtaatttgccccgaacagcgccacacctgctgcgcctgcaccgccaaggttgtgagaaatattccagaaaccgaggaatgtcccgcgtttacgacgcggcgtccatttggtgatggtggagtaactgcacgaaccgccg

SEQ ID NO: 140319 - DNA, 1431 bp, Homo sapiens
atggtcaaccccaccgtgttctttgacacggagcccttgggccgcatctcctttgagctgtttgcagacaagtttccaaagacagcaggaaactttcatgctctgagcactggagagaaaggatttggctataagggttcctgctttcacagaattgttccagggtttatgtgtcagggtggagacttcacatgccatgatggcactggtggcaagtccatctacagggagaaatttgatgacaagaacttcatccggaagcatacagtttctggcatcttgtccatggcaaatgctggacccaacgcaaacagttcccagtttttcatctgtgctgccaagactgagtggttggatggcaagcatgtggtcttcagcaaggtgaaagaaggcatgaatattgtggagaccatggagtgctttgggtccaggaatggcaagaccaagggagctgggctagcaggcagccactctcaaagatggctggctgcatctgtgtgcggtgcctctcagccaagcagactcctctcaactgcgtgccggcagcaaaaactccagatttctggtcgctccaaaggctgttctagaaaaacctctggtctggaggaccaaggcctaactaaagatggtacaaacaacacacagggcatcaagcttcagcttggtgaagaggaggagcatagcccacgtcccagctcccttgtccccgtgtcacagctcaaggctaacggcagctctagtgccagcattgcttgtgctgaggatgggccagcacgtcctgtgcccgggtgccagtgtcagaatcaagggcaccatcaaaataagaggccaaggacttctcagctatgccaaatgccaaagacgcatcttgttgtggcggatgcccggcccaacatcagccgggttttttttggccttccggagcgggaatccgcgctttggagctttcccagagactggctggtgaatctgcttaatcagtgcgatgagctgggcattcgtaaccagtttgaagtggaagtcctgagctacggtcatctgccgctggcctactccgcccgctgctttaccgcgcgttcggaagaccgcccgaaagatgagtgtgaaacctgctgcattaagtatccgaacgggcgcaacgtgctgtcgcaggaaaaccaacaagtgtttgtactcaatggcattcagaccatgagcggctacgtttacaacctcggtaacgagctggcatccatgcagggcctggttgatgtggtccgcctgtcaccgcagggtactgacactttcgcgatgctcgacgccttccgcgctaatgaaaatggcgctgcaccactgccgttgacggcgaacagcgactgtaacggctactggcggcggctggcagactttgagtgcacctgggcccactcccaagggggctgtcatgcatag

SEQ ID NO: 140320 - DNA, 1281 bp, Homo sapiens
atgcgggtgttgccggtacttgtgggcggcgtcctttctcgcgtttccttcgtcgtcatcatgatgcttcgtcctgccggcctcgtggtccgtttccggcgttccttggccgacgaccggagtaatcaatacgttcatcttcatacagtgacgggcattgacataccagcgtcagccaatctgcgcccgaatgcgaaaatcctcaacatctgtgacatgccaatcggtattgaaagccggatggcgcaaataacgcgatcaactggtgagcgaattaaaccagatgttggtgtagaagtcagcgttcaggatggcggcacttataacatcacgatggccaatggttactcactggttcagggaagtacggcgcggcaactggcggcagttccttccagcgctgacccttctcgtacgactgtcgcttatgttgatgggacggcaggcaatattgagatcccggagaaattactgaataccgggtcgctgggcggcattctgacattccgttctcaggatctggaccagacgcgtaatacgcttggacaactggcgctggcatttgccgaggctttcaacacccaacacaaagccggatttgatgctaacggcgatgccggtgaagatttctttgctatcggtaagcccgcggttctgcaaaacacgaaaaacaaaggtgacgttgcgatcggtgccacggtaactgatgcctccgcggtactggcgacagattacaaaatctcgttcgataataatcagtggcaggtcacccgccttgccagcaataccacttttacggtgacgccggatgccaacggtaaagtggcatttgatggtctggagttgacgtttacaggaacgcctgccgttaacgacagcttcacgctgaaaccagtaagtgacgccatcgtcaacatggatgtattaatcaccgacgaagcgaaaatagcgatggcgagcgaagaagatgcgggtgatagcgataaccgcaagggtcaggccctgctggattcggaaagcaacagtaaaacggtgggcggggcgaaatcctttaaagacgcttatggctcgttagatccccagtggtcaggcccgcgatttctttaccgaacagatgatgaaaaacgtcaggatgtggtggcgaactttaacggtctgagcgttattgccaaccgggaagctattcgttcaggtgatgatttgctgggggccattatcagctttcgtagtaaagacgaaatttccaccctcaatgcgcaagtgacgcaaataaaacaatga

SEQ ID NO: 140321 - DNA, 2475 bp, Homo sapiens
atgctgatccagcgccgcaggctggcgtttgatcgggcgaagcatcgccgggcagagatgttagcgcaacgtgcgcgtggcgaagaggaagcgcatcatcacagtagcccggaaggagcaattgaagtcgatgaaagcgaagtcgatctcgatgccatcagtgcgcaatccttgcggctggtgcgctcaattttgatgttgatcgccctgctttctgtcattgtgctgtggtcagaaatccattccgctttcggcttcctcgaaaatatttcgctgtgggatgtcacctccacggtacagggcgtagaaagtctggagccaattaccctcggtgcggtgctgattgccattctggtgtttatcatcaccacgcagctggtgcgcaacttgcccgcgctgctggaactggcgattttgcagcacctggatttaacgccgggtacgggttacgccatcaccaccatcaccaaatatctgctgatgctgattggcgggctggtcggcttctcaatgattggtattgagtggtcgaaattgcagtggctggttgccgcgctcggtgttggtctcggttttggtttgcaggaaattttcgccaactttatctctggtctgattatcctgttcgaaaaaccgattcgcattggcgatacggtgacaattcgcgatctcaccggtagcgtgacgaaaattaacacccgctgccacacccaccgcaggcagcagctgctgcttcagcaggccgccaccagcagcgccgacgtgatttatcttggtgaagcggtatgcagcaagcgtcgggcaaccaaagttggcgactggctggagatggcaaaatcgctcgccgggagtggtaagcagattgtgctctccacgctggcgctggtgcaggcatcatctgaactgggcgaactgaaacgctatgttgagaacggtgagtttctgattgaagccagcgatctcggcgtggtgaatatgtgcgctgaacgcaaactgccgttcgtcgccgggcacgcgctgaactgctacaacgcggtgccccctgaaaatattgctcaaacagggcatgatgcgctggtgtatgccagtggagctttcccgcgcctggctggtgaatctgcttaatcagtgcgatgagctgggcattcgtaaccagtttgaagtggaagtcctgagctacggtcatctgccgctggcctactccgcccgctgctttaccgcgcgttcggaagaccgcccgaaagatgagtgtgaaacctgctgcattaagtatccgaacgggcgcaacgtgctgtcgcaggaaaaccaacaagtgtttgtactcaatggcattcagaccatgagcggctacgtttacaacctcggtaacgagctggcatccatgcagggcctggttgatgtggtccgcctgtcaccgcagggtactgacactttcgcgatgctcgacgccttccgcgttaatgaaaatggcgctgcaccactgccgttgacggcgaacagcgactgtaacggctactggcggcggctggcaggactgagcttgcgccagatcaagacgtgcctgatcttcctgctctgccagccacgggggcgcaggccctacaggacgcgggctatgccaccgatcctcactatgcccgcaaactcaccaacatgattcagcagatgaaatcgataagcgacaaggcggcgttaaatacggcaagtaataatatctccagctataacgttgccggatatacccgccaaaccactattatggcgcaggccaatagcacgttgggcgctggcggctgggttggcaatggtgtctacgtttctggtgtgcagcgtgagtatgatgcgtttattaccaaccagttacgtgcggcgcagacgcaaagtagcggtctgactgcccgctatgagcagatgtcgaaaatcgacaatatgctctccaccagtacctcttcgctggcaacacagatgcaggatttcttcaccagcctgcaaacgctggtgagtaacgcggaagacccggcagcgcgccaggcgctgattgggaaatcagaaggattggtgaatcagtttaaaaccaccgatcaatatctgcgcgaccaggacaaacaggtcaatatcgcgataggtgccagcgttgatcagatcaacaactacgctaaacaaattgccagcctgaacgatcaaatctcgcgcctgacaggcgtgggggcaggggcgtcacctaacaatctgctggatcaacgcgatcaactggtgagcgaattaaaccagattgttggtgtagaagtcagcgttcaggatggcggcacttataacatcacgatggccaatggttactcactggttcagggaagtacggcgcggcaactggcggcagttccttccagcgctgtcccttgtagtacgactatcagtgtgtgctgactagggcgtcagccattattgagatctccgggtacggacattgaattcgta

SEQ ID NO: 140322 - DNA, 991 bp, Homo sapiens; identical to SEQ ID NO: 132024

SEQ ID NO: 140323 - DNA, 617 bp, Homo sapiens
atgtggcctggtatggtgactcatgctgttcgcatcccactgcacaatgacacagtcaccctgtccgacaatttccagcccttcgccggtacagatgccatgacaataacccgccctctggagatgcttcgcgacggtaaatgcccgcagccagattggatttcgtctgaaggagcatgtgctggaaacgctacagactccccccatccttttgaattaaaagcgggcaaaacaatcacgctggaagatggaaggcagattaacggcgcagattacttagctgctccagtgccaggtaaagcgctcgctattttcggcgataccggcccctgcgatgccgcacttgacctggctaaaggtgtcgatgtcatggtgcacgaagcgacgctggatataaccatggaagccaaagccaatagtcgcggccatagctctacacgccaggctgcgacacgagaatctgaactgttccgctacaccgtgaagcacagtctgatttttgccagcgttatcggcattatcaccctgctgcaggcgtctacgaagatctacactccaggccggaaagagcaaggggagcccatgacccctcgccgcacgccagcccgctttggtct

SEQ ID NO: 140324 - DNA, 1710 bp, Homo sapiens; identical to SEQ ID NO: 124845

SEQ ID NO: 140325 - DNA, 1222 bp, Homo sapiens
ctgttgtagcccgcagttatgggcaatatcggtcgctttcgaagaccagggagagatggtgccaggacgcggggtcaccagcaggagtttgccttgcggggcgtggctggcgagtgccgggccatatttcagcaggcgttcaagttgtgcgtgctcatcatcgtttaacggcgcattgaggtcagcaaaatggacaaccttgatacgacttctagctcggtacccaagcgtgatccaacggtagctaaagagatagacgtcgagtcgctgcatcagtttacgtacttcagttttgtccctgaaggttgaaatggcaccgatgataacgccattactgcgcaccggaacggtgttgatcagtaatagccggtctttaatcgtaatctcttcgtcgcggcgcggggtaccgtcgcgtaacacttccgagacatctaccacctgtgaccatgagtggcttagcgtcgacagtttctctatcgtcctgcgacttacggtaattcagcaattcttgtgcggcatcgttgatcagcgtgacctcgccgcgatcgtccacggcaacgacgccttctttgatagactgcaacatggcctggcgttgctcaaacagcgtggagatttcgtagggttccaggccgaaaaggatttttttcagtaccttaaccagaatgcaggtgccaatcagtccgaccagcatgccaaataataccgaccagataatgctccagcgactgtcattgatctgttgggtcacacggcttaactcaaggccgatcgccaccacgccaatttgtttatgattttcatcgtagatgggggtaaatacgcgtaaagcctgcgccagaaaaccgcgattgatagcgacattttcttcgccattcagcgctttaaggatgtcatcacctttaaatggctgaccaatacgctgggcttcaggatgcgagtagcgaagactttgcatatcggtaacgacaataaacagcagatcgttgcgtttgcgtacggcttccgcgatggcctggatgccactctcctgcggttttttctgcaagccctgacggatttccggcgagtcggcgagggtacgcgccactgccagtgccttgttggctagcccatctcgcgtcatatcactgatttgcgagaagtaaatcagatgcaccaccaatagcaccgagaacagtaccgcactgaccattaagatcactgtggtactcaatttcat

SEQ ID NO: 140326 - DNA, 2703 bp, Homo sapiens
atggaccacttggagaaagtctacgaatgcgagtcagagcccctggactgcaccacaggggcagagatcagtcctaagaggagagctgcggacgtgcggaggggcatcttgggggcacgtggaaagactggcggacgcacgaacccctatactcaggaatatggggtcacagggagaaggggagggggtgtccgaggcgacctgaacgcgaggatttggggcaaaaaggtgagaaacagttcccggggaagctcgctcggggagtttgggatgaaaagccagggcgccaaacagccggatgggactgagctgtctctggcgaatgcgtcctggatatgggtgccgttccttgccatcttcaccattgcggcgtggtttggcatgaacgatcttgctacctcgaaagcctccatcaaggagcagttgccggtactcaaacggggtcatctgtggattatgagcctgctgtatctggcaaccttcggctccttcatcggcttctccgcgggctttgcaatgctgtcaaaaacgcagttcccggatgttcagattctgcaatacgctttcttcgggccgtttattggtgcgctggcgcgttatgcaggtggtgcattatctgaccgtctgggcggaactcgtgtcacgctggtgaactttattctgatggcgattttcagcggcctgctgttcctgaccttaccgactgacgggcagggcggaagtgactctagaggatcccgggtccttcccggtgaaaccgacatcgccctgcccggcccgctgccgttcatcctctcccgcacctaccagcagttacccggacaaaacacgcccgcgcccggtggggagcctcggccccggctggaaaactgcctgcggatactccgcttaacagtgcgcgataacacactgatactcagtgataacggcggcagaagcctgtattttgagcacctgtttcccggtgaggacggttacagccgcagcgagtcactgtggctggtgcgcggcggcgtggcgaaactggatgaaggtcaccggtggccgcactctggcagcgctgccggaagaactccgcttaagtccgcatcgttatctggcgacaaacagtccgcaggggccgtggtggctgctcggttggtagcactcttcttagattatggtcttatgatatctattgcaataagaaagattttgccggatccggcagtgcatggctggacttcatttgttggcgttgatgacactaacccgtcgttgaacagtgcacgtttacaaatcaacctcaaaccgttggatgaacgtgatgatcgggtgcaaaaagtcatcgcccgtctgcaaacggcggtagataaagtgccgggcgtcgatctcttcctgcaaccaacgcaggatctgactattgatactcaggtcagccgcacccagtaccagtttaccttgcaggccacgtcactggatgcgctcagtacctgggtgccacagttgatggaaaaactccagcaactgccacagctttctgatgtctccagcgactggcaggacaaagggctggtggcgtatgtcaatgttgatcgcgacagcgccagccgtctggggatcagcatggcggatgtcgataacgccctgtacaacgcgtttggtcagcggctgatttccactatttatactcaggccaaccagtatcgcgtggtgctggagcacaacaccgaaaatacctccatggtcgcggcgctggataccattcgcctgaccagcagcgacgcggcgggtgctcgatccgccagcacaccgccgaccatcaggccaacaaacatcgcgccgccggtcagcgtcaccaaaagccccacctgccaggtggaatgtgtcatcatctggatttgcaccggcaccgcgacgccgagcaaacccagagacacaattgagatgaaacgagcgaggaatactgcgcgaaacgccggccctggtcaatccgacgcggttattcggcgtggtcagccgctggcgatcaccggagcatcaatcgccagcagtgagccggtcagggtgacgctggtggaaacaatacgctgcggctggctttccagtggagagggggcagaacggcgcaggacatcacattgcgcttatgctttacggcggaaaaaccacgtaggcagcggcggagttctggtgttctgtccgactttaccgccattacagatctgcccgatgctcagctcggctgcggaacaactgtgctcgcatgttctgccgctgtttgggctgtgccttggctggcctgcggataatccggatcttaagccgcgtttaccggcctccattttggtgcatgaaaacagctatcaaccgctggataaagcggcactggcgcagtatgacgagcaactggcggaatattacctcacccgtggcagcaataatcgccgggatacctggagcgatcatatccgccgaacaatcattaaagaaagccgcccatttattctggattatttgcacaaacaggccgctaccttggccggtgcacttcgcttaacggtcgatgccgtcattgtcccttggggcaatatcgcggatatcgctgacaacggcgatgccaactactacctgatggaagcctacaaacaccttaaaccgattgcgctggccggtgacgcgcgcaagtttaaagcaacaatcaagatcgctgacccagggtga

SEQ ID NO: 140327 - DNA, 1184 bp, Homo sapiens
atgggttgtttagacctaggagatggtcgggctgggagtgtcgctcgctattttcggcgataccggccaccctgcgatgccgcacttgacctggctaaaggtgtcgatgtcatggtgcacgaagcgacgctggatataaccatggaagccaaagccaatagtcgcggccatagctctacgcgccaggtactgaaaaaaatccttttcggcctggaaccctacgaaatctccacgctgtttgagcaacgccaggccatgttgcagtctatcaaagaacgcagtcggcgtcacaggttgcccaaagagaaaaagataatgacgccaaccattgaacttatttgtggccatcgctccattcgccatttcactgatgaacccatttccgaagcgcagcgtgaggcgattattaacagcgcccgtgcgacgtccagttccagttttttgcagtgcagtagcattattcgcattaccgacaaagcgttacgtgaagaactggtgacgctgaccggcgggcaaaaacacgtagcgcaagcggcggagttctgggtgttctgtgccgactttaaccgccatttacagatctgtccggatgctcagctcggcctggcggaacaactgttgctcggtgtcgttgatacggcaatgatggcgcagaatgcattaatcgcagcggaatcgctgggattgggcggggtatatatcggcgccctgcgcaataatattgaagcggtgacgaaactgcttaaattaccgcagcatgttctgccgctgtttgggctgtgccttggctggcctgcggataatccggatcttaagccgcgtttcaccggcctccattttggtgcatgaaaacagctatcaaccgctggataaagcggcactggcgcagtatgacgagcaactggcggaatattacctcacccgtggcagcaataatcgccgggatacctggagcgatcatatccgccgaacaatcattaaagaaagccgcccatttattctggattatttgcacaaacagggttgggcgacgcgctaaaaccgccacgtcgatgtatgatacgcgggcttttgaccaggtctgacagagaggtgcatggtgaaaattgccatattgtcccgggatggaacgctctattcttgtaatcgggctgcgggaagcccctatacagcgcgggcacccg

SEQ ID NO: 140328 - DNA, 1341 bp, Homo sapiens
atgggagaagaggccgtcgcctttgccattatcatcgcaccgctaatggtccggctgggctatgacagtattaccaccgtcctggtgacctatattgccacgcaaatcggttttgccagttcgtggatgaacccgttttgtgtggtcgttgctcaggggattgccggcgttccggtgctttctggctccgggttgcgcatcgtggtgtgggttatcgccactctgattggcctgatctttaccatggtgtacgcctcacgagtgaaaaagaatcctcttctgtcacgcgtgcatgagtccgaccgcttctttcgtgaaaagcaggctgatgttgaacaacgtccgtttacctttggtgactggctggtattgattgtcctgaccgccgtaatggtctgggtgatttggggcgtgatcgttaatgcctggttccagttcttcaccatgggtctggtgattggcatcatcggcgttgttttccgccttaacggcatgacggttaataccatggcttcatcctttaccgaaggggcgcgaatgatgatcgcccctgccctgctggtgggtttcgccaaagggattttgctgctggtcggtaatggtgaagcgggtgatgccagcgtgttaaataccatcctcaacagcattgccaatgccattagcggtctggacaacgcggtcgcggcctggtttaaaagtatcatgatccggtcattccagcacgtgtatacgaagagccgtcgtgccggaaccacccgcaatacgctgataaaaggaacggttcatcgccttacacataatgtaagaaaggatagcccccgaagaaccgaccagcgcaccggtcacaatcagcaggtcgttgctgagcataaagcccgcagccgcagccgcccagccggacaatgccagcacttgcaggccgacgctgtccgtgcgaacaaatacaatcagcagcaggaaggaaacgaccagagccgccaggttcattttgtgacggtttggcagcatcaatggtttagacgaaatcttgccacacagtttgccgaacgccaccaccgaacccgtgaacgttaccgccccgatgaagataccgaggaacacttccgtcaggtgaatattgaccagaatcggtgccattcccgcgtcatgatgcagatagctgttaaagccaaccagcactgccgccagacccacgaagctatgcaggatcgccaccagttctggcatttcggtcatttcaactttcttcgccagacggataccaattgccccaccaatgaccatcgccagcaagatccagccaacattacccgtatccggtccaaaaatggttgcgattaa

SEQ ID NO: 140329 - DNA, 1788 bp, Homo sapiens
tcattctgaccctgaagccagcggcccactgacacgcctccgcgccatggagcagcgccgcgtcaccgacttcttcgcgcgccgccgaacaccggggtcggtaccatccacagatcgccgctgaacgatagtgagaatgatcccctgcaccagttccggcagacgcacaaaagcaatggtgatattgcgcacatcgctggttaaccccgccagcaacgaggcgctaccgagttgttcaatgcgctcgacgtgagtatccagaatccgcggatgattatcagcccttaaatccagcacaggacagagctgtccggttcgcctctggttgccgttggccgaatgtgctcgctcactccacgggtgatttttgagcactgacgacgtgccagtgtgggggcaaggctcggggatagggcccaggacatgcagcaggtccctcctggagccagcaccctggggtgggaaggcgttcggtccacagccactctcaaatctgcagctgcacgtggtggagaagtattccgaaagtcctttgcttggaggcgtgttggtgagggctgaggatgagggcggagctaggtgcagagccagcgcagggttttccagacagcagtaactgcacgtgcagaggccctgaggtatggggcgcccgctgtgcttgaggaacagcagaggggtcagtgtgaagacatacccatgcacacaagccccccatgtacacaggcacaaccacgtatcggtatcagcaaagtcatcattgatctcgtccatttccagcacgatgtcatacggtacttttgcttcagccagcaatacgttcatatgtccaggcaaacgccccgcgaccgggtggataccgaaacgcacattaataccacgagcgcgcaatttctcagtaatttcagcgacaggatattgcgcctgcgcgactgccatgccgtaccccggagtaatgatcactgaatgggagtttttcagcagttccgctgtctcttctgcggtgatttcgcggtgctcacccacttcctgatcatcgccagtagaagagccgtcggtgccgaaaccacccgcaataacgctgataaaggaacggttcatcgccttacacataatgtaagaaaggatagcccccgaagaaccgaccagcgcaccggtcacaatcagcaggtcgttgctgagcataaagcccgcagccgcagccgcccagccggagtacgagttcagcatcgacaccaccactggcatatctgcaccaccgatggaggcgactaaatgccagccgaataccagcgcaattgcggtcattatcagcaatgccagcacttgcaggccgacgctgtccgtgcgaacaaatacaatcagcagcaggaaggaaacgaccagagccgccaggttcattttgtgacggtttggcagcatcaatggtttagacgaaatcttgccacacagtttgccgaacgccaccaccgaacccgtgaacgttaccgccccgatgaagataccgaggaacacttccgtcaggtgaatattgaccagaatcggtgccattcccgcgtcataatgcagatagctgttaaagccaaccagcgctgccgccagacccaggaagctatgcaggatcgccaccagttgtggcatttcggtcatttcaactttcttcgccagacggataccaattgccccaccaatgaccttcgccagcaagatccagccaacattacccgtatccggtccaaaaatggttgcgattaacgcaatcgccatcccggcgatcaccgaagttgttac

SEQ ID NO: 140330 - DNA, 972 bp, Homo sapiens
atggcgattgcgttaatcgcaaccatttttggaccggatacgggtaatgttggctggatcttgctggcgatggtcattggtggggcaattggtatccgtctggccaagaaagttgaaatgaccgaaatgccagaactggtggcgatcaagcaaaacttcgtgggtctggcggcagaactggatggctttaacagctatctgcatcggggatactctaaagattcacccagggtaaaggccctattaataacccggcagttattcggcctcttgactttccgcaaaatgggtcacgacccctcgccaaccaatatattcaccacatcactcaaggtgggggattactttggcaagcgacacaaagacgttttgcgtgccatacgtaacctgaaatgctccgatgacttcacccagcgcaattttgcgcccattgatttcattgataaaaatggcgatgttcagcctatgtataacatcacccgcgacggatgcatgatgctagtgatgggattcactggcaaaacagctgccgcagtgaaggagtgttacatcaatgccttcaactggatgcgccgagcagctaaaccggcgcatggcgatgggtgaagaattgcagcatcgctacgccatcaaagaaacgcgctcaaagctgaaaggcacgatcgggaacccgtttgatgaacgagcggaagaaagagaagcgcgtcctggagctcgaacatgagcacatcatgcaggtaacacagccagaattgttgattggctgatcgcggcattacagcaggcattcactgagtgcctgtgataatgcaacagcccgtacaaaacgggcttggatttatctctttgttgcgttcatggtcacatggtaaacgaattggcttaattgggtatcccaccgccccttatgaataacctgcaactaattggcttaacggccgggtttaattgtgtggacaagaaagaattaaa

SEQ ID NO: 140331 - DNA, 452 bp, Homo sapiens
cagctggcagaatgacatatttgccaatcagctcctttgtaacgcggatcttccgggttaaacggctacggccagtatcgcccagcagggtttctggacgggtagtcgcgaccaccagataatctttaccgtctgaggttttcgcaccgtcagccagcggatagcggatgtgcccacatcgaactttcaccgcatttggacaggccttcgtccatggtgaagcgttcacgctcccagtcgacggagttgccgagacgggcgcatctgacgggtaatggtgccgccagattccgctttccattcccagaatttgtcgatgcaagcttcgcgggcgtagtcgtgacgggtatataccttcttctgcggccatcttgcgctcaacgaccatctgggtagcgatcccggcgtggtcagtaccgacctgccacagggtgtaaaagcccttgcattcg

SEQ ID NO: 140332 - DNA, 2392 bp, Homo sapiens
gtaccgcgccaggtgtgcgccagggtcctgtgtggatgccgggcgatgaagtgaaaaaagtgacctgtaaaaatggcgtagtgaacgaaatctggacccgcaatcacgccgatattccgctacgtccacgtttcgcggttctcgccagcggcagtttctttagtgtcggactggtagcggaacattgcccaacgcgcaggaggccaacaatgaatgacaccagcttcgaaaactgcattaagtgcaccgtctgcaccaccgcctgcccggtgagccgggtgaatcccggttatccagggccaaaacaagccgggccggatggcgagcgtctgcgtttgaaagatggcgcactgtatgacgaggcgctgaaatatggcatcaactgcataacgttgtgagagctgtccctgttgtaccctgtccagagaattggaggaatctgggcacagacacatgcacagagggagaatgccacctgaagatgaaagcagagatcggggcaaggcttctgcaagccaaaaacactgccagccaaccaccagaatctaggtcagagcatggaacagattcgccctcgcagccctcacaaggaaccaaccgtgccagtacctggatcttgggcttctagtaacagctgccttaatattaaaaaatattggtaaatattcagaatgtggtcgcagttggcccagggcttcccggtatcaacagggacaccaggatttatttattctgcgaagtgatcttccgtcacaggtatttattcgcgataagctcatggagcggcgtaaccgtcgcacaggaaggacagagaaagcgcggatctgggaagtgacggacagaacggtcaggacctggattggggaggcggttgccgccgctgctgctgacggtgtgacgttctctgttccggtcacaccacatacgttccgccattcctatgcgatgcacatgctgtatgccggtataccgctgaaagttctgcaaagcctgatgggacataagtccatcagttcaacggaagtctacacgaaggtttttgcgctggatgtggctgcccggcaccgggtgcagtttgcgatgccggagtctgatgcggttgcgatgctgaaacaattatcctgacctctacccttactacacataagagaattcatactggagagaaaccctacaaatgtgaagaatgtggcaaagccttcaagcggtcttcagaccttactacgcataagataattcatactggagagaaaccctacaaatgtgaagaatgtggcaaagcttttaagtactcctctaaccttactacacataagaaaattcatactggagagagaccctacaaatgtgaagaatgtggcaaagccttcaaccagtcctcaatccttactacacataggagaattcatactggagagatattctacaaatgtgaagaatgtggcaaagcttgtaagtgctcctctaaccttactacacataagaaaattcatactggagagagacaactacaaatgtgagatggcgcctggtggacagcagaggctttgatgaatacatgaaggagctagatggtgcattggttcagcatcaggagtgggatgggaaggaaagcacaataacaagaaaattgaaagatgggaaattagtggtggagtgtgtcatgaacaatgtcacctgtactcggatctatgaaaaagtagaataaaacaaattttgggagatacgaggaggggactggcacgaatcgtggaaactgatacgcgtgagctctacgcatcgatgttctgttacaatggacaacggccgtcttttctccgaatggatgggtaaattcggttatggtcattacaccggtatcgacctggcggaagaacgttccggcaacatgcctacccgcgaatggaaacagaaacgctttaaaaaaccgtggtatcagggtgacaccattccggttggtatcggtcagggttactggacagcgaccccaatccagatgagtaaggcactgatgatcctgattaatgacggtatcgtgaaggttcctcatttgctgatgagcaccgccgaagacggcaaacaggacccgctggtgctggaggagcagctgaccacagatgagatcctcatcagggacaccttccgcacctactgccaggagagactcatgcctcgcatcctgttggccaatcgcaacgaagtacctgccctgtaccattcgacatccctggcttccagtgcgaatatcgccttagtcccctgtgtcgatgggccggcgctgccccgctgcacggacaacccgtgcacttgctccaggcagcttcataccaccaatgacgcacacttgatcactctagcagccagcaatatgttgcatctcttcactctctag

SEQ ID NO: 140333 - DNA, 1837 bp, Homo sapiens
atgttcctggactattttgcactgggagtgcttatttttgtatttctggtgatcttctatgggatcattattttacatgatattccctacctgattgccaaaaaacgtaatcatcctcatgccgacgccattcatgttgctggttgggtgactggtgtggtgattgaagtgacggataagaaaaatacgctgattaaaaaagatagaactcgagcttgtacccttctggacaatgacaccaccgtcgatggcttaagcgccgttgagcaactggtgtgtgaaattgccgcagaacattggcgcagcggtaagcgcgtgctcatcgcctgtgaagatgaaaagcaggcttaccggctggatgaagccctgtgggcgcgtccggcagaaagctttgttccgcataatttagcgggagaaggaccgcgcggcggtgcaccggtggagatcgcctggccgcaaaagcgtagcagcagccggcgcgatatattgattagtctgcgaacaagctttgcagattttgccaccgctttcacagaagtggtagacttcgttccttatgaagattctctgaaacaactggcgcgcgaacgctataaagcctaccgcgtggctgatatcgaacagccgctttacgagcactgggaaaagcagggctactttaagcctaatggcgatgaaagccaggaaagtttctgcatcatgatcccggcgacgaacgtcaccggcagtttgcatatgggtcacgccttccagcagaccatcatggataccatgatccgctatcagcgcatgcagggcaaaaacaccctgtggcaggtcggtactgaccacgccgggatcgctacccagatggtcgttgagcgcaagattgccgcagaagaaggtatatacccgtcacgactacgcccgcgaagcttgcatcgacaaattctgggaatggaaagcggaatctggcggcaccattacccgtcagatgcgcccgtctcggcaactccgtcgactgggagcgtgaacgcttcaccatggacgaaggcctgtccaaatgcggtgaaagaagttttcgttcgtctgtataaagaagacctgatttaccgtggcaaacgcctggtaaactgggatccgaaactgcgcaccgctatctctgacctggaagtcgaaaaccgcgaatcgaaaggttcgatgtgggcacatccgctatccgctggctgacggtgcgaaaacctcagacggtaaagattatctggtggtcgcgactacccgtccagaaaccctgctgggcgatactggccgtagccgtttaacccggaagatccgcgttacaaaggagctgattggcaaatatgtcattctgccagctggtaccgcgccaggtgtgcgccagggtcctgtgtggatgccgggcgatgaagtgaaaaaagtgacctgtaaaaatggcgtagtgaacgaaatctggacccgcaatcacgccgatattccgctacgtccacgtttcgcggttctcgccagcggcagtttctttagtgtcggactggtagcggaacgtaacggcattcgagagccgattctcggccttgatgtgctacaaaccgccacgcggggtgaatggtataagggagatttttttgcgccgcaaccgtggcagcagttcggtgtaaccactgatgagacgtacgcccgtcacaggcagggcaaaccattgaaaacctgtttgccatcggttcggtgctgggcggatttgatcccatcgcccagggatgcggcggcggtgtttgtgccgtcagtgctttacatgccgctcaacagattgcccaacgcgcaggaggccaacaatgaatga

SEQ ID NO: 140334 - DNA, 790 bp, Homo sapiens
caccgcacttggaccaacctgtggtcacccttaacatctatccaaaagctgatgaaagcagcagcctgaaggcatcacgtgggacaagaggagcagcgtacaggccagcgcgccaaaatctttattctgcgtcgtctggaaagaaggatgaaaatcctgtgattgaatttaaaaacgtctccaagcactttggcccaacccaggtgctgcacaatatcgatttgaacattgcccagggcgaagtcgtggtgattatcgggccgtccggttccggtaaatcgaccctgctgcgctgcatcaacaaactggaagaaatcacctccggcgatctgattgtcgatggcctgaaggttaacgatccgaaagttgacgagcgcctgattcgccaggaagcaggtatggtgttccagcagttttacctcttcccgcatctgacagcgctggaaaacgtcatgtttggcccgctacgcgtgcgtggcgcgaacaaagaagaggcggaaaaactggcacgtgagctgctggcgaaagtcggtctggcagaacgtgcacatcactacccttccgaactttctggtggtcaacagcagcgtgtggcgattgcccgcacgctggcggtgaaacacaaaatgatgctgtttgatgaaacgactttcgattttgacccggaacttgtccatgaagtgctgaagggtatgcaggatctggctgaagaagggatgacgatggtgatcgtgacccacgaaatcgggtttgccgagaaaagaacttcgcggctgatctttatcgacat

SEQ ID NO: 140335 - DNA, 636 bp, Homo sapiens
tcagcggaagggctgctggtgaccaagccgaagaactacgatcaggttccggcgaacaaacccattgttgacgcgatcaaagcgaaaaaacaggacccaagtggcgcattcgtttggaccacctacgccgcgctgcaatctttgcaggcgggcctgaatcagtctgacgatccggctgaaatcgccaaatacctgaaagcgaactccgtggataccgtaatgggaccgctgaccaaccaccgccatcagccatgacttgccgttgcggttaagtgtcgagaaaaagacatcgccgcctggtttcaccagttgcgcacaggctctgaccactgactgcggatcggggacgtgctccagcatctccatgcaggtcaccacatcatactgcccggcatgttttgccgcgtgctcttccacggtttccatgttagccaggatggtctcgatctcttgaccttctttagagcacagggcgaggatcccaatagtttggaagaacagtatctccggttgattgctttcaccccaaccacagtcatcgataatttcaacatagcgggtcggtctccagtaagtgtacccaacttcacctggaaaattctgatcttttagatttgcttctcccttttgccacat

SEQ ID NO: 140336 - DNA, 1667 bp, Homo sapiens
atgacgaggcactacggtgctgaagcaacaaatgccctgcttccaggaaaagcctctaagcatcagattgtcggatgcggcgtaaacgccttatccgacctggatccccgtaggccggacaagacgcgcagcgtcgcctccggcataggagcggcgctactgcttcgcctcatcaaaacactggctgatgatctccagaacctgacggatctgagcgtcttcaatggtgagcggtacaaggatgcgcagcacgttgtaatacgggccgcaggagagaagaatcaggcctttatcgcgggcgcgagacacgatctcggcggggagttaggggtcggcctggtgtggatcccggcttcaaaggtcaatgggataatgggcccaagcccggtgtggctaacgtttcgcgtgtctaacattgcgggcgaatcagcggaagggctgctggtgaccaagccgaagaactacgatcaggttccggcgaacaaacccattgttgacgcgatcaaagcgaaaaaacaggacccaagtggcgcattcgtttggaccacctacgccgcgctgcaatctttgcaggcgggcctgaatcagtctgacgatccggctgaaatcgccaaatacctgaaagcgaactccgtggataccgtaatgggaccgctgacctgggatgagaaaggcgatctgaaaggctttgagttcggcgtatttgactggcacgccaacggcacggcgaccgatgcgaagagatattgcgccaacgtgaagggggtgaatcccgacacgcaggaaccaagtccctcgggcgttaaggttaacgatccgaaagttgacgagcgcctgattcgccaggaagcaggtatggtgttccagcagttttacctcttcccgcatctgacagcgctggaaaacgtcatgtttggcccgctacgcgtgcgtggcgcgaacaaagaagaggcggaaaaactggcacgtgagctgctggcgaaagtcggtctggcagaacgtgcacatcactacccttccgaactttctggtggtcaacagcagcgtgtggcgatttgcccgcgcgctggcggtgaagccgaaaatgatgctgtttgatgacccgacttccgctcttgacccggaactgcgccatgaagtgctgaaggttatgcaggatctggctgaagaagggatgacgatggtgatcgtgacccacgaaatcggttttgccgagaaagtacgttcgcggctgatctttatcgacaaaggccggattgcggaagatggcaatccgcaggtgttgatcaagaacccgccgagccagcgcttgcaggaatttttgcagcacgtctcttaataagacacattgcctgatgcgctacgcttatcaggcctacaggatatctggcaacttattaaaattgcatgaacttgtaggacggataaggcgttcacgccgcatccggcaaaaaagcccgcacgttgtcagcaacctgcttaatatcccttcctccctttcacccgaaagggaggcacaccagattcctatcatttaaaatcgcccctcctccagcatctatacttatctttttgctctattttctcactggaggagtcatgcggtggacctgttcatcctcttctgcctgctgggggacctgccacggggtatccataccggggta

SEQ ID NO: 140337 - DNA, 2187 bp, Homo sapiens
ctaaacttgatgctggtaaccctggctgaactctgcgcgaacaagcatcgtggctgctttgtgcatattgaacgtgttacacgacgtgtatagtcgaaaacagccggttgcgaagttggggtcgctttgatacacagtcgcggcaagttccgacggcagattgaactcgacataacgaccgcgacgatataactggaaattgcgctcgcgctcgccgtaggccatcgctttccgtcgctcgacaattggtaaataagcgtcggtgtagcctttgcctaccgcctgcataaaggcaaaacagcggtcgaaatctggcgtgttcaggtcatcaaagaacacggtggttccggttctactgctcaggaaatcaaagactccgtaagctacggcgtagtaaaaatgaacatcgataccgatacccaatgggcaacctgggaaggcgttctgaactactacaaagcgaacgaagcttatctgcagggtcagctgggtaacccgaaaggcgaagatcagccgaacaagaaatactacgatccgcgcgtatggctgcgtgccggtcagacttcgatgatcgctcgtcgcccagttgccacgtgctatagagtggacaattgccagccccagcccgcagccgccggttgagcgatcccggctgggatcgaggcgaacaaaaggttcaaagatatgttcgcggttttctggggcaatccctgggccatcatcctcaacaattaatgtcgctctattccccgacagtagcaggctggtttcaaccgttgaatggcagtaccgcagggcgttattgagcaaattatccagcacgcgctccatataagcagcatatacccaaatggctcgaaccctcatcaaggtggatacgttcattgagatgcccatcgccgaatcgttgctccgctggttgcagtttgaacatatgctgccagtgcggactgcatccagataattgaccggaaaggcgagggacatagccctaaaagcgatcggggcgatatccagcaatcgcatctgatggagataatggagatgaggaacaggaccaaatgccagcccgtatgggctgcgcgggatacgctgtaaaaacgtgtactgatcgtccagggcgagcatttggtcggccagcagaacgagcgctggattctcccagttgagatccgcctgttctggtgcaaagagatgcaaatagtactgttcgctttccgcatgccagcgccagcgcagatcctgccggggatattccgccaatctttggcccaggctgccggggctgatttggtgtacgtgggcgtcgagccaccgaagcccaaagccgaagtgattctggtggcagaatacagcccgatcaaaaccgtagccgatcttggctgccccctccacgtacaaaaggtgagcagatatcctccagaattcacacaagtcataacaccggtacaatgctatgtcaccattgacgcacttggtcagtacgcggcttggacacgtgcgaatatgacataccgccccggcagtaatatcattcaaaacctgggtaacgatatccggctgcggacagtacaataaggttggcgggaagaaggcacccgcagcagataaatccgcctgaccaccgaggcgaatctcgcatcctgcagccagcaatatgttcactttttcctgcacatcggcacgctgctcagcatttaccagtgcgcccattttcacgccttcctgagcaggatcaccgaccacgactttctgtaatcgcgcaaccagagcatcactgacagcattaaccaatgcctgcggcacaataatccgccggattgccgtacatttttgcccggcttttgtggtcatctcacgcacaacttcacgaataaacagcgcaaactccggttgatccggggtgacatcttcgcccagtacgcagcagttcagggaatcagcttccatagtgaaggggatagatttggcgacgatatttggctgaactcgcagcatctgtccggtcgccgctgaccccgtgaaagtcaccacatcctggctgtccagatgatccaacaagtcgccagcactaccgcagatcagactaattgcgccttcgggaacaagaccactatcgacaattgatttcaccatcgcctgagtcagttgggccgtcgcggtagctggtttgatgatggctggcat

SEQ ID NO: 140338 - DNA, 1352 bp, Homo sapiens
ggcggacagcaccagaaacgccaaatcagcgccctgctacactcgattccggcattcttggcggctacattgcgcccgataatctcaccatcacgtttatcggtgggcactcattgtttgatgagcgcttttgccttgcgcacagatgccagaaagctgcagaagatgacgcgtttccccacgactcgcttgatgcggcctccttgctggaatatgcgcgggaaaaactaaatggcctggatgtagaggtttatcactggaatctgcaaaacttcgccccggaagatctactttatgctcgtttcgatagtccggcactcaagaccttcaccgaacagctgcaacaggccgatgggctgattgtcgccacgcctgtgtataaagccgcctattccggtgcgttgaaaaccctgctcgacctgctgccagaacgcgctttgcaaggcaaagtggtgctaccgctggcgacgggcggtaccgtggcccatctgctggcggtcgattatgcccttaaaccagttttaagcgcactgaaagctcaggagatcctgcacggcgtgtttgccgatgactcacaagtaattgattaccatcacagaccccagttcacgccaaatctgcaaacccgtcttgataccgcgctagaaactttctggcaggcattgcaccgccgcgatgttcaggttcctgaccttctgtctctgcgagcaccgaagcccaaagccgaagtgattctggtggcagaaaacagcccgatcaaaaccgtagccgatcttaaaggtcacaaagtgcctttcagaaaggttccagtcacacaaccttttactgcgtgcatgcgtcaggccggacttaagtttaccgatatccaacccacttacctgacgcccgctgatgcccgcgccgcgttccagcaaggtaacgttgacgcctgggctatctgggatccctactactctgctgcattattacagggcggcgtgcgggtgctgaaagacggcaccgatctcaatcaaactggatcgttttatctggcagctcgtccctatgcagaaaaaaacggcgcttttattcagggcgtactggcaacctttagtgaggccgatgcgttaacccgcagccagcgcgagcaaagcatcgctttactggcaaaaacgatgggcttaccggcaccggtgattgcctcttacttagatcatcgccctcctaccaccatcaaaccggttaacgccgaggttgccgccttacagcagcaaacggcagatctgttttatgaaaatcgtctggtgccgaaaaaagtcgatattcgccagcgcatctggcagcccactcaactggaaggaaaacaattatga

SEQ ID NO: 140339 - DNA, 1939 bp, Homo sapiens
tactttatgctcgtttcgatagtccggcactcaagaccttcaccgaacagctgcaacaggccgatgggctgattgtcgccacgcctgtgtataaagccgcctattccggtgcgttgaaaaccctgctcgacctgctgccagaacgcgctttgcaaggcaaagtggtgctaccgctggcgacgggcggtaccgtggcccatctgctggcggtcgattatgcccttaaaccagttttaagcgcactgaaagctcaggagatcctgccacggcgtgtttggccgaatgactcacaagtatattgattcccatccaagccgcccatttcacgccaaatctgccaaaccgttcttgataccgcgctagaaactttctggcaggcattgcaccgccgcgatgttcaggttcctgaccttctgtctctgcgagggaatgcccatgcgtaacatcattaaactggcgctggcgggattgcttagcgtctctacttttgcggatgctgcagaatcctcgcctgaagcgttacgtataggctatcagaaaggcagtattggtatggtgctggcaaaaagccaccagttactggaaaaacgctatccggaatcaaaaatctcctgggtggagttccccgcgggtccgcaaatgttggaagcgttaaacgttggcagtattgatctcggcagtaccggggatattccgccaatctttgcccaggctgccggggctgatttggtgtacgtgggcgtcgagccaccgaagcccaaagccgaaaggattctggtggcagaaaacagcccgatcaaaacccggaccgatcttaaaggtcacaaaggtgcctttcagaaagggttcagttcacacaaccttttactgcgtgcactgcggcaggcccggacttaagtttaccgatatcccaacccacttacctggagccccgctggaggccccgcgccgccgttccaaacaaggggaaccgttgacgccctgggctatctgggatccctactactctgctgcattattacagggcggcgtgcgggtgctgaaagacggcaccgatctcaatcaaactggatcgttttatctggcagctcgtccctatgcagaaaaaaacggcgcttttattcagggcgtactggcaacctttagtgaggccgatgcgttaacccgcagccagcgcgagcaaagcatcgctttactggcaaaaacgatgggcttaccggcaccggtgattgcctcttacttagatcatcgccctcctaccaccatcaaaccggttaacgccgaggttgccgccttacagcagcaaacggcagatctgttttatgaaaatcgtctgcattattctgaatactgtcgccccatggtatctgtggggaactggttcctggacggcagccacagcgtcttcagttacgatgcgctggaccggctggtacagcagggcggctttgacgggcggacgcaacgttatcattatgacctgaccggaaaactcacacagaagcagtggcagtatgatggccacggctggctgacagacatcagccacctgagcgaaggccaccgtgttgccgtccactatggctatgacgataaaggccgcctgaccggcgaatgccagacggtggagaacccggagacgggggaactgctgtggcagcatgagacgaaacacgcatacaacgagcaggggctggcaaaccgcgtcacgccggacagcctgccgccggtggagtggctgacgtatggcagcggttacctggcgggaatgaagctgggcgggacgccgctggtcgagtatacgcgggacaggctgcaccgtgagacggtgcgcagcttcggcagcatggcaggcagtaatgccgcatacgaaatgaccagcggtaccgagctgattgatctatgtgtttataaaaattctagtatcccgtgtgggtaa

SEQ ID NO: 140340 - DNA, 1207 bp, Homo sapiens
aatttttttatccaacttatcgatcaggccttacgatcaacggatgatatgatcaaagcaaatgtttggcatctttataaagagtggattcgtagtgatgatgtttcacctatatttatagaaactgaagataatttaagaacctttaacacgaatgaattaacacgaaacgataatatctttatcctgttctcctcagtcgatgatgggccagttatggtggtaagctcccagcgcttacatgatatgttgaatcctacaaaagataccaattggaattccacgtatatctacaaatccagacatgagatgttgcctgttaatcttactcaggaaacacttttcagctccaaatctcatggtaaatatgcgcttttccccatttttactgcgagttggcgagctcatcgtataatgaataagggtgtttaagtaaaggaaaacatcaccgttcctggcatcctggacggtgatgccctacggttgccctcgcagcacgggcatcggtaaagcgtaaggttcaacatcgttttccacttcatgcgattgttgcgtttttgttgcgtattagatcacttaatttgctttacatctcccgtaaacacttttctgcgatacaatgcctttacgttatgtaacggagagttcggcatgtcacaccccgcgttaacgcaactgcgtgcgctgcgctattgtaaagagatccctgccctggatccgcaactgctcgactggctgttgctggaggattccatgacaaaacgttttgaacagcagggaaaaacggtaagcgtgacgatgatccgcgaagggtttgtcgagcagaatgaaatccccgaagaactgccgctgctgccgaaagagtctcgttactggttacgtgaaattttgtgtatgtgccgatggcgaaccgcggcttgccgggtcgtaccgtcgttcctgtgtcaacgttaagcgggccggagctggcgttacaaaaattgggtaaaacgccgttaggacgctatctgttcacatcatcgacattaacccgggactttattgagataggccgtgatgccgggctgtgggggcgacgttcccgcctgcgattaagcggtaaaccgctgttgctaacagaactgtttttaccggcgtcaccgttgtactaagaggaaaaaaatatggagtggagtctgacgcagaataagctgctggcgtttcatgg

SEQ ID NO: 140341 - DNA, 750 bp, Homo sapiens
tccagcagacgacccaactgctcgacccggctaaagcctatgccaagggcgtcggtaactcgatcccggatatccccgatccggttgctcgtcataccaccgatggcttactgaaactgaaagtgaaaacgaactccagctccagcgtgttggtaggacctttatttggttcttccgctccagctccggttacggtaggtaacacggcggcaccagctgtggctgcacccgctccggcaccggtgaagaaaagcgagccgatgctcaacgacacggaaagttattttaataccgcgatcaaaaacgctgtcgcgaaaggtgatgttgataaggcgttaaaactgcttgatgaagctgaacgcctgggatcgacatctgcccgttccacctttatcagcagtgtaaaaggcaaggggtaattacgccccacagtgctgattttgcaacaactggtgcgtctcctggcgcacctttttttatgcttccttcctgggatatgagcgattttttatagtaactcacttcttcttcactaagaatatccattatctcaatgccttatcagagattcttttcctttcgccgggagtgtctggacattcaggctacttttccagggtattttatttctggtatgcaaagggttttattgaaaagccatatcctaaattctgggcggaaaaacctctttgatgaaacaagaatggggggcccgggaaaccattaacaccccaccccccgggcgggccc

SEQ ID NO: 140342 - DNA, 748 bp, Homo sapiens
atgtttgattatgaaacattgcgcttcatctggtggctgctgattggcgtgatcctggtggtctttatgatctccgacggatttgacatggggatcggctgtctgctgccgctggtggcgcgtaatgatgatgaacgccggatagtgataaacagcgttggtgcacactgggaaggcaaccaggtctggttgatcctcgctggtggggcattatttgccgcctggcccagagtgtatgcagcggcgttttccggcttttatgtggcgatgatcctggtgctgtgctcactgttcttccgcccgctggcctttgattatcgcggaaaaatcgccgatgcacgctggcgtaaaatgtgggacgccggtctggtcatcggcagtctggtgccgccggtagtcttcggtatcgccttcggcaacttgttgctcggcgtgccgtttgccttcacaccgcaattacgcgtggagtatctcggcagcttctggcaactgctgacgccattccctttattgtgcggattgctcagccttgggatggtgattttgcaaggtggcgtctggttacaactgaaaactgttgccaatccacaaatccacacaggttttcggtccgataaacggtacgtcatcggcacaattctgcatcacggcagcagcgacgttaacgtcgatatgatcgttgtgatcgtgagtcgccagtaccgcgtcgatctggcgaatcgcaaacggatcaagaacaaacggggtg

SEQ ID NO: 140343 - DNA, 410 bp, Homo sapiens
aagaatcaaccgaaattcccccagtagcggcgagcgacggggaagcagcccagagcctgaatcagtgtgtgtgatagtgtaagcggtatggaaaggcgcgcgatacagggtgacagccccgtacacaaaaatgcacatgctgtgagctcgatgagtagggcgggacacgtggtatcctgtctgaatatggggggaccatcctccaaggctaaatactcctgactgaccgatagtgaaccagtaccgtgagggaaaggcgaaaagaaccccggcgaggggagtgaaaaagaacctgaaaccgtgtacgtacaagcagtgggagcacgcttaggcgtgtgactgcgtaccttttgtataatgggtcagcgacttatattctgtagcaaggttaaccgaataccgcacccgaa

SEQ ID NO: 140344 - DNA, 1819 bp, Homo sapiens
atgacgtcagcgatatcactcggcagtagatgttccgggcgaatacccagcgacataattggctccaacctggacatcacggctttcaactggcagccagacttgctgacgatttggcatcggcagctccacctgcacttgactcgacttgacggtggcggtcacttttaccggcaggaagttcatctttggcgaaccgataaatccggcgacaaacgaaggccccaaggtgacccaaagactaccggcattacggctaaggtaatcaacgtgcggtctaccaagctagttggtctgccacaccgcatcacggcaaccaggtggaagagaaagcgtagccgaatgctacatacgaacacgggaaagttagttttcaataaccgcgatcaaaaacgctgtacgcgaaaggtgatgttcgataaggcgttaaaactgcttgatgaagctgaacgcctgggatcgacatctgcccgttccaccatttatcagcagtgtaaaaggcaaggggtaattacgccccacagtgctgattttgcaacaactgtgcgtctcctagcgcacctatcgcaggagcgcttgggaaaattacaggacagtatttatatctcgctaactgaccattgccagtttgcgattaaacgctttcagcaaaacgtgttgctgcccaacccgttgctgtgggatatccagcggctttacccgaaagagttccagctaggggaagaagcgttaaccattattgataaacggttgggcgtgcagttaccgaaagatgaagtgggctttattgccatgcatctggtcagtgcccaaatgagcggaaatatggaggatgttgcaggtgtcacgcagttaatgcgcgaaatgctgcaattaataaaatttcagttcagccttaattaccaggaagaaagcttgagttatcagcgactgggtaccacatctgaagtttttatcctggcgtattcttgaacatgcttcaattaacgatagtgatgaatcattacaacaagcagtaaaacaaaattacccgcaagcatggcaatgtgcggaacggatcgccatttttattggtttgcagtatcaacaattagggttaactcaaccggccgtcagtaaaatcattaacgatattgaagattattttggtgtggaattagtggtgcggaaaaataccggtgtaacattaacacctgccggtcaattgttactctcccgttccgaatccattacccgtgaaatgaaaaatatggttaatgagataagcggcgaaaagaaccccggcgaggggagtgaaaaagaacttgaaaccgtgtacgtacaagcagtgggagcacactgggaaggcaaccaggtctggttgatcctcgctggtggggcattatttgccgcctggcccagagtgtatgcagcggcgttttccggcttttatgtggcgatgatcctggtgctgtgctcactgttcttccgcccgctggcctttgattatcgcggaaaaatcgccgatgcacgctggcgtaaaatgtgggacgccggtctggtcatcggcagtctggtgccgccggtagtcttcggtatcgccttcggcaacttgttgctcggcgtgccgtttgccttcacaccgcaattacgcgtggagtatctcggcagcttctggcaactgctgacgccattccctttattgtgcggattgctcagccttgggatggtgattttgcaaggtggcgtctggttacaactgaaaactgttggtgtgattcatctgcgttcacgggttcgcatcccctgtgacttgcacatatacgcccagatggcctga

SEQ ID NO: 140345 - DNA, 1617 bp, Homo sapiens
atgcacagctcagatacatcaggcagcagcatcagtcaggcaggcaatggcaacacaggtgcagcagcagaacagcatgcagcacagggcagcagtggacaccaaaagctgcatggcaggcctactaaactcgggttgcggcgcttccaaaacgcatccatggaacacgtgctattctccgagaaaggagaagatctccgtgctgacgatatgaagaacaccagaaatttgaaaaacacagtggcgcacacccgggcgtctttcatccaggaaacttttgctgtaggtcccctcttcagcgtcaaaccgcacaacgtaattccgaattcaaagtcaagtaataaacccaggccctccgggaattgcccaggaaacttcctcggaacgacccaaaatggggacacagacaacttgggcttcgtggacgtccccgatgcccaaaggaacacgttccatttccgcgtgtctccacttgcttcggacatacccctcaaatggatagaaaaaacctttgctaaccacgcgcttcgggcaccatcagcgccacagactctagactcaggctccaatgcccacatcacctactcgctgctgcctccccatgacccacaactggccctcaactcgctcatctccatcaacgcagacaatgggcagctgtttgcgctcagggcgctggactatgaggccctgcaggcctttgagttccatgtgggcgccacagatggaggctctcccggcgctcagcagccagtgcgctgtgtgcgcgttgggtggtgctgtgacgaacaatggacaaattggctgacccccttaccgtgctgtgacttacaggtgcgaccctaccatgccgtggcccagacgcccagtattatgttcgtggtaacaaatggcactagaaacattgattgtctgcgaagttttgtctacggatgttctgaggaatggcggctctatgaactgtgtaccaggaggctgctggagctggacctacacaatacgtggggaatgcttttcaaggtaccaggtgtatgggctgaggacaacccccccggacttgttctaaacagacccccggtggtagtagagcttaaccctcatgctaccctgcacaccccctacaccaaggagcaaccagagtgctttgttaagtggttcctggatcttgtgcatcctgacttggttggtgcccttctgggaacaggccttaaagaaactggccataaactggatttctgcagcaacaagaggacacatcgagctggtacctctatcccttcatttctgattgttacaaccctgtgctttgttcatgccggatgcggcgtaaacgctttgtccggccaacaaaagcacgtcagcgaatgggttgtacttcgcttcaccgacatctttctgcgcatcttcccctgcgataacggtcgtaccatactgatccgcttcggtatatttcgaatgctcatgatcgtggcaatagagacacaacaattcccagttactgccatcttccgggttattggtatggtcgtgatcaatgtggtgaacggtaagttcacgcaggttggaataaacaaactcgcgggaacagcgaccgcagacccacggatagatttttaa

SEQ ID NO: 140346 - DNA, 1272 bp, Homo sapiens
  misc_feature (1)...(1272): n = a,t,c or g
atgcagnctgaaaacgacaaaccgcagtatctttccgactggtggcaccagagcgttaacgttgtcggaagctatcacacccgtttcggaccgcagatccgcaacgatacctaccttgagtacgaagcattcgctaaaaaagactggttcgacttctatggttatgcggatgcgccggtattcttcggcggtaactccgatgctaaaggtatctggaaccacggttctccgctgtttatggaaatcgaaccacgtttctccatcgacaagctgaccaatactgaccttagcttcggtccgttcaaagagtggtacttcgcgaacaactacatttacgacatgggtcgtaataaagatggtcgccagagcacctggtacatgggtctgggtaccgatatcgacactggcctgccgatgagcctgtccatgaacgtctatgcgaaataccagtggcagaactatggcgcagcgaacgaaaacgagtgggacggttaccgtttcaaaattaaatactttgtgccgattaccgatctgtggggcggtcagctgagctacatcggcttcaccaacttcgactggggttccgatttaggggatgacagcggtaacgcaatcaacgggattaagacccgcaattatacatccggcgacaaccatacgctgagagaccctcactacgttgaagacaaaggccataaataccttgtattcgaagccaacacgggaacagaaaacggataccaaggcgaagaatctttatttaacaaagcgtactacggcggcggcacgaacttcttccgtaaagaaagccagaagcttcagcagagcgctaaaaaacgcgatgctgagttagcgaacggcgccctcggtatcatagagttaaataatgattacacattgaaaaaagtaatgaagccgctgatcacttcaaacacggtaactgatgaaatcgagcgcgcgaatgttttcaaaatgaacggcaaatggtacttgttcactgattcacgcggttcaaaaatgacgatcgatggtattaactcaaacgatatttacatgcttggttatgtatcaaactctttaaccggcccttacaagccgctgaacaaaacagggcttgtgctgcaaatgggtcttgatccaaacgatgtgacattcacttactctcacttcgcagtgccgcaagccaaaggcaacaatgtggttatcacaagctacatgacaaacagaggcttcttcgaggataaaaagcaacatttgcgccaagcttcttaa

SEQ ID NO: 140347 - DNA, 2076 bp, Homo sapiens
tcaaccggtggttttgccgttgttgtttgccgtggcgtcatcaccgttaatctgcgtgccggtgccaccgttggtgatggcgctctcgccttcgttgttaacaaccgcctggtcgccgtcaacctggataccgatggactccggatcggtgacggtcatggtgcccttgttatccaccgttgcgctgtcgccggtgatatcaataccgtgaccgccgccgctgacatccagatcgccgtcctgaataacttttccgttattaccgttgatttccgtaccggtggaatccttgccgtcaacggtggttgggatccgttcaccacattgatcacgaccataccaataacccggaagatggcagtaactgggaattgttgtgtctcttattggcccaccgatcatgagcattcgaaatataccgaagcggatcagtatggtacgaccgttatcgcaggggaagatgcgcagaaagatgtcggtgaagcgaagtacaacccattcggccgcatccggcctatttgaaggctgcgttttccccggcattcgcgggtcgtctttatattcggcggtggcaatccacgccgcgcaaaacagcgtcaaacgggcgaagaagtagaaaaatgccatcagccccagcacggaaccaaatgctgcgccagagggggatttcatcaacgatggcagggtgtaggtcatcacgattttaatcacttcaaaaccaatagcagccagaaatgttccgcgaatcagggcttttttgcgcggacggtggcgcggcaaccgccagaagatccagaagaaaagcagatagttggcgaagatggaaatcgccaggccaatcaatcgccacgtcggtttcagccactcaatgctgttcaggtgcagggcgctaataatcatttgctgcgccgaaccggcaaccgaggtgatcgaaagcgtcacaatcagcgcaatcaacaaaccaatcagcgaaataaaatctcgcagatattttacccagaacttctcctgatcttgcggcgagcgttcccagacatcgcgcgactgggcacgaatcgcttcacgcaggttacccatccagttgatgccggaataaagtgccaccgccaggccgacaagccctacagtcgtacgctgctgaacggcggtgttgatggtgtttttcaacgtggcggctgcgcatccacagaacgaaacaggctttgggaccaactcaatccaggaggcatcattcccacagttcagaagaaatccagtcccatccgcacgggcaacagagaccacggtgtcacggacgacacgcagaaccgtgcgtgcaacagaggcaatacagacgctctccgccgtgtcaaatatccggtccaccgcaccggtaaactgttcacgggcctgagaccggacagattccgtgcgcagctcgtcctgcagtcgggtcatcaggggactggcggcatggtcgggaagcgctgtcatgagcgcactgaccagcgtatccagttcccagccggtgcgggccgatacggccacaaccggatgtacgggccggaacagacggaataccgcctccgttttttcgcgaatattctgtgcctgtgcaggagaaggctgaataccggccatatcccattcatggcagggctccgttttgtcggcctgcgtcaccacaaacagcacctgctgatgtccgcactgcaggatgtgtcgccagaaatactcatccacagacagggcacggtcatcggctttaatcagccacagtaccaggtcaagttcaggcagaatgtcacggtacccgcttacgcgagagcaataagtggctggccaccattctcgatacaaaactctgctgaatagcagcgattttcccagcgtggtgcgtcttttgcattttactggttctgagttatcaattatctgttcactaatgagatatgtacgctccggtttctccgcgctgtccatgtccagactgtctgcaacaattacgcccactgggataggctttaagtctggtgaatatgcgacacatttttcaacgattattgccccgacggctgtggctggcagggctgccat

SEQ ID NO: 140348 - DNA, 2107 bp, Homo sapiens
tcagctcatatgcctgctgaatttcctgcgctttctgttcgccatctccatcatctcaggcggcaaacctttcgccaccagcttatcgggatggtgttcactcatcagcttacggtaggcacgtttgatggtggtcgcatcatccgtcggcttcacgcccagcacattacaggcatcttccagcgttgggccctcggcgcttgcgttcaccacattgatcacgaccataccaataacccggaagatggcagtaactgggaattgttgtgtctctattgccacgatcatgagcattcgaaatataccgaagcggatcagtatggtacgaccgttatcgcaggggaagatgcgcagaaagatgtcggtgaagcgaagtacaacccattcgctgactaccaggtaaccaccccagccggtagagcgaacgttgaagttgccgttgccgaagttcagttctgcatcgtcgttccactgaccaccgtcgtgccagtaacgagctacgacagagtagtgccagtgatcgtagttcagagccagaatatggctggaagcgatagagttattagtacgggtcttaataccgttgattaggttaccgctgtcatcccctaaatcggaaccccagtcgaagttggtgaagccgatgtagctcagcgcagtaccgcttaatttattgttgttggtggcggaagtgatgctgtatccactggcaccggctgccgcggctttctcagccagtttcgcttccagggcatcgagggtggatgcgccatcggcagaaaccacgccgattttattcatgttctgtgcctgggatgccgttaccggttccgccgcgaacacgccaaatgacagagttgaaagagccatagcagcaacaacagtattgatagttttcataattaatgaccgtattctggcttcccgtatgggcgttacgctatcgatctgctgctggcaggttacggcggtcgttgtgtaggtatccagaacgaacagctggttcaccacgacatcatcgacgctatcgaaaacatgaagcgtccgttcaaaggtgactggctggaccggaaacaggaacgggttgatggaactgcgggcatagccttcttgctccattcgtgcgtccagtaccagagaggcgaggtcatctgctacggcttcgatttttggatctttttcctgatagagaattttcaggtaagtgtcgcagtcatcgcagctttcggctttaatcgcggcctgttcgtcatccagcgaccagtaatgcagtttgacgctctgctcgcagttggtgccgccctgaataatagtcgtcactttatcgaagtaacctgtacccacttcctgctggtgagatacgaaggtatagccatctttcgcggcggcaaattccggctgctgcactttctcaacgtagtgcttcataccctcgccctgggcataggcgtttgccaggtcaaacatgttgaaacacatgctgtggatacctgccagggtgatgaactggaacttgtagcccatatccgacagctgctgctggaagctggcaatagttttgtcgtcgaggtttttctcgtcggcgaccacggcgaaaccgcgcccggcctctccggcccgcgcagcctcgatggcggcgttcaacgccagcaggttggtctgctcggcgatccccttgatcacctggatgatcgaatggatctcgtccgacgactggccgagagcggtgatgctggtggaggactggttgaccacgtcggcgatgcggctcatcccttccaccacgttgaggatcacctgcccgccactgctggccagctcctcggacttggccgagatcaccctggcgttgtcggcgtggtcggaaatctgcgagatattggtgatcatctcttccatgctcgcggccatgctggtggcgctgtcggcctgttggatcgactgcgaggtctggccgatggactgggaggtgtcgtggagttcttcgctttcctggcggatgatggtgaccatctgccgcaggttctcctgcatctcgcccaacgcccgctgcaactggccggcctcgtcattgctgtcgacgccgatcggctcctgcaggtctgcc

SEQ ID NO: 140349 - DNA, 1851 bp, Homo sapiens
atggatttgtcaaccccggagcgaggttctccctacccgaggctgctgccgtgtggagatcccctgggtgaaaccattgtcgccattgaccaggaggcaaaaccttcaactgaggacttagggaataagaaggaaacaaaatacattaaactcaaagtcattagatgggataacagtgacttcaatttcctgtattctaattatgagaggattcgggcacgcacaacaaagaaagaggactctgcgactaatgtcccggtgacgtttgaaaaacacggttcccacgccgtcgtatatgcacggcgcagcgccacggtgctgaccgaccggaacaaggaggccccaagagtgccccaaggcggttatatggtttcttttgtggatatccctgaagcgttgacccagggcgaaactgtcgctgaagcgatggaagcggcaaaagatgctttactgaccgcatttgatttttattttgaagataacgagcttatccctttaccttcgccattaaatagtcacgatcactttattgaagtacctttgagcgtcgcctctaaggtattgctgttaaatgcttttttacagtcagaaatcactcagcaagagttagccaggcgaattggcaaacctaaacaggagattactcgcctatttaacttgcatcatgcgacaaaaatcgacgccgtccagctcgcggcaaaggcgcttggcaaagagttatcgctggagtgccttatggacattctcaatcttaataaacatatttccggacagttcaacgccgaactggaaagtatccgcacgcaggtgatgaccctgggcggcatggtggacaagcagctttctgatgcaatcaccgcgatacataaccaggacagcgatctggcgaagcgcgtcatcgaaggccacaagaacctcaacatgatggaagtggcgatcgatgaagcccgcgttgagccatcatcgccaaacatcagtcagacggcgagcgacactgagactggttatggtgatcataaaaccatcgccgagatggagcgtattggtcgacgtaggtcggaacaaaatctgccgtacagcgctggagaaattatcccaacagcatcagccgtaggtggtaagtgctggagtacgttggaccgtcataccatccagatgctgcacgacgtagtgaaagcgttcgcgcggatggacattgacgaaacggccaagtgccagatctttgttgagtatgtgctgaagcccaaagtgatctggctgctgtgcttcgccaacattttcctctatgtggtacgtattggtatcgaccagtggtcaaccgtatacgcgttccaggaactgaaactctttaaagcggtggcgattcagggctttacgctgtttgaagctggtgcgctggtcggtacgctgctgtggggctggctctctgacctggcgaacggtcgccgtggcctggtggcctgcatcgcgctggcgctgattatcgccacgctcggtgtgtatcaacatgccagtaacgaatatatctatctggcttctctctttgcgttgggtttcctggtctttggcccgcaattgttgattggtgtggctgctgttggctttgtacctaaaaaagcgattggcgctgccgatggtattaaaggcacctttgcttacctgattggtgacagctttgccaagttaggtctgggaatgattgccgatgggacgccggtattcggccttaccggctgggcaggcaccttcgccgcgctggatatcgccgcgattggttgtatctgcctgatggcgatagtggcggtaatggaagaacgcaaatccgccgcgagaaaaaaattcagcagttga

SEQ ID NO: 140350 - DNA, 1431 bp, Homo sapiens
atggcgccagagcacctggtacatgggtctgggtaccgatatcgacactggccgccgatgagcctgtccatgaacgtctatgcgaaataccagtggcagaactatggcgcagcgaacgaaaacgagtgggacggttaccgtttcaaaattaaatactttgtgccgattaccgatctgtggggcggtcagctgagctacatcggcttcaccaacttcgactggggttccgatttaggggatgacagcggtaacgcaatcaacggtattaagacccgtactaataactctatcgcttccagccatattctggctctgaactacgatcactggcactactctgtcgtagctcgttactggcacgacggtggtcagtggaacgacgactcagaactgaacttcggcaacggcaacttcaacgttcgctctaccgcgcgggggtggttacctggtagtcagcgaatgggttgtacttcgcttcaccgacatctttctgcgcatcttcccctgcgataacggtcgtaccatactgatccgcttcggtatatttcgaatgctcatgatcgtggcaatagagacacaacaattcccagttactgccatcttccgggttattggtatggtcgtgatcaatgtggtgaacgccagcgaagaaacaaacagaagactacatcaccggtcgttacggttgattcaggagtgcgttatggacagtctcaatcttaataaacatatttccggccagttcaacgccgaactggaaagtatccgcacgcaggtgatgaccatgggcggcatggtggagcagcagctttctgatgcaatcaccgcgatgcataaccaggacagcgatctggcgaagcgcgtcatcgaaggcgacaagaacgtcaacatgatggaagtggcgatcgatgaagcctgcgtgcgcattatcgccaaacgtcagccgacggcgagcgacctgcgactggttatggtgatcagtaaaaccattgccgagctggagcgtattggcgacgtggcggacaaaatctgccgtactgcgctggagaaattctcccagcagcatcagccgttgctggtaagtctggagtcgctgggccgtcataccatccagatgctgcacgacgtgctggacgcgttcccgcggatggacattgacgaagcggtacgtatttatcgtgaagataaaaaagtcgatcactgaatacgaagtgtattgttcgtcaactgatgacctacatgatggaagattcgcgtaccattccgagcgtacttactgcgctgttctgcgcgcgttctatcgaacgtattggcgaccgctgccagaatatttgtgagtttatcttctactacgtgaaggggcaggatttccgtcacgtcggtggcgatgagctggataaactgctggcggggaaagatagcgacaaataa

SEQ ID NO: 140351 - DNA, 1050 bp, Homo sapiens
tcacgaaaccacgaagagaatcgaacagacgagacaacctgcacaggaattattgctgttaagccagacactgccccggctggcagccgtcaggtcggcaagcgtggtatcgacgccatttcccagagtcaatgtcgcgctatcggtaatccggaccgccccttcgagtttaactggcgtaacattatcccgtggcgtcattaacgacaggcttcctgtcgcgccactgaccgatgcatccgccagcgtacctgcgtagacgattgccgtaccgccagcgacctggagatcttctgcccgggccagagcctgaaactcatcttttgaccgcccaagggtatattgcccgccagagttaacctttgtggcggagtcctgacccaggttttgcattgccccacccttgccaaccgtggagtcgcgagcttcggtacctgctaataccaataaattaccgccattttccagcaacatattggtcgctaaattgccggaaatggaaaaagtaccgtactgatgagtaccgctgatttcaataccgttagccgtgctcgtctggagagcggcaccgctgttctggacgatatctgtcgctttgccattatcgttgactgtcagcgtaccgccttcattgatctttgtttttattgcctctccgttagctgaaacctcgacattgttcacgcgggacgtcgtgctgtcgcgggctttgtttgtgctggtacagccctgaatgttaccgcagcaccacgccgcaatcacggtcgggaactggaacagaccttcctgagccagtttttcgtcagacagcggcgcgtcagaggcaccaaaatcaacggtattagcgataatgccaccggaagaaccgataccctggtagttaactttattaccggtttctttctggtaagtgtcagcccatttggcatacaccggcgcagggaaggttgcacctgcacctgtcaggcttgcttctgcaaacacagagaaagcactcatcgataaggtcgcggcgacaacagttgcgacggtggtacgcataactttcat

SEQ ID NO: 140352 - DNA, 1716 bp, Homo sapiens
atgcggcaactgccatcagtgaaactgaacgcgctgggcgtcaaaggggtgatcctcaccggcgataatccacgcgcagcggcggcaattgccggggagctggggctggagtttaaagcgggcctgttgccggaagataaagtcaaagcggtgaccgagctgaatcaacatgcgccgctggcgatggtcggtgacggtattaacgacgcgccagcgatgaaagctgccgccatcgggattgcaatgggtagcggcacagacgtggcgctggaaaccgccgacgcagcattaacccataaccacctgcgcggcctggtgcaaatgattgaactggcacgcgccactcacgccaatatccgccagaacatcactattgcgctggggctgaaagggatcttcctcgtcaccacgctgttagggatgaccgggttgtggctggcagtgctggcagatacgggggcgacggtgctgcctgcttttaacccaccgggtaaaaagggcgacataattttcagcgtgctggtaaaactggcggcgctgattgtgctattgatgttgggtggcattattgtctctctgatcatctcctcctggccgagcattcagaaatttggtctggctttcctatggaccaaagagtgggatgcaccgaacgatatctacggggcgctggtgccgatctacggtacgttggtgacttcgtttatcgcgctgctgatcgccgtcccggtgagtttcggtatcgccctgttcctgactgagcttgcgcctggctggctgaaacgcccgctgggtatcgccattgagctgctggcagccattccaagtatcgtttacggcatgtggggcctgtttatctttgcgccgctgttcgccgtttactttcaggagccggtcggcaatatcatgtcgaatatcccgattgttggcgcgctgttctctggccccgcatttggtatcggtatcctcgcggcaggcgtgatcctcgccatcatgattattccgtacattgcggcggtaatgcgtgatgtgttcgaacaaaccccggtgatgatgaaagagtcggcctacggtattggctgcaccacctgggaagttatctggcgtatcgttcttccgttcaccaaaaatggtgtagtcggggtagatgaaggccgcgtgtccgcgcttggctcactggccgttcgcggatctttcaccaccattacgtcaactggcgttgtttccagcgcgctccctgatttcagcagctcgcctcattctccggctgcgggtatagcagccgttttcgaccaccatctccagctcgcgcgtccactgttgcccttgcggcaacggggaatgaatcacgttctgttccgcaatacggactttgttgccatgcaattgggtaatgatggcgacatggccagtgtctttaaattcaccgcctttatcccagataagaagcgcacccgcgaccggcgcacgcggcgagccgttaggaaatgcctgcaatggcaggatgttgtcattaaccacttctcgcaggaagcgcagcgagaaaatctcccacgccatacccacgtcagtaaagaccacaccgtaattcagaaagagaaaacggcgagcaaattcaacgcattgccacttgtggcccatatattcgtcgtcgatatagctacggaatacggcgtcatcttcgtattcctgcggatcgagagaactgtaatctga

SEQ ID NO: 140353 - DNA, 2941 bp, Homo sapiens
atgggagggacccggagggagaaagaaaccggtaataaagttaactaccagggtatcggttcttccggtggcgtaaaacagattatcgctaataccgttgattttggtgcctctgacgcgccgctgtctgacgaaaaactggctcaggaaggtctgttccagttcccgaccgtgattggcggcgtggtgctggcggttaacattccagggctgaagtctggcgaactggtgctggatggtaaaaccctcggcgacatctacctgggcaaaatcaagaagtgggatgatgaagccatcgccaaactgaatccgggtctgaaactgccttcacaaaacattgctgtagtacgccgcgcagatggctccgggacttccttcgtcttcaccagctacctggcgaaagtgaacgaagagtggaaaaacaacgttggtactggctctaccgtaaaatggccgatcggtctgggcggtaaaggtaacgacggtatcgccgcgttcgttcagcgtctgccgggtgcaattggttatgttgaatatgcttacgcgaagcagaacaacctggcgtacaccaaactgatctccgctgatggtaaaccggttagtccgaccgaagaaaacttcgctaatgcagcaaaaggtgcagactggagcaaaaccttcgctcaggatctgaccaaccagaaaggcgaagatgcatggcctttttcctttacccacgttctttttattccacaaatttcagaagaaaccagaacaaggcacagaagtgctgaaattcttcgactgggcgtacaaagagcggggctaaacaggcgaacgacctggattacgccagcctgccggatagtgtagttgaacaggttcgcgctgcgtggaagcccaatattaaagccagtagcggtaagccgctgtactaataaaactccaggccgggtacggtgttttacgccgcatccggcattacaaaatgactttgtaaacgcgtttaactgaagagtaacttatggctgcaaccaagcctgcttttaacccaccgggtaaaaagggcgacataattttcagcgtgctggtaaaactggcggcgctgattgtgctattgatgttgggtggcattattgtctctctgatcatctcctcctggccgagcattcagaaatttggtctggctttcctatggaccaaagagtgggatgcaccgaacgatatctacggggcgctggtgccgatctacggtacgttggtgacttcgtttatcgcgctgctgatcgccgtcccggtgagtttcggtatcgccctgttcctgactgagcttgcgcctggctggctgaaacgcccgctgggtatcgccattgagctgctggcagccattccaagtatcgtttacggcatgtggggcctgtttatctttgcgccgctgttcgccgtttactttcaggagccggtcggcaatatcatgtcgaatatcccgattgttggcgcgctgttctctggccccgcatttggtatcggtatcctcgcggcaggcgtgatcctcgccatcatgattattccgtacattgcggcggtaatgcgtgatgtgttcgaacaaaccccggtgatgatgaaagagtcggcctacggtattggctgcaccacctgggaagttatctggcgtatcgttcttccgttcaccaaaaatggtgttatcggcggcatcatgctggggctgggccgcgcgctcggtgaaaccatggcggtgacctttatcatcggtaacacctaccagctcgacagcgcctcgctgtatatgccgggcaacagtatcacctctgcgctggcgaacgaatttgcggaagcggaatccggtctgcacgttgccgcactgatggaactgggcctgatcctgttctgtgattaccttcatcgtcctcgccgcatcgaagtttatgattatgcgccgtattgcgctgacgctctcgatggcgacgatggccttcggcctgttctggctgatctggattttaatgtccaccatcactcgcggtatcgacggtatgtcgctggcgctgttcactgaaatgacgccgccgcccaatacggaaggtggtggtctggcgaacgctctggcgggtagcgggctgttaattttgtgggccacggtatattgtgggcctctttcggacgatcgtggtgggattcgtcccactatctgacgaatggtgtgttgcgacgacgtgttacgattagtagcgggttgtacaactgcgacgaatctgaatcttgacacgtctcggctgcgactaatcttggcggcactagctctggtggaggagagacccgggtacgcgtttgtttgttggtcgctggctccgtggcggtggctgtacctatgttggtggagtgaacctggtgctggctgttgatgcttgctggtgctggatcgtggtccttgtctcccccacagcagcaaggtggcgtctgctgccggggcggtgggtcggtgttgtgcttcacggcctgggtggcgtcgttgtggggtctggcgtcccggtttggcggggtgggggtggtgcgggttgtgggttagtgggttgacgcccgaagtgtctgtgttggtgctggtgttgagcaggcacgggttaccgggatgggtgtcgtgtatagtttggatgcgtgctgccgtgtttgggtgtattgtgttgtggtgttggttgggtgcttggcgggctgtggtgttgtgtgcagggtggggcgccctagggcggtggggtgctcgcttggggtgttctgcgttggcgtctgtagactcgcccgttgtgttggaaattagctccgttgtggttggttgtgtgtttggacctcggtgtatggtgggtgcgtgctcgcactggtgttgaccattgtgtgcgattctggatcggtcgtgctccgtgctgcagtttgcttgtgtgcgggtgggcat

SEQ ID NO: 140354 - DNA, 2328 bp, Homo sapiens
atgcctgccttcccgtataccgccgattacttttctggcctgaccgccaccacggcggcgctggcagcactgcataaagtgcgtgaaaccggtaaaggcgaaagtatcgacatcgccatgtatgaagtgatgctgcgtatgggccagtacttcatgatggattacttcaacggcggcgaaatgtgcccgcgcatgagcaaaggtaaagatccctactacgccggttgcggtctgtatcaatgtgccgacggtctactatcgctagactgcgtacaccgtaggctcggcgctattgacccaatattgaacgagtgctttaaagatattggcctcgcacatctgcttggcacgccagaaatcccggaaggcactcagcttatccaccgtatcgaatgcccttacggcccactggttgaagagaaactcgatgcctggctggcgacacataccatcgcggaagtaaaagaacgctttgctgaactgaatatcgcctgcgccaaagtgctgaccgtaccggaactggaaagcaatccacagtatgtggctcgcgaatcaatcactcagtggcaaacgatggatggtcgcacctgcaaagggccgaacatcatgccgaaattcaaaaataaccccggacaaatctggcgcggaatgccctcacatggcatggacacggctgccattttgaaaaatatcggctacagcgaaaacgacattcaggagttgcgcccgcccaataacaaacgaacaaaaatggatagaggtgcaatggatatcattggcggacaacatctacgtcaaatgtgggacgatcttgcggacgtttacggtcataaaacggcgctgatttgtgaatccagcggcggagtcgttaaccggtatagttatcttgagttaaatcaggagattaaccgcacggcaaacctgttttatacgctggggattcgcaaaggcgacaaggttgcactacatctcgacaactgcccggaatttatcttttgctggttcgggctggcaaaaattggcgcgattatgcatgaagcggttattgctcttgcctcacccgataatatgaatgcattcgagctgacaccgcaggaagcggaggagtggtatcgcgggcgcgatgtttacccgcaagccgcgccagtggcggatgatgtattggttactttccagcatcaaccgattggtttagccaaacggattggttcgcgattgaaaaacagctatccgcgtgaactgaggtaccggctgattgtcctctttttcgccctgtgtttgcggatggcaccagcggaaaacatgaggcatcggttgccacaccgctttttttaccaggacgtaagagcggcgtcgtatcgcgccagaagccttcgattacgccgccctggtcagaaacgtccagctttagcgacccgtgggataaggtatagatggtcatccgctaactccttaatccgggaagttaatcacaactttcccgcatttgccgctcgccatcagcgcataggcatcacctgcctgttccagcgagaagcgatgggtaatggcgttacgcggccacagcttccagtccgtcagatcatgggcgcatttttccatatggaacagactggtcacccaggagccgataatccgccgttgatggtgcatcagatcggcgctgacctcgaattccacttttccggtttcaccaatgtaaaccacccgtccccagtcagcggtggattgcagtgccagcaagcgacctgcggcattaccggaacaatcgagcgcaacatccgcgccaccgtggtgatccacgagtcaatgcgcttctttattcgccatcaaccagaaaatctcaccctggtggtgttgtcacgcaaccttccgcaactgggcattgccaatctgcgtgttcgtgatcaactgctggaaattggcagtcagcaactggcatttacccatcaggaagcgaagcagttttttgattgccgtctgtcatcgccgattgaagccgcagaaagcagtcggatttgcgatgacgtttccggttgggcgacggcactacagctaatcgccctctccgcccggcagaatacccactcagcccataagtcggcacgccgcctggcgggaatcaatgccagccatctttcggattatctggtcgatgaggttttggataacgtcgatctcgcaacgcgccattttctgttgaaaagcgccattttgcgctcaatgaacgatgccctcatcacccgtgtgaccggcgaagaaaacgggcaaatgcgcctcgaagagattgagcgtcaggggctgttgggtaccgagctcgattcgtaa

SEQ ID NO: 140355 - DNA, 1022 bp, Homo sapiens
tacacctggcaataacgtcgattcgattttcttagccttctttttaaatcaatttttaaccttaggatatatcatgggtaaaacaatcagtataaaggtcctgttcggcatttatcttctattaatggcagccaaagtttttgccttcagttgtaatgtcgatggcggtattatttattggagcaggtacaacctctgtttatgttaatctcgaccctgtaatacagccgggccagaatctgggtgtagacttggctcatcatataagttgctggaatggtgacgggggctggtacgacactgatcatatgaacctggtacaaggctcagctttcgcaggctccctacagtcatatataggatcgctgtactggaataatgtgacctaccccttcccgttgacgacaaataccaacgtattggatattggtgataagacaccgatgccattaccgtttaaactctatattaccccagttggggcggccggtggagttgtcataaaagcgggggaagttattgcccgtattgatatgtataaaattgcaacattaggaagcggaaatccgagtaattttacgtggaatattattacaaataacaatgctgttatgccaacaggcggctgcaccgttgatagtcgaaatgtcaccgtggatctcccggactttcctggaagcgcagaaataccccttggcgtatattgctcaagcgaacaaaagctctcattttatctttcgggtgccaccactgacagtagccgacaagtgtttgctaacacagcacctgatgcaacaaaagcatcgggagtgggtgtcactctaatgcaacgccagctggcgggaatcaatgacagccatcttttgcattatctggacgatgaggtttgggataacgactatctcgcaacgccccattttctgttgaaaagcgccattttgcgctcaatgaacgatgccctcatgacccgtgtgaccggcgaaaaaaacgggcaagtgcgcctcgaggagattgagcgttag

SEQ ID NO: 140356 - DNA, 714 bp, Homo sapiens; identical to SEQ ID NO: 130165

SEQ ID NO: 140357 - DNA, 977 bp, Homo sapiens
agtacctgttcttcccgctcccacctccacctaattcaggcatccccaatccttccaaactatgtggccactgcagtagcagcacgcatcatagcagatgttcaaggaatctctgatacttgtgtgattgcgcagccttcaccaccacaccctggagctttgaggaccttagtattcaccacagatgaaccggagactcctcagcccccaggtgcagcaggattccagctggtccagaagaaacaagtgcagctgcataacgtactttatgtaatgacaccccatgcctttgcgcaaggaacggtgactatttatctgcctggcgaacaacagacactttccgttgcccccttgaaaaatgttgtccagttggtgacacaacagcatctgcgcgatcgcctctggtggcctggtgccttcctgaccgactttgcggcgaaagttaaagcgcttaaagacttcccaaccatgtcatggcacagcgtgcttccggggaagcagaagccgacgacgatgtggcggcaacgattaaatccgtgcgccagcagttactcaatctcaatatcactggtcgcttaccggtcaaactggaccctgattttgtacgagtggatgagaacagcaatcccccgttggtcggggactatacgctctataccgtacagcgtccgggtaccgagcaagggtcgttcaaggtgaagcgggcccgagctagagttcgtcaaacccgggcccctttatttggaccaaagtccccagctcctgagcacatggagtcagaactcgaatttgagcttatcggcccaagcaaatcaacaagtgggaatcctagagggcttcgttctgaaaggccagttctcttctgcctgtacccagagatgcccactgctgctgccagggctattttgattgcagaggagcagtcgcgtgaagtaaaaatcgcacttgttgtacttgaccggcttcaacgcgaataa

SEQ ID NO: 140358 - DNA, 1704 bp, Homo sapiens
atgtgctggatccagaccgacaactacaatatcgataccagcgtcacgggcctggcgatcatattgattctggcgatggtagtgctgtttgccattgagtggctactgcggcggatcttccgcactggcgcgcacacccgtggctgttttgtcggacgtaagcgtctccgtgcacgtaagcagaccgaacaggcgctgctgatactggcggaaggcgattatcagcaagttgaaaagctgatggcgatatatgccgatcacgcggaacaaccggtggtgaactatctactggctgccgaagccgcgcaacaacgtggtgatgaagcacgcgccaacctacatctggaacgcgcagcggagctggccggcaacgacaccattccggtagaaatcacccgcgtacgtctgcaactggcccgtaatgaaaaccatgctgcacgccacggcgtggataagctgctggaagttacgccacgccatccggaagtattacgtctggcggaacaggcgtatatccgcacaggtgcatggagttcgctgctggatattatcccatcaatggcgaaagcccatgttggtgatgaagaacatcgtgcaatgctggaacaacaggcatggattggcctgatggatcaggcgcgtgccgataacggtagcgaaggtttgcgtaactggtggaataaaccaaagccggaaaacgcgtcatcaggtagccgttaccatttgctttggcatttaaccgccgagcagaacgttgaagtacccgccgtctatgctggtcttgagcggaaacagcgactgcttcgtgcccaggagttgctgcaacggctggggctggaagaccgtacagagtattatccggcacagctttcgggtggtcagcaacagcgcgtcagcatcgcgcgggcattgatgaacggtggtcaggtaattcttgccgatgaaccaaccggcgcactggacagccattctggcgaacgcaggccccaggccatcctgcaagaagtgctgggtaagcatctgcaaccactaatgatgcccctcaaggccctggtgctgctcagaggtggcgccgccagccctgaagcccctattcccatgctcctgggaacgtctatgatccgcagtatgaccgcctacgcccggcgtgaaatcaagggtgaatgggggagcgcaacctgggaaatgcgctcggtaaaccagcgttatctggaaacttactttcgtctgccggagcagttccgtagccttgaacctgtcgttcgcgagcgtattcgttctcgcctgacgcgcggtaaagtggaatgtaccctgcgctatgagccagatgttagcgcgcaaggtgagctgatcctcaacgaaaaactggctaaacagctggtaactgccgcgaactgggtaaaaatgcagagtgacgaaggggaaatcaacccggttgatattctacgctggccgggcgtgatggcagcccaggagcaggatcttgacgccattgccgctgaaattctcgcggcgctggatggtacgctggacgactttattgtcgcgcgcgaaaccgaaggtcaggcactgaaagcattgatcgagcagcgtctggaaggcgtcaccgccgaagtggtcaaagtccgctcccatatgccggaaatcctgcaatggcagcgtgagcgtctgtcgcgaagctggaagatgctcaggtcaacatga

SEQ ID NO: 140359 - DNA, 4053 bp, Homo sapiens
  misc_feature (1)...(4053): n = a,t,c or g
ttatacgaagcgccgccgaaccaagccgttacggtcgagtttacaggcggcaaacggcccgtcgaacatcacaatgccggcggggccatccccgggctccatatgcatggagttaaggtcaaagaaggcacgcagttccgggtccatatccgggttgttctgcaagccgggtggtactaatacacgcatggcgcggatgatatccatcccgcctgccagcagcagttccagcatgtaatccttcgaagtgcagacacagcgggtttcgttagcgcacggtgcggcgtcgtgccgttcacgaataggcggtgtctgatcgtgggctatgtacctgctgaggtggccggcaatctgcttaagctctgttggtggtttgtctattgcgatggtcattcggggtaataaatccaacctctccgcaggggtaatgcaaacctttaccgttctgatgtcccatgtggcaccagaaattgagtggccggttcgcgtgatctccgcactgctgttgctgggtgttctggcgaaaatcgcctcctggattgttggtccttcggcggcgcatcgctggcggtaacccgtttcctgaagacaaaaatgcgtagccgcgatattcggtctgatttcgccatagccggaatccccgcgacaatggttgacctgcacgaaaaaggtttgatccgccacctgttggatgtgcagagctttgacagccatgctgcgcaatcgctggcccgtacccccaatcacatcgaaatcagcgccaaccagtacgctaactggggttcgaaaggcgcatcggttgatcgtctcgacgtggtggtactgagcgcgctgcaaattacaacccagttcaacgttaacgtgctgaccggctccggcggggaattgtgtggtgcatccggtggtccctgcgagtcccccagtgcctatgcgcattccatcatcgtcgctccggtggtacgcggtcgtatacgtactgctggcgataccgatcaaacgctcgaaggcgtgagcgatttccactgcgcgggtatccnccagcggagattcaatcgccgccagcaggccggtgctgccgggttcacgaccacaggctttttcgatacgcaggtcttctttttcaatatccagaacatcttgagcggtatcggttttcggcagacgcacaacgtccgcaccaccgcgaacgacggcttccaggtcgttaacaccccattcggaatccagcgcgttgacacgcacaatggtttcaatatcgcgatacagcggatgttgcagcgcgtggtaaaccatgcggcgggcggtgtctttttcacgcaatgctacggagtcttcgaggtcaaacatcagggcatcagccgggtagatgaaggagttgctgaccatcgcggcattggcaccaggcacaaacaacatgctgcggcgggtgcgagttttacgttgttgcagcgaagcggaaatcattggcaatccgctggcgcgtgccagcagggcttccagtcgtgcacgtaaaatgcagtccagtgcgcctttgtcatcgacattcagctgtacgccgcgcacgttgtagcgggcgagaacgtccagaatggtggtgcgaattgcatcgccaaactgtttctcaacgctgctattgatttgcaggtcgatatcctgcgtatcgagtggggcgatgcgtatcatcacatccccagactcaagggtgcgagctgccgcgtcctggcgggagtgctcaagcaggttctgcaaataatgcagcgtgtctgcagggaccagcggggtaccgagctcaaagccgaagatctgtcgcttaaaccgcataatccggcaagcattgagcaagatcaggttgttttgttcgtcaaagttgcccgcgtggccgatgctcaaaaaatcggcgctggcgcgacccgtatgaccattacccggcgcgacctgcttattgcccgtagcgctgcgnatgtgattgtcaactctggctactccaaagaaggtatctccatgcaaaccggcaccggcggcgcatcgctggcggtaacccgtttcctggaagacaaaatgcgtagccgcgatattcgcgccgacttcgcccttggcggtattaccgcgacgatggttgacctgcacgaaaaaggtctgatccgcaaactgctggatgtgcagagctttgacagccatgctgcgcaatcgctggcccgtaaccccaatcacatcgaaatcagcgccaaccagtacgctaactggggttcgaaaggcgcatcggttgatcgtctcgacgtggtggtactgagcgcgctggaaattgacacccagttcaacgttaacgtgctgaccggctctgacggcgtactgcgtggtgcttccggtggtcactgcgataccgcgattgcctctgcgctttccatcatcgtcgcgccgctggtacgcggtcgtattccgactctggtggataacgtactgacctgcatcaccccaggctccagtgtcgatattctggtcacagaccacggtatcgcagttaacccggcacgtccggaactggcagaacgtctgcaggaagcgggcattaaagtggtttccattgagaggatgcgcgaacgtgcgcgtctgctgaccggtgaaccacagccgattgaattcacagggggatcctctagagtcgacctgcaagccaaggagcaggatctttaacgccattgccgttgaaattctcgcggcgttgaatggtacgctgaacactttattgtcgcgcggaacccgaaggtcaggcactgaaagcattgatcgagcagcgtcgccgaagtggtcaaagtccgctcccatatgccggaaatcctgcaatggcagcgtgagcgtctggtcgcgaagctggaagatgctcaggtgcaactggaaaacatccgtctggagcaggatctggttctgctggcacaacgaattgacgttgccgaagaactggatcgcctcgaagcgcatgtcaaagagacctacaacattgcattgcggcgttgttgatttcgatcgatcgtcaggacgcgggcggggcaaattccgccgattcaggaagttgagcgtgattacggctgcaaagtgatctctatcatcacccgaaagccttgattgcttaccttcacagaaggccaggatctggcttgccagcagggtttcatcggtggtgtaaccttcaccctcacgcattctcttttcacgcaatacctggcgcagatgcgcttcaatacgctcgaacagctggttgatgcgcccttgcaggcgatcctgttcaaacattagcgcatgaccagtgaggatgcgggtcaggccaggattacgctcaccaaaaccgagaagcagcaactcaatcagacgcaggcgcgctgtggtgtctttctcatctttcagaatcaggttgatgcgagtaatcaggctatcttcgataaactcaatcaggctatcgaacatgcgggtcttactggggaagtggcgaaacagtgccgcttcggaaacgccgacagaggcggccagtttagccgtcgtgatacgttggggggatacctggttttcgcattgttcacgacgggtgttgtattcgctgccaaccagggtacgtttgaagttactgttgatgatgacgacagccacacctttgggcatggaaactgctttggtccccagtgagcggcaatcgatcagcaaggcatgatctttcttgccgagcgcggaaattagctgatccatgatcccgcagttacagcctacaaactggttttctgcttcctgaccgttaagcgcgatttgtgcgccgtccagcggcagatgataaagctgctgcaatacggttccgaccgcgacttccagtgaagcggaagaacttaacccggcaccctgcggcacattgccgctgatcaccatgtccacgccgccgaagctgttgttacgcagttgcagatgtttcaccacgccacgaacgtagttagcccattgatagttttcatgtgcgacaatgggcgcatcgagggaaaactcgtcgagctgattttcataatcggctgccat

SEQ ID NO: 140360 - DNA, 3273 bp, Homo sapiens
atggaatggcaccagcgtgtcatcagtcagtgcgatgctttcagcaacctgttgctcttcacgtaccagttcgatgaatgtgtcgttgaccggcaacccatagaactgcgggcccgtttacagacagaatgcttcaaagtgctgcaagcattcatttcttcaaagacggtagcgagcgcacgcgtgaactttttcctctcttcccgctggtcggtacgcctggcgctgatcattatcgccctgctggcgctgattgcgctcaccagccagtggtggctgccgtatgacccacaggcgattgatttgccgtcgcgcctgctttcgccggatgcgcagcactggctgggcaccgatcacttaggtcgcgatattttctcgcggctgatggcagcgacccgcgtgtcgctcggttcggtaatggcctgcctgctgctggtgctgacattagggctggttattggcggcagcgccgggttgattggcgggcgcgttgatcaggccaccatgcgcgtcgccgatatgtttatgaccttcccgacctcgattctgtcgttctttatggttggcgtgctcggcaccgggctgaccaacgtaattatcgccatcgccctgtcgcactgggcgtggtatgcacgcatggtgcgcagcctggtgatttcactacgccaacgcgagtttgtgctggcgtcacggctttccggtgcgggccatgtgcgggtgtttgtcgatcatctggcaggcgcggtgatcccttcgctgctggtgctggcaacgctggatatcggccatatgatgctgcacgtcgcggggatgtctttccttggcctcggtgtgaccgcgccgaccgccgaatggggcgtgatgattaacgacgcgcgccagtatatctggacccagccgctgcaaatgttctggccggggctggcgctgtttatcagcgtgatggcctttaacctgcttgattatatcgacctctacttaatgcactggcccgttcccgctggagaccattatgtcgaagcatggaaaggcatgatcgaattgcaaaaagagggattaatcaaaagcatcggcgtgtgcaacttccagatccatcacctgcaacgcctgattgatgaaactggcgtgacgcctgtgataaaccagatcgaacttcatccgctgatgcaacaacgccagctacacgcctggaacgcgacacacaaaatccagaccgaatcctggagcccattagcgcaaggagggaaaggcgttttcgatcagaaagtcattcgcgatctggcagataaatacggcaaaaccccggcgcagattgttatccgctggcatctggatagcggcctggtggtgatcccgaaatcggtcacaccttcacgtattgccgaaaactttgatgtctgggatttccgtctcgacaaagacgaactcggcgaaattgcaaaactcgatcagggcaagcgtctcggtcccgatcctgaccagaatgccaaatataaggacatcatcatgcagagccggaagctcttaaaagaacaactcatctatatccgggataaacgcaacggagagtcatataaaggatcgctgtactggaataatgtgacctaccccttcccgttgacgacaaataccaacgtattggatattggtgataagacaccgatgccattaccgttaaaactctatattaccccagttggggcggccggtggagttgtcataaaagcgggggaagtcattgcccgtattcatatgtataaaattgcaacattaggaagcggaaatccgcgtaattttacgtggaatattatttcaaataacaatgttgttatgccaacaggcggctgcaccgttgatagtcgaaatgtcaccgtggatctcccggactttcctggaagcgcagaaataccccttggcgtatattgctcaagcgaacaaaagctctcattttatctttcgggtgccaccactgacagtagccgacaagtgtttgctaacacagcacctgatgcaacaaaagcatcgggagtgggtgtcactctaatgcgtaatggaaaaatactggctacgggagaaaatgtctccctggggacagtaaataaaagcaaaccagacaggtatgccgccgacgcgtgcggaaatcgcgcagtattggggttccgttccccaaacgcggctgaagaacatctgaaggcgctggcacgcaaaggcgttattgaaattgtatccggcgcatcacgcgggattcgtctgttgcaggaagaggaagaagggttgccgctggtcgtgtggctgccggtgaaccacttctggcgcaacagcatattgaaggtcattatcaggtcgatccttccttattcaagccgaatgctgatttcctgctgcgcgtcagaggatgtcgatgaaagatatcggcattatggatggcttgtctgcatggcattcctcacttcatctgataaagcactctggcatctcgccttacccatgattttctccaatatcaccgttccgttgctgggactggtcgatacggcggtaattggtcatcttgatagcccggtttatttgggcggcgtggcggttggtgcaacggcgaccagctttctctttatgctgttgctgtttttacgcatgagcaccaccgggctgactgcgcaggcttatggtgccaaaaatcctcaggcattagcccgtacgctggtgcaaccgttgctgttggcgttgggggctggggcgttaattgcgctgctgcgtacgccgattatcgatctggcgctgcatattgttggcggtagtgaggcagtcctggaacaggcgcggcgctttcttgaaatccgctggttaagcgcaccggcgtcgctggcgaatctggtattactcggttggttactcggcgtgcaatatgcccgtgcgccagtaattttgttagtggtcggcaatatcctcaagtattgcttcattcattgccacggcgagttgaaagtctggcggccgagcggttatcccgtctctgtactatctagttacagctgcacttaccgggatttagcgctagtactgtactcggtttatcgcgacatctcggcgaatgggtttagtcatcacgtctctatcgagcattccttgctaacgctctctcgtccggctgacatgatcatccggatccaggacctcggcggctacatcgaccggctagactgtgcattatttctaatcggcttccaacacttccctgttgatcgcacgatagatggtcatatcatccgttaa

SEQ ID NO: 140361 - DNA, 2049 bp, Homo sapiens; identical to SEQ ID NO: 132071

SEQ ID NO: 140362 - DNA, 1533 bp, Homo sapiens
ctaattcaggtaatacccgaagacttgggttgctcctgggaaatacctatactgggacttccttgaagtacagcccgtcatggccatgactgactctttcttagtggcctcatatggctgcacgatcccctggtagcgaagcctggttgcgtcgtctgtttttacgctataccggcaagacgccgaaagaatattacctcgatgcgcgtctggatctggcgctatcgcctttctgaaactgcgggatatcgccgaccaccagtggttcaggccgtagtagcgcacgcgcatctgtttgcgatcttgcagcccaacaatttgcgccatccggctttcaataccgattggcatgtcacagatgttgaggattttcgcattcgggcgcagacgacgcgtggcttctgcgacaatggctgccgggttggagtagttgagcatccaggcattagcacgtttcagctcgatggcggagtttgtcacttcggcattgatagacttcgacgcaagagtgttcgactcgcggttgaactcctgcatcataaaatccagacgacgaccaaccgcttcttttttcttcagaatgttgtaggtctctttgacatgcgcttcgaggcgatccagttcttcggcaacgtcaattcgttgtgccagcagaaccagttcctgctccagacggttgttttccagttgcacctgagcatcttccagcttcgcgaccagacgctcacgctgccattgcaggatttccggcatatgggagcggactttgaccacttcggcggtgacgccttccagacgctgctcgatcaatgctttcagtgcctgaccttcggtttcgcgcgcgacaataaagtcgtccagcgtaccatccagcgccgcgagaatttcagcggcaatggcgtcaagatcctgctcctgggctgccatcacgcccggccagcgtagaatatcaaccgggttgatttccccttcgtcactctgcatttttacccagttcgcggcagttaccagctgtttagccagtttttcgttgaggatcagctcaccttgcgcgctaacatatcctttcatcggattggttttcagcttgccgttttccaccagcttctgtagcgcatctaccagcgccacgcaggcacccgtaatcgacgcggtacgcgtgccaccatcagcctgaagcacgtcgcagtccagcgtaatggtgaactcacccagcgctttcaaatctactgccgcgcgaagagcacgggcgatcagacgctggatttccattgtgcgtccaccctgcttacctttcgccgcttcacgagcgttacgggtgtgggtagaacgtggcagcatgccgtactctgcggtgatccagccctggccctgacctttcaggaagcgcggcacgccttcttcaatagaggcggtacacaacactttggtatcgccaaattcgaccagcaccgagccttctgcatgttttgtatagttacgagtcagggtaacgggacgcacctgattattgctacggcctgctggacgcat

SEQ ID NO: 140363 - DNA, 4107 bp, Homo sapiens
atgtacgatcatctgggtaaacgcaccagcttgccgggatcaactggtttgcgttttggcgcaaattcagtgttaaaaccggaaattaagcgcggattcgaatattctgactgttgggtagacgacgcccgtctggtactcgccaacgcccagatggtggtgcgtaaaggcggcgaagtgcttactcggactcgcgccacctctgctcgccgcgaaaacggcctgtggattgtggaagcggaagatatcgataccggcaaaaaatatagctggcaagcgcgcggcttggttaacgccaccggcccgtgggtgaaacagttcttcgacgacgggatgcatctgccttcgccttatggcattcgcctgatcaaaggcagccatattgtggtgccgcgcgtgcatacccagaagcaagcctacattctgcaaaacgaagataaacgtattgtgttcgtgatcccgtggatggacgagttttccatcatcggcactaccgatgtcgagtacaaaggcgatccgaaagcggtgaagattgaagagagtgaaatcaattacctgctgaatgtgtataacacgcactttaaaaagcagttaagccgtgacgatatcgtctggacctactccggtttctgccagcccttgttgataacccgcaagaatgtcgttcagcaggctcagccggtaaaattgttcacttttcactttccccagccacagccaggtaccgggcccagcaagcacaggtttcaccttgtggcccagcgccagcgcctcgtccacttcgtccagcagttgcgtccaggtcagtttgaactgttggcctttaacgaactccggcaccatgtagtgatagttggtgttaaaccatttggtcatttccgctgccgccgcaggttcgccagtcggcgcacgtccacgaccaatacggaacagggtgtcgatatctaccgaaccatctttgttctgatgacgcgccggaacgttacccagcagcagactggtggtcagtacatgatcgtaccaggcaaaatcgcccaccggcagcaggtcgatacccgcttgcttttgttgatcccaggtgacgagcacgcaattcacgccctaccgccagcagttcttcacgcgtggagttccccgcccaataactttcttgcgcttttttcagctcgcgacgcaggccaacgcgagggaaaccgaggtgctcgtaaagcggctgttcgatatcttgtgggttatatgtcttttccattatttccaggttgccgtattcaggttgaaaccagccacgcggtaggctttatagcgttcgcgcgccagttgtttcagagaatcttcataaggaacgaagtctaccacttctgtgaaagcggtggcaaaatctgcaaagcttgttcgcagactaatcaatatatcgcgccggctgctgctacgcttcctgcggccaggcgatctccaccgggcttaaatccggtgatggtcggggcgattcccttcgatccacgtcagccttcgtcgctgtatattcctgaatcctggcagtcgttctcccgtcaggaaaaacaagcttccgcacgccgtttcacccgcagccagtcgctgaatgtggtggaacgccaggcaattccggagcaaaccacgtttgaacagatggttgcccgcgccgccgcacttaccgccacgccgcaggtcgacaaagtggtgttgtcacggttgattgatatcaccactgacgccgccattgatagtggcgtattgctggaacggttgattgcgcaaaacccggttagttacaacttccatgttccgctggctgatggtggcgtcctgctgggggccagcccggaactgctgctacgtaaagacggcgagcgttttagctccattccgttagccggttccgcgcgtcgtcagccggatgaagtgctcgatcgcgaagcaggtaatcgtctgctggcgtcagaaaaagatcgccatgaacatgaactggtgactcaggcgatgaaagaggtactgcgcgaacgcagtattaacttgtgtatcgatgttcggtgtcatcgtccgtcgacatccgtgcggtccgcgtcgtcgtcggccgtgatagtcggcccccgcgaagccctgctcgacagcctgaaaaaactccagcttgattatatcgacctctacttaatgcactggcccgttcccgctatcgaccattatgtcgaagcatggaaaggcatgatcgaattgcaaaaagagggattaatcaaaagcatcggcgtgtgcaacttccagatccatcacctgcaacgcctgattgatgaaactggcgtgacgcctgtgataaaccagatcgaacttcatccgctgatgcaacaacgccagctacacgcctggaacgcgacacacaaaatccagaccgaatcctggagcccattagcgcaaggagggaaaggcgttttcgatcagaaagtcattcgcgatctggcagataaatacggcaaaaccccggcgcagattgttatccgctggcatctggatagcggcctggtggtgatcccgaaatcggtcacaccttcacgtattgccgaaaactttgatgtctgggatttccgtctcgacaaagacgaactcggcgaaattgcaaaactcgatcagcataatggggtcgaaataatactcttcggcgttagcggtagtgcaaagcatgccgctgccagtgagcaccatcggcaaacaacgtttgatgatgagcgccaactgtttcggtgtgcgtttatgtccctgcgactggcaaatctgccgctggtgcgaattggtgaagacgcgcaccgcaacccgttaatgcagaacgaaaaacgtaaaaatttgaccatcctgattgtcggcgaaacctcgcgggcggagaacttctccctcaacggctacccgcgtgaaactaacccgcggctggcgaaagataacgtggtctatttccctaataccgcatcttgcggcacggcaacggcagtttcagtaccgtgcatgttctcggatatgccgcgtgagcactacaaagaagagctggcacagcaccaggaaggcgtgctggatatcattcagcgagcgggcatcaacgtgctgtggaatgacaacgatggcggctgtaaaggtgcctgcgaccgcgtgcctcaccagaacgtcaccgcgctgaatctacctgatcagtgcatcaacggcgaatgctatgacgaagtgctgttccacgggcttgaagagtacatcaataacctgcaaggtgatggcgtgattgtcttacacaccatcggcagccacggtccgacctattacaaccgctatccgcctcagttcaggaaatttaccccaacctgcgacaccaatgagatccagacctgtaccaaagagcaactggtgaacacttacgacaacacgctggtttacgtcgactatattgttgataaagcgattaatctgctgaaagaacatcaggataaattttccgactcactcccggttaatggcgctatcccaccgccgccgaccacttcaccctcgctgactatatacttgatacagctcgtcaagattcggatcggcgacggtgtagcctttatcagcggtaagaccgtattcggcggatacctgacgaatgacgcgggcgatagcaggattatcctgcagcgtcaggcgacgcattacagcaaaaggctgatcatcagcggtcgcgagctattagtatcagatcagggaaatagtgtagccgcaaaaaaggttctgctcaccctgtgggattatatgtctacgcccgaccagattaagcggatgcaggacgtcattagcaacccaaaacgactggatggaattcccgtgcaaatgaatgctgtgcatatccgatttgacagcaactcccccgtgatggcagatgtgcaggaagaaggcaagccgcagctgtggaaccataaacaaaatgatgctttaggtctttaccttgatctccttatacaagcaatcaacactggtactattaacgctgaagattggcaaaaaggtgaccgattaaagtcggttgcgctgctgattgcttatctggataaagccaatttctatgttatggaagattcctga

SEQ ID NO: 140364 - DNA, 2091 bp, Homo sapiens
tcagggctgtgcctgggagcaagagggactcaaagacccagagcatctgtttgcttgctgttttgaattcacgccatcccgcttgagtttttcttctgtttgggtagctcgaaagagattagccgccagttctgttgaacccatatgatccaggatcttctgattctttttcagccccttccgctgatgaatagctttctgatctaatccaccatacagcccctggtaaccatgattctgaaatatggcgaaatcagtagctgtcgctaccccagcttgctgtgctgcctcaaccaattgtttgttatgttctttcaactcatttctcagaaacagacgcttttcgtcttcacgaagttgcttaaatgcttcatcgtcagcaagctcctgccgtcgggtagccactgtgtttgcttgctgttttgaattcacgccatcccgcttgagtttttcttctgtttgggtagctcgaaagagattagccgccagttctgttgaacccatatgatccaggatcttctgattctttttcagccccttccgctgatgaatagctttctgatctaatccaccatacagcccctggtaaccatgattctgaaatatggcgaaatcagtagctgtcgctaccccagcttgctgtgctgcctcaaccaattgtttgttatgttctttcaactcatttctcagaaacagacgcttttcgtcttcacgaagttgcttaaatgcttcatcgtcagcaagctcctgccgtcgggtccgcgcgaataattcaccgttcagatagatatcatggcgcatggctaactgactaatcgtccgcaggctcctcgaagaccatcctggggcacgcaatcggggctctggcacgtacataaactgcgtcagaactgggaaaatcctgctcacgggaccacacaccttgcacggcatccgttcgagcactttattacgcgcggcttcggcacgctccggccaacgatccgggcgaagacggctgggcgcttgcggcaaaaccgccagcattgccgcctcggaatagcttaaattcgcaggcgattttccgagataagcccaacttgccgcaccgatcccctgcaacgtaccgccaaacggagcgcggttaagatacaaggtcagaatttcacgcttagacagatgccattccagttgcaacgcgcgccagagctggcgaattttgccgccaaatgttttggggtgaggatcaagcagacgagcaacctgcatagtgagcgtgctgccaccggaaataacccgtcccgaagtgagatcttgccatgctgcgcgcgccaccgagaatggattcacccccggatgcttccagaaccagcgatcttcataattgatcagcgcttcaaggtaacgtggagaaacatcttcgattgttaccggataacgccagatgccgtcagcatcggcgaagcgccagagcggcgtaccatcctgcgccacgaccactcgtgcgggattgacttcatgcagcggtagaggccagagtttatctgctccccacgcatcagcgaatttcagccgggcccgttccccgccatgggggacatccttgggcccccaccggtgcgggaccggtacttcccggggcaccgccggaagcggaccccccggtatgcacacggaacccgccatcgctttcatcaaatcatagtatttgtcgaaaatagccttgtcgccgcccaccatcactgacagcgtaccgtcgatggctttcggttcaccgccgctcaccggagcatccagcatatcaatgcctttcgctttcagcgcttcgctgatttcacggcttgccagcggtgcgatagaactcatatcgatcaataccgtacctggcttcgcgccttcaataatgccattctcacccagcgccacctctttcacatgaggggagtttggcagcatggttatgatgacgtcgcactgttcagcgatcgctttagccgtagacgctgtttctgcacctgcagcaatcacgtcagcaatagcttctgggttacggtcagcaaccaccagcgagtaacctgctttcagaaggtttttactcattggtttacccat

SEQ ID NO: 140365 - DNA, 1914 bp, Homo sapiens
tcaatcccaccaaacagccccttggtaaccatgattctgaaaatatggcgaaatcagtagctgtcgcaccccaagctgttgctgtgctccttcaaccaattgtttgttatgttctttcaactcatttctcagaaacaaacgcttttcgtcttcacgaagttgcttaaatgcttcatcgtcagcagctccctgccgtcgggtctggatagcaaaataagtctgccctgccgcaatgaccggtttcgcagggtcgccgttttgtactaccaggtaacaggcatagcgggagagtacgatgtcttttaatgctcttttggcatttgagccaattttgaccatatcgaggatctcctcgaaatggtcatcaattgtgtgaccacatgttattacacgctgtatttgacgcgcggtaatacaggtataaagtgacgatactctgaataacccagtagtttcccaagttgtcttgctgaccattgttctgctccgtttgcattaatcagttttatctcttcaaaaggttgatgatgttcgttcattgcccactccatgtgatatcaattgcaaagaaagtaaatctgtaactgtatttatatacagctgtgagtatctcacgttctcagtgtgctgggcaaaaaaacatcgcaaaatctggagcaggcacgcaaaacagaattgaatgttgcggggaagaaaaatgccgctctgtttgagtggcggcatttgtgaaggcggaaaagtaagaattggcgttacgagttattcgatgttctgaatctgctcgcgcatctgctcaatcaacactttcagctcgatggcggagtttgtcacttcggcattgatagacttcgacgcaagagtgttcgactcgcggttgaactcctgcatcataaaatccagacgacgaccaaccgcttcttttttcttcagaatgttgtaggtctctttgacatgcgcttcgaggcgatccagttcttcggcaacgtcaattcgttgtgccagcagaaccagttcctgctccagacggttgttttccagttgcacctgagcatcttccacgttcgcgaccagacgctcacgctgccattgcaggatttccggcatatgggagcggactttgaccacttcggcggtgacgccttccagacgctgctcgatcaatgctttcagtgcctagacttcggtttcgcgcgcgacaataaagtcgtccagcgtaccatccagcgccgcgagaatttcagcggcaatggcgtcaagatcctgctcctgggctcgccatcacgcccggccagcaactgttcatcaccattaagctttggaacgacgaccaccaagcgcccccgcgaagccttgctcgacagcctgaaaaaactccagcttgattatatcgacctctacttaatgcactggcccgttcccgctatcgaccattatgtcgaagcatggaaaggcatgatcgaattgcaaaaagagggattaatcaaaagcatcggcgtgtgcaacttccagatccatcacctgcaacgcctgattgatgaaactggcgtgacgcctgtgataaaccagatcgaacttcatccgctgatgcaacaacgccagctacacgcctggaacgcgacacacaaaatccagaccgaatcctggagcccattagcgcaaggagggaaaggcgttttcgatcagaaagtcattcgcgatctggcagataaatacggcaaaaccccggcgcagattgttatccgctggcatctggatagcggcctggtggtgatcccgaaatcggtcacaccttcacgtattgccgaaaactttgatgtctgggatttccgtctcgacaaagacgaactcggcgaaattgcaaaactcgatcagggcaagcgtctcggtcccgatcctgaccagttcggcggctaa

SEQ ID NO: 140366 - DNA, 794 bp, Homo sapiens
cacggttagtcgctcaatcgaatagcacaattatcaatactgacagcggcatcattgatttgtatggtcgtggtagtgtcggcatgcttgctatagcagattcaacagcagaaaatcagggtatggcggcctatggcgccagcaatacagttattaaccaggggacgattaacctcgaaaaaaatggtaattatgacgatagtctggcagcaaatactctggtagggatggctgtttatgagcatggtactgctatcaacgaccagacgggtgttatcaatatcaatgttggtactggtcaggcgttttataacgatggcacaggaacaattgttaactatggtacaatctgcactttcggcgtgtgccaatcggggaatgagtacaataatacagatgatttcacctcactgatctataccggtggcgatacgattacacgaagcggagaaactgtaacgctaaataaatctgctgctgtgactgataagctggctgggaatgttgttaatagcggaacgctttccggtgatcaaattacggtatcaagcggtcttctggaaaataccagcggtggcatcatcaataacttagtaaaacttgacaagggtgccgtcattaaaaatgccggggtgatgacgaataacgtcgatgttagcggtggaatcctcaataatgccggagaaatgactgcgcaaattaccatgaatgctggtgctgatagttcgttagtgaacaacaccggaaccatcaataaaatcaccaatgcactccagcctgagcaacagagctag

SEQ ID NO: 140367 - DNA, 735 bp, Homo sapiens
ctattcaccttcctgcaaggctttggtgatatgttcccgctggcctgggcagggatcttcatgttctttatgcgcctttatgctcggcttctcggaagcgccatcattcccggcgaacgcccgaattgtggccgactggtgtccgacgaaagaacgtggtactgtcttcgccatttttaactcggcgcaatatttctcgctggcgcctctttcgccgctgcttgcgtagctggcttttgcctggggctggggacacgtctttaccgttatgggcgtggatgggtgttgggctaccgcggctgtgatccagttggttccatcatctacttcaccgcatgacaaaccgcaacaaacccaaaggtggcggtcaccatcggcgccgcgccaaatccagatgcacaatccatccgcttcggcccttctgccgtggctttcatcgcacacaccgtaccgtctgactttactgtttttcactacgccaaaatcgcttttcaggcgctcgcgcaacttcgccgccagcgggtcctgaatcgttttcgccagatcggtaacctgaatctgcgtcggatcaatctgcccacccgcgccaccggttgtgaccagtgggattttattgcgccgacaataagcaatcagcgccgctttgggccggtacactatgttatccggcgtcacgaaatcatccaccaccgatacacggcactccggggtaatctggcgaatacgctccgccat

SEQ ID NO: 140368 - DNA, 424 bp, Homo sapiens
atgcttgctatagcagattcaacagcagaaaatcagggtaaaattacactggattctatgtgggtagatgcaaatgacactaccgcaatgcgagatatagctagcaacagcgccattgacttcggtacagccacggagctttccgcgattcatggtcactcaacgtcgcaatatcgccttggagaattttatcttcatggtagcgacggtaaaccactggattatacacaggcgagatactggtatgagcaatcagcggaacaggaaaatccacgcgcgcaaagtaaactggggtggatctacctcaaaggtctgggggtcaaacccgacacccgtaaagcaattctctggtataaggaagcagctgaacaagggtatgctcatgctcaatatactttaggtttgatctacagaaatggctcag

SEQ ID NO: 140369 - DNA, 1361 bp, Homo sapiens
gtcacatcaccgcaccacacctgatttgggttccgttacggcgaactgtcgctcaaattgtttcgggatagcaacgtgctcatgaccgccacgcttataccggtgagtcggctgctggcaactgaccagccccagctctttcatgagtctgccagcaagccagcgccccatctggtatcctctctgggttgccattgtggcgatgcttcttgctccgcagagccgtggctgatgccatgcagttcaagtacctgactgcgtaatacagcccgtctgccgtctggcttttcaggacggtttttccagtatttgtagctgctgcgatgaaccccgaacacatggcagagagtggccacaggataacgcgccctgagtttcccgattatcgagaactgttcagggagtctgacatcaagagcgcggttgtagattcaatctgtcaatgcaacacccctttcaattatctctttcggtgttttgaacttcagtgtctttctcggtctgttgtttagctgagcagcaaccagatctagttcatgttgagtatattgggcaagacatgtctttttaggaaagtactgccgaattagcccatttgtgttctcatttgttccccgctgccaaggactctgaggatcgcagaagtaaactttaacgccggtgctgacagtaaattctagatgtctggccagttccattcctctgtcccatgtcagtgattttctgagttctgacggtaaactcaggaatttgtcggtaagagcctgatttactgagacagaatctttgcccctgagtctaaggatgatcgtataacgtgattttcggtctacaagtgtggctatatgagagttttttgtacctgagactaaatcgccctcccaatgccctagagagcgtctgttatcgatatttcgggaacgttcgtgaattggtgttccgttcactatgttaatcgtacctctttcgcctttgcgggtatgacgcctgccatggcgaaggctatgcgaccgtcgcagatgctgtatattcaggtggtgtagcgcttcacggctacgaaagtacagcgttttataaattgtctcaggtgatattcgcagcgttttttgacgtggttttgttcgccttaaccatcctgatatttgctctggagaccatttcatctccagcttttccagaacaagctttcgcaatggtaaattttgatccagtaagcacggttttggccttttcgccattctgttggctcggttattagcatcaacagctttgtaatagcgtctgccccgattacgctgaacttcacgtgagatcgtcgaaggactgcgattcagcgcagtagctatcgcacgaatgctcat

SEQ ID NO: 140370 - DNA, 2895 bp, Homo sapiens
tcatcctgcagtcgcattagaggagccccttgctaggaatcgccgctgattcgggccgatcaggggattaacgtctgggaactgattcgcctggcgaatcgtcaccctcgcgttaatattcttcagcctggccctggcgtgggcggtcactgcattgctgttgatccgtggtttatcgtggcacagaacccccagcaggcgcggcttatccgtaccgcgcgcgaagtgaacgatcacaaaccgttctgggttatcgatcaggtgaaagcggcggtggctgattgcctggcggctaccgataaacgcgccagtgaactgaaaatcgcctgctttggtctggcgtttaaaccgaatattgatgacctgcgcgaaagcccggcgatggaaatcgctgaactgatcgcccagtggcatagcggcgaaactctggttgttgagcctaacattcaccaattgtcgaaaaaactgaccgggctttgtactctggcgcagcttgactaggcgctggcaacggcagacgtgctggtgatgctggtcgatcatagtcagttcaaagttatcaatggcgacaatgtccatcagcagtatgtcgtcgatgccaaaggagtctggcgttctcaccgcttcattcgccagcagcgcatcaccagtatcggaaagcactacatggccgttttccagcacgtagccgcgatccgccagctttagcgcctggttggcgttctgctcgacgagaaagatagtcatcccctgctcgcgcagctgctcgatggtgtcgaaaatttgctggatgataatcggcgcaagaccgagcgatggctcatcaagcaatatcaaacgcgggttgctcatcagcgcacgaccaatcgccagcatctgctgttcaccgtctgtctcatttatgatcatcgccgcgctgatgatgatgggcattgataccggctggctgctggtagctgcgggattcgtcggcgcaatcgtcattgccagcgccgcccggggcgtaactctaagcgcctgattgcactcatctctgcaatcggtatgtccatcttcctgcaaaactacgtcagcctgaccgaaggttcccgcgacgtggcgcctagctcggtacctttgacgcccgcttcgttgctcattgctggctcgccgccgcattaaacgatatcgcgcctgtccggccccctgctcagagaaataatgctcaagcagctgtaccattgcggaaagtccctgacgaatctgcccatcagagagattttgcggatgtgaggataactcacgggcgaggaaatcgagctggcgcgcggtgacttccacattagggacatttggcaccgtgccgttacgaatacggcgcataaaacgggcatcacgcaagcgcagcaccggcattaaacgcaccagatggcgtgcctgatcgttaatatcctcgacatcaatcggatgtccgtctttatcgagaaaactgcgcagtgtcatcacgctgccgtcttccgcactctccccttccagacgataaaaaatacggtgatagccatcggtgcatggcgtccagcacgcttccagcggccgataacggcgaacccgatgtcggcctggcagcgattcgcggaaggtcaaaataatatgcagatgatgttctcgcccgttgatatctcccggcgggaaccagaaatcgtcgcgctcaaaatggtagagatctgattccaccccgcggcagcagtggagggcgtcgccctcccgggccttccgacgcagaccctgccatccggatgctgcgggaagtagggcatcctcacgtccctgactcctccggctccgcgcgctcacggaacccaagtggagtgggaagcggtcacacaggcgtgtgccgtccccgaaatcgttgctcccaggcattatatggcatgacgacggatcatgccccggacggtcagcgacgaaggtgatcaggtcacgatagtgcgccacgccgtgcggcttgttcggagccagttcttccagcagctcgcaaatggtttccacaacatcgagattcttacgctcgttgtgaccaccaatattataggtttcaccgactttcccggtggtcgccacgcaatacagcgcgcgggcgtgatcttccacatacagccagtcacggatttgctgcccgttgccatataccggcagcgatttacccgccagcgcgttgaggatcatcagcgggatcagtttttccggaaagtggtaagggccgtagttattcgagcagttggtgataagcgtcggcagaccatatgtccgcagccaggcgcgcaccagatggtcgctgctggcttttgacgcggaataagggctgctcggcgcatacggcgtggtttcggtgaagaaatcatccgtcgagtgcaggtcaccatatacttcgtcagtggagatatgatgaaaacggaacgctgattttttatcttccgtcagcgcattacaaaaagcccgcgccgcttcaagcaatgtcacttctgtgagggagagctcagacaagttgtctatcagccctgtgcaacagagtgaggattcagtaaaagaagtccagaactccatggtggtttgaaggcaacagtctggtgtttgctcgaggtagggtttctcaacctcagcactactgacattttggaccagataattcttcatagctgccttaagctcaacttttcggcggggatccctctgcagacgtgcaggtggcgggagagcagaggtagccgcagtaagtgctgagagagcctgaaagaaacaccatgaattttcaaactctcccacatacattcccgaagcgcctgtctggcgttttcttgtttctgccaagtaattttcatacatccctgcaagtgactcacactttctgtcctccat

SEQ ID NO: 140371 - DNA, 1302 bp, Homo sapiens
gttatccggcctttccggctggtggggcccgcctcgcttttgcaagttgtgatttttcgccgtggggcccattgcggtgggtggacccttttttttagggggtaaattgcccgggtaaaaggagacagtattacacctcgagttcggataccatcacgcgccagcatctcaatataggccaggcaccagtgcgcgaacgtcaccggctgggcgcgttgcaggtgagtgtaacctggcattaccgcgtcctgatagttttgtgcggtttccaccagcgccgattgcagctgccggttagccgtcagtaactcgctaacggtatctttgcaccacagtttcaggtcagtcgctacctgatcattacggctacgcccggtatgcagctttttgcctaactggcccactttgtcgatcagtttgccttccacccagctatggatatcttcggcgtcgctttcaaggatttgttgtggcctggcgcgaacatcttccagcaacacgttcagcgcctcttccagttgcgcctgctcttctgcggttaacacgcctaccgtgaccagggctttggaccaggccacagagccaacaatatcctgctccgccagacggtaatcaaagcgcagtgagtcgttgaatggtttgaaccgttgatctgcgtgaatggctgggagagtaagtggcccgttttgctgtcggagtagtaacctgaaaccgtcggcacaaactgcgactcatcgaactgaatccctgcctctttaaacacgtcatacaccggtttaatggctttcgacgccatcatggtggcggtgccaacttcataaacctgcaaaatacgtcggcgcgttgccggtacgaaatgcggcaatccccgcgcttaaattctgttcgtagttgcctttataggtcggtacaattttgtaatccgggttttcggcgttaaaacgttgggccagagaatccacctctttacccggttccccttccatagaatgccagaacggaatggtcgtcactgcctgtgcattccccattaacgccagtccgagcgccagtgctgaagctgtataatgtaacggtttcatcgtttatctctcttgttgtaccgaatgcgcgaattcacgcgttttatgctcgcggggtaacatgacatgctcgaattacagaaaaataacttttttgttacatttgtaagatagtaaggtgtcagaaagatgacaaggcggtgacggcgtgggtgagggaaaatgggagatggggcacggataagcgggaaaatatagaaggtctgaatcaaactctaca

SEQ ID NO: 140372 - DNA, 3081 bp, Homo sapiens
tactatttcgagctccgtccccggggatctggttgctgctcacctaaacaacagaccgagaaagacactgaagttcaaaacaccgaaagagataattgaaaggggtgttgcattgacagattgaatctacactgttgaaattcagaatttaggttttgcttttgttactggtgaaaatacaacaggtataaatagtggcacgatctcgttattacaaaatggtaaagatccggcaccgtctcccattgttttactggctactaacggagggagcgccactaatgcaggtacgatcacaggtaaagtgacggaacaacatagcgtatttaacaagtattcaacgggcacatcgaattcatttatttttaataacgatgtcagtagcataacagggttagtcgctcaatcgaatagcacaattatcaatactgacagcggcatcattgatttgtatggtcgtggtagtgtcggcatgcttgctatagcagattcaacagcagaaaatcagggtaaaattacactggattctatgtgggtagatgcaaatgacactaccgcaatgcgagatatagctagcaacagcgccattgacttcggtacaggtgtgggagttgggactgataggtatagggggggcaggaaaaatgccccagcctttaacccaattgggcggtgttataactatttataacgccggcgcaggtatggcggcctatggcgccagcaatacagttattaaccaggggacgattaacctcgaaaaaaatggtaattatgacgatagtctggcagcaaatactctggtagggatggctgtttatgagcatggtactgctatcaacgaccagacgggtgttatcaatatcaatgttggtactggtcaggcgttttataacgatggcacaggaacaattgttaactatggtacaatctgcactttcggcgtgtgccaatcggggaatgagtacaataatacagatgatttcacctcactgatctataccggtggcgatacgattacacgaagcggagaaactgtaacgctaaataaatctgctgctgtgactgataagctggccggggaattttgtttaatacgggaacgctctgcgggtgatcaaattacggtatcaagcggtcttctggaaaataccagcggtggcatcatcaataacttagtaaaacttgacaagggtgccgtcattaaaaatgccggggtgatgacgaataacgtcgatgttagcggtggaatactcaataatgccggagaaatgactgcgcaaattaccatgaatgctggtgctgatagttcgttagtgaacaacgccggaaccatcaataaaatcgtgcagagcgcgggggtattcaataatagtggcagtgtaacagggcggatgatgtcggctggcggggtctttaataatcaaactgacggggcgattatgagaggtcgtgcgctgacaggtactgcagtggcaaataacgaaggaccctggaacctcggaagtagtagtgagggtaacaactccgggatgctggagagttaataataattcagcttgcgagaaatatcgcgccgagttaaagatggcggaggcagtaccacgttctttcgtcgggaaccaggcggcgacaattcgggcgttcgccgggaatgatggcgcttccgagaagccgagcataaagcgcataaagaacatggagatccctgcccaggccagcgggaacatatcaacaaagccttgcaggaagcaaattgaaatggtggagtttgaggctgcagctgctattgatggcaacaccctatggcttggacacatgttgatggcttgccagcgctgctgtgatggtgtgtggtgggaatgtggtggacgctggatgaacaaatgtgtgcatcacaatggaaactacgctatggacgcagccattacgtctctggatggctatcgctggctgaagaacgatattattcgcggtaattttctaccggatgaaaaattacgaatgagtttgctgacatcgcgttatgcacttggcgttgggccgttacgggaagctctttcgcaactggtggcggaacggctggtcacggtggtgaatcaaaaagggtatcgggtggcgtctatgtcagagcaggagctgctcgatattttcgacgcccgcgccaatatggaagcgatgttagtgagtctggcgattgcccgcggtggcgatgagtgggaggcagacgttctcgcaaaagcgcatctgctgagtaagcttgaggcctgtgacgccagcgagaaaatgcttgatgagtgggatctgcgtcatcaggcgttccccacggatagtggatggatggatggacaaataaatgatgggatggatggatggatgcacaataaggatgaagggatggtcgcagttctcttccacgtctgcatgagcgcgtatcagcgggcgggcaccatgtccggcggtgaacagcagatgctggcgatggtccaaattttcgacaccatcgagcagctgcgcgagcaggggatgactatctttctcgtcgagcagaacgccaaccaggcgctaaagctggcggatcgcggctacgtgctggaaaacggccatgtagtgctttccgatactggtgatgcgctgctggcgaatgaagcggtgagaacttcagcactggcgctcggactggcgttaatggggaatgcacaggcagtgacgaccattccgttctggcattctatggaaggggaactgggtaaagaggtggattctctggcccaacgttttaacgccgaaaacccggattacaaaattgtaccgacctataaaggcaactacgaacagaatttaagcgcggggattgccgcatttcgtaccggcaacgcgccggctattttgcaggtttatgaagttggcaccgccaccatgatggcgtcgaaagccattaaaatttcaactttgaagtcttattatataagaaatacattttgtaacactatagctgccacagatagtgattcctctaatggttttcagcaaagtaaattgaaaatctctgaaagcattcattactttagatgtcattaa

SEQ ID NO: 140373 - DNA, 980 bp, Homo sapiens
gcttgcaggatgcagtaatacttcctggcgtaaaagtgaagtcctcgcggtaccattgcaaccgactttacagcaggaagtgattctggcacgtatggaacaaatccttgccagtcgggctttaaccgatgacgaacgcgcacagcttttatatgagcgcggagtgttgtatgatagtctcggtctgagggcattagcgcgtaacgatttttcgcaagcgctggcaatccgaccggatcttcacggattttcccaccgcgtagcgtttccagcacatgctctttcagacgaaacccaatctggtcggactcttttaccggttcgcgatcccagataccgttactgttcgcatcccactgcacaatgacacagtcaccctgtccgacaatttccagcccttcgccggtacagatgccatgacaataacccgccctctggagatgcttcgcgacggtaaatacccgcagccagatttcatcttccagcgccagcttacgggtgctcgttaaactttcacgctgtaacgcaggcagaaagcgtgccgcccccagcaacaatacgctactgatcgccatagcaatcaacacttccagcagagaaaaaccttgctcttttacaggcatccttctgtttctccttgctgacaaagccggagtcttccccacggcgaaaccaccagccaccactcgcccgttgagtttttgaagcgaatatgcccggcccatgcggtattgcgcaggccaaagaaagcaagcgaaggtgtcaggtcgctcatttcgacttcgggccagcgtggcacaaagaccaatggtgaactgccatgacaggtattggccccagcagcggaactcacaaggcaccataacgtcccctccctgataacgctgatactgtggtcgcggttatgccagctggcatcttcacgtaaatagagcacatattcccgcgcctggctgtcggtttgcataaccgttgggact

SEQ ID NO: 140374 - DNA, 3678 bp, Homo sapiens; identical to SEQ ID NO: 124558

SEQ ID NO: 140375 - DNA, 3446 bp, Homo sapiens
atgctgagcgcactggtcggatgggaaggatcggagtttggtggggaggatgggggggtagctgggggggtagaagccgctcgttgcctcgaatgtaaatacgtttgcagcaagtgtgtggatgtctgcccgaaccgcgccaacgtctccattgcggtcccaggcttccagaaccgtttccagacgctgcacctcgacgcttactgtaacgaatgcggcaactgcgctcagttctgtccgtggaacggtaaaccgtacaaagacaaaatcaccgtcttcagcctggcgcaagactttgataacagcagcaacccaggcttccttgtggaagattgccgggtacgagtacgtctgaataaccaaagctgggtgttaaacatcgacagcaaaggtcagtttaacaacgtaccaccggagctgaacgatatgtgccgcatcatcagccatgtccaccagcatcatcattatctgctgggccgcgtggagctacacccggcaaaagtgcaggaaggcgttgatatcgccatcgaaaacgatgtgattgtcgctatcggcgatgccctgacgcaacgctaccccgacgccagcttcaaagagatgcatggccggattgtgatgccagggattgtctgctcgcacaaccatttttactcggggctttcccgcggaattatggcaaacatcgccccttgcccggatttcatctcaacgctgaaaaatctctggtggcggctcgatcgcgcccttgatgaagagtcgctctattacagcggactgatttgttccctggaagcgattaagagcggatgtacatcggttatcgatcaccatgcctctccggcgtatatcggcgggtcgctctccacattgcgcgacgcatttttaaaagttggcctgcgcgcgatgacctgttttgaaactactgaccgtaacaacggcatcaaagagttgcaggaaggtgtagaagaaaacatccgtttcgcccgtttgattgatgaggcgaagaaagcgacaagcgagccgtatctggtggaagcacatatcggtgctcacgcgccgtttaccgtgccggatgccggtctggagatgctgcgtgaagccgtgaaagccacaggccgtggtttgcatattcacgctgcggaagacctttacgacgtttcctacagtcaccactggtacggcaaagacctgctggcacgactggcgcaattcgatctcatcgacagcaaaacgctggtcgctcatgggctgtacttgtcgaaagatgacatcaccctactcaatcagcgcgatgcgttcctggtgcataacgcccgttcaaacatgaacaaccatgtcggctacaaccatcaccttagcgacatccgcaatctggcgttgggaacggacggcattggttcggacatgtttgaagagatgaaatttgccttctttaaacatcgcgatgcgggtggtccgctgtggcctgacagttttgccaaagccctgactaacggtaacgaactgatgagccgcaactttggcgcgaaatttgggcttctggaagccggttacaaagctgatttaaccatttgcgattacaactcgccgacgccgctgctggcagacaatatcgccgggcatatcgctttcggtatgggctcaggcagcgttcacagcgtgatggtcaatggtgtgatggtctatgaagaccgtcagtttaacttcgattgcgattccatttatgcacaagccagaaaagccgctgccagtatgtggcgtcggatggatgcgctggcataaatgacagatgccctcttcccgcagggaagagggttaaataaggaaagaagatgattgaacaatttttcaggcccgactctgtcgaacaggcgctggaactgaagcgccgctaccaggatgaagccgtctggttcgccgggggcagcaaactcaatgctacaccaacccgtaccgataaaaagattgccatttccttacaggatctggaactggactgggttgactgggataacggtgcactgcggattggcgcaatgtctcgcttgcagccactgcgtgatgcgcgatttattcctgcagcgctgcgtgaagccctcggttttgtttactcacgccatgttcgtaatcagtcgaccattggtggtgaaatcgccgcccgccaggaagagtcggtgctgcttcccgtcctgttggcactggatgctgaactggtttttggcaacggcgaaacgctgtcaatcgaggactacctggcctgcccatgcgatcgcctgctaaccgaaattatcattaaagatccgtatcgcacctgtgcgacccgcaaaattagccgttctcaggcaggtttaaccgtcgtgacggcagccgttgcaatgacagaccacgacggtatgcgaatataccgcatgggccgggcatattcgcttcaaaaactcaacgggcgagtggtggctggtggtttcgccgtggggaagactccggctttgtcagcaaggagaaacagaaggatgcctgtaaaagagcaaggtttttctctgctggaagtgttgattgctatggcgatcagtagcgtattgttgctgggggcggcacgctttctgcctgcgttacagcgtgaaagtttaacgagcacccgtaagctggcgctggaagatgaaatctggctgcgggtatttaccgtcgcgaagcatctccagagggcgggttattgtcatggcatctgtaccggcgaagggctggaaattgtcggacagggtgactgtgtcattgtgcagtgggatgcgaacagtaacggtatctgggatcgcgaaccggtaaaagagtccgaccagattggatttcgtctgaaggagcatgtgctggaaacgctacgcggtgcgacatcctgtgaaggtaagggctgggataaagtcactaatccggatgccatcattatcgacacttttcaggtcgtacgtcaggatgtcagcggcttctcgccggtgttgacggttaatatgcgtgctgccagaatgagccaacaggatcgcagttttgcctctcgcgtgagcatggaaagtcagtcattgcgccgccaggccatcgttcagtcggcgctggcgtggggaaaaatgcactgctggcagacgcagccagcagttcagtgctcgcagtacgctgaaaccgatgcccaggtttgtttgcgtttactggcagataatgaagccttattgattgccggtattaaaggtgaagagtacgacgcggcgtggaacagcttcgtggtgaaatctctggtcgctcagcaggaaaaagctgcagctgacgtgcaattgcgtggcgttccggcgatgtttgttaacggtaaatatcagctgaatccgcagggtatggataccagcaatatggatgtttttgttcagcagtatgctgatacagtgaaatatctgtccgagaaaaaataa

SEQ ID NO: 140376 - DNA, 402 bp, Homo sapiens
ctagtcagtgtagaataaacggatttttccgtcagatgtaaaggttgcagaaccgggccattcttgcgtctgatctttcaggatcggatcgttggcgtcgaacttatcgctgtctttaaagacacggcccgcgtttttccagctgtcgattgagttgtcgccgacatcaagtccttttgcagactcaatatttttaatcgttgattgatcgaattgaggcacttggtatttttcgttttgctgctgtttagggatctgcagcatatcatggcgtgtaatatgagagacgccgtacgtttctttgtatgctttttggttattttctttcgcgaaggcttgagtcgctcctccaagtttctcattcagttctgattttagctcagtagtgtgaaattcattcat

SEQ ID NO: 140377 - DNA, 885 bp, Homo sapiens; identical to SEQ ID NO: 119763

SEQ ID NO: 140378 - DNA, 585 bp, Homo sapiens
atgaagcgtgcgcctgttattccaaaacatacgctcaatactcaaccggttgaagatacttcgttatcgacaccagctgccccgatggtggattcgttaattgcgcgcgtaggagtaatggctcgcggtaatgccattactttgcctgtatgtggtcgggatgtgaagtttactcttgaagtgctccggggtgatagtgttgagaagacctctcgggtatggtcaggtaatgaacgtgaccaggagctgcttactgaggacgcactggatgatctcatcccttcttttctactgactggtcaacagacaccggcgttcggtcgaagagtatctggtgtcatagaaattgccgatgggagtcgccgtcgaggagcgactcaagccttcgcgaaagaaaataaccaaaaagcatacaaagaaacgtacggcgtctctcatattacacgccatgatatgctgcagatccctaaacagcagcaaaacgaaaaataccaagtgcctcaattcgatcaatcaacgattaaaaatattgagtctgcaaaaggacttgatgtgtgtgtacagctggccgctgcaaaacgctga

SEQ ID NO: 140379 - DNA, 947 bp, Homo sapiens
atcagacgcaagaatggtccggttctgcaacctttacatctgacggaaaaatccgtttattctacactgactattccggtaaacattacggcaaacaaagcctgacaacagcgcaggtaaatgtgtcaaaatctgatgacacactcaaaatcaacggagtggaagatcacaaaacgatttttgacggagacggaaaaacatatcagaacgttcagcagtttatcgatgaaggcaattatacatccggcgacaaccatacgctgagagaccctcactacgttgaagacaaaggccataaataccttgtattcgaagccaacacgggaacagaaaacggataccaaggcgaagaatctttatttaacaaagcgtactacggcggcggcacgaacttcttccgtaaagaaagccagaagcttcagcagagcgctaaaaaacgcgatgctgagttagcgaacggcgccctcggtatcatagagttaaataatgattacacattgaaaaaagtaatgaagccgctgatcacttcaaacacggtaactgatgaaatcgagcgcgcgaatgttttcaaaatgaacggcaaatggtacttgttcactgattcacgcggttcaaaaatgacgatcgatggaggagcgactcaagccttcgcgaaagaaaataaccaaaaagcatacaaagaaacgtacggcgtctctcatattacacgccatgatatgctgcagatccctaaacagcagcaaaacgaaaaataccaagtgcctcaattcgatcaatcaacgattaaaaatattgagtctgcaaaaggacttgatgtgtgggacagctggccgctgcaaaacgctgacggaacagtagctgaatacaacggctatcacgttgtgtttgctcttgcgggaagcccgaaagacgctgatgacacatcaatctacatgttttatcaaaag

SEQ ID NO: 140380 - DNA, 1063 bp, Homo sapiens
  misc_feature (1)...(1063): n = a,t,c or g
nagaatccccattaaaaatattgagtctgcaaaaggacttgatgtgtgggacagctggccgctgcaaaacgctgacagaacagtagctgaatacaacggctatcacgttgtgtttgctcttgcgggaagcccgaaagacgctgatgacacatcaatctacatgttttatcaaaaggtcggcgacaactcaatcgacagctggaaaaacgcgggccgtgtctttaaagacagcgataagttcgacgccaacgatccgatcctgaaagatcagacgcaagaatggtccggttctgcaacctttacatctgacggaaaaatccgtttattctacactgactattccggtaaacattacggcaaacaaagcctgacaacagcgcaggtaaatgtgtcaaaatctgatgacacactcaaaatcaacggagtggaagatcacaaaacgatttttgacggagacggaaaaacatatcagaacgttcagcagtttatcgatgaaggcaattatacatccggcgacaaccatacgctgagagaccctcactacgttgaagacaaaggccataaataccttgtattcgaagccaacacgggaacagaaaacggataccaaggcgaagaatctttatttaacaaagcgtactacggcggcggcacgaacttcttccgaggagcgactcaagccttcgcgaaagaaaataaccaaaaagcatacaaagaaacgtacggcgtctctcatattacacgccatgatatgctgcagatccctaaacagcagcaaaacgaaaaataccaagtgcctcaattcgatcaatcaacgattaaaaatattgagtctgcaaaaggacttgatgtgtgggacagctggccgctgcaaaacgctgacggaacagtagctgaatacaacggctatcacgttgtgtttgctcttgcgggaagcccgaaagacgctgatgacacatcaatctacatgttttatcaaaaggtcggcgacaactcaatcgacagcttggaaaaacgcggggccgtgtctttaagacctgagtgtgcagacacccccctcngg

SEQ ID NO: 140381 - DNA, 915 bp, Homo sapiens
atgctagaggatccccggaagggactggagacacctagtcctgtttcccacaaccttcattttcagttccaccttggaccgctgctgcctgggtcacccatgaagaagtggcctgccctggtagtcacaggttccaagtcgcccaagctggagagctacaagcacttccagaaaatctgggacatgcatggtgaaccatccaaacgggaagaaggagcagggctcacagtcaaccagcatatccccaacggagcttcaacttgcaatgaaggcccacagcgcctggaggccttgggggcccgaattccgatggctgccgggttttcctcttccaagcccaccttggtgaccccccgaagggcctatcgggctgaccttcgacttgagggctactggggttgccagggcgtgcccggtggaccccttgtggcccaaggaggagcgactcaagccttcgcgaaagaaaataaccaaaaagcatacaaagaaacgtacggcgtctctcatattacacgccatgatatgctgcagatccctaaacagcagcaaaacgaaaaataccaagtgcctcaattcgatcaatcaacgattaaaaatattgagtctgcaaaaggacttgatgtgtgggacagctggccgctgcaaaacgctgacggaacagtagctgaatacaacggctatcacgttgtgtttgctcttgcgggaagcccgaaagacgctgatgacacatcaatctacatgttttatcaaaaggtcggcgacaactcaatcgacagctggaaaaacgcgggccgtgtctttaaagacagcgataagttcgacgccaacgatccgatcctgaaagataatacccaagaatgggtcggttctagaacctttacctttgaacggaaaaattcctttattctacactga

SEQ ID NO: 140382 - DNA, 439 bp, Homo sapiens
ggctggcgtcgtgttctgcttcgatctcttcagcaggaagcggggcaggttcagcgtctggcgtaacaaaggtttcggtagatactgccagcggctggccaattttcgtgacagacaggctttccagttgctcaaccagattcactttacccggtgcaaacaggttgataacggtggaaccgagtttaaagcgacccatttcctggcctttcagcagtgccacagaaccgtcgttttccccggcaggccaggtccagcgcttgatgataccttcgcgcggcggcgtaatggtgcccgcccagaccgtctcaatgctgccaacaatcgtcgctccgaccagaatctgcgccattgggccaaattcggtatcgaaaaggcaaatcacgcgttcgttacgggcaaacagattctgcatgttctgagccgtgagatgggtaag

SEQ ID NO: 140383 - DNA, 1279 bp, Homo sapiens
atggtaattgctgccatggaaacacaactgtctaatgggccaacttgcaataacacagccaatggtccaaccaccataaacaacaactgttcgtcaccagttgactctgggaacacagaagacagcaagaccaacttaatagtcaactaccttcctcagaacatgacacaggaggaactaaagagtctctttgggagcattggtgaaatagagtcctgtaagcttgtaagagacaaaataacaggaggagcgactcaagccttcgcgaaagaaaataaccaaaaagcatacaaagaaacgtacggcgtctctcatattacacgccatgatatgctgcagatccctaaacagcagcaaaacgaaaaataccaatgtgacaatctaaaaacttgtcacacttcacatggatctgtcatggcggaaacagcggttatcaatcacaagaaacgtaaaaatagcccgcgaatcgtccagtcaaacgacctcactgaggcggcatatagtctctcccgggatcaaaaacgtatgctgtatctgttcgttgaccagatcagaaaatctgatggcaccctacaggaacatgacggtatctgcgagatccatgttgctaaatatgctgaaatattcggattgacctctgcggaagccagtaaggatatacggcaggcattgaagagtttcgcggggaaggaagtggttttttatcgccctgaagaggatgccggcgatgaaaaaggctatgaatcttttccttggtttatcaaacgaggagcgactcaagccttcgcgaaagaaaataaccaaaaagcatacaaagaaacgtacggcgtctctcatattacacgccatgatatgctgcagatccctaaacagcagcaaaacgaaaaataccaagtgcctcaattcgatcaatcaacgattaaaaatattgagtctgcaaaaggacttgatgtgtgggacagctggccgctgcaaaacgctgacggaacacccgaaagacgctgatgacacatcaatctacatgttttatcaaaaggtcggcgacaactcaatcgacagctggaaaaacgcgggccgtgtctttaaagacagcgataagttcgacgccaacgatccgatcctgaaagatcagacgcaagaatggtccggttctgcaacctttacatctgacggaaaaatccgtttattctacactgactattccggtaaacattacggcaaacaaagcctgacaacagcgcagagaaaggggatacttaaagataagcagctcagtatg

SEQ ID NO: 140384 - DNA, 1951 bp, Homo sapiens
atcaacttgcctggcagaaataaggagtcataaatgggatatttaaataacgtcgccggttaccgcgaagatttactggctaaccgtgcgatcgttaaacacggtaatttcgcactgttaaccccggatggtgtggtaaaaaatattattccgggctatgaaaattgtgacgcgacaatcctctccacgccaaagctgggtgcctcttttgttgattatctggtcacactgcatcaaaacggtggcaaccaacagggcttcggtgtcgaaggcattgaaacgttccggtatgtgatctctggaaatatcactgccaaagccgaaggcaaaacatatgccttaagcgaaggtggctatctttattgcccgccaggctccttaatgacgtttgttaacgcccaggccgaagacagccaaatctttttatataagcgccgctatgttccggtagaaggctatgcaccgtggctggtttctggcaatgccagcgaactggaacgcattcattatgaaggcatggacgatgttattctgctggattttctgcccaaagagttaggctttgatatgaacatgcatatcctctcttttgcaccaggtgccaaccacggttatatcgaaacgcacgttcaaggaacacggaggagcgactcaagccttcgcgaaagaaaataaccataaagcatacaaagatacgtacggcgtctctcatattacacgccatgatatgctgcagatccctaaacagcagcaatacgaaaaataccaagatacccacgatacgccatattgtgaaccgctgccgggcgaaacgcgcctgtggggcgacaccgatgtgattggtctgttcgacgctgaaaccgatatgaacgacgtggtggcgattctggaaaaccatccgctgctcggcgcaggcttcgcgcataaaatcgaacaactagaagataaagactgggagcgcgaatggatggataatttccacccgatgcgctttggtgaacgactgtggatctgccctagctggcgtgatgtgccggacgaaaacgccgtcaacgtgatgttagatccagggctggcgtttggtacgggtaccatccaaacactctctgtgcctgcaatgctcgacagctcgacgcatacccgacgaatgcgttctacgctgaatctctacgaaatcacgagaatgagcactgtgtccacatctgagcatagtatgacgtatactctcgttcaggtcgacatgaaagaggcgcaaaagccggacaccgccagctaccgcacctttaacgaattctttgtccgtccgctgcgtgacgaagtacgcccaatcgataccgatccgaatgtactggtcatgcctgccgatggcgttatcagccagttgggtaaaatcgaagaagataaaatcctgcaagccaaaggccacaactacagcctcgaagccctgctggcaggcaactatctgatggcggacctgttccgcaacggtacgtttgtgaccacttacctctccccgcgtgactaccaccgcgtacacatgccgtgcaacggtattctgcgtgagatgatctacgtgccgggcgatctcttctccgttaaccatctcacggctcagaacgtgccgaatctgtttgcccgtaacgaacgcgtgatttgcctttctgataccgaatttggcccaatggcgcagattctggtcggagcgacgaatggtggcagcattgagacgccagaaagtgagggagccacggttgatgagagctttgttgtaggtggaccagttggtgattttgaacttttgctttgccacggaacggtctgcgttgtcgggaagatgcgtgatctgatccttcaactcagcaaaagttcgatttattcaacaaagccgccgtcccgtcaagtcagcgtaatgctctgccagtgttacaaccaattaaccaattctgattag

SEQ ID NO: 140385 - DNA, 3286 bp, Homo sapiens
ctaaggctcggccttctttacggaagaaggttcgtgccgccgccgtagtacgctttgttaaataaagattcttcgccttggtatccgttttctgttcccgtgttggcttcgaaaacaaggtatttatggctcttgtctccaacgtagtgagggtctctcagcgtatggttgtcgccggatgtataattgccttcatcgataaactgctgaacgttctgatatgtttttccgtctccgtcaaaaatcgttttgtgatcttcccactccgttgattttgagtgtgtcatcagattttgacacatttacctgcgctgtttgtcaggctttggtttcccgtaatgtttaccggaatagtcagtgtagaataaacggatttttccgtcagatgtaaaggttgcagaaccggaccattcttgcgtctgatctttcaggatcggatcgttggcgtcgaacttatcgctgttctttaaagacacggcccgcgtttttccagctgtcgattgagttgtcgccgaccttttgataaaacatgtagattgatgtgtcatcagcgtctttcgggcttcccgcaagagcaaacacaacgtgatagccgttgtattcagctactgttccgtcagcgtttttgcagcgggcagctgtcccacacatcaagtccttttgcagactcaatatttttaatccgtgattgatcgaattgaggcactgggcatttttccgtttgctgcctgtttaagggatcccgcagcatattatggcgggtaatatgtaaaaacacccgacgtttttttagaatgctctttgggtgattttcttttccccaaagattgatgttcttcctcccttccacgagcaaaacacgtagccccttcagagccagatccttttgataaaacatgtagattgatgtgtcatcagcgtctttcgggctttcccgcaagagcaaacacaacgtgaatagccgttgtattcagctactgttccgtcagcgttttgcagcggccagctgtcccacacatcaagtccttttgcagactcaatatttttaatcgttgattgatcgaattgaggcacttggtatttttcgttttgctgctgtttagggatctgcagcatatcatggcgtgtaatatgagagacgccgtacgtttctttgtatgctttttggttattttctttcgcgaaggcttgagtcgctcctcgtatgtgcaagcaggtctccagcccatgcatccagagctgtttcatatccctcaggaagatgcaaggctttatcgtcttgcccgagcttcttcgagtgtgggtcccgcagcagcggtgcacccccaggagcttgtgggcaggtagcctcagccccacccagacctctttgatgttcattaagaagcttggcgcaaatgttgcctttttatcctcgaagaagcctctgtttgtcatgtagcttgtgataaccacattgttgcctttggcttgcggcactgcgaagtgagagtaagtgaatgtcacatcgtttggatcaagacccatttgcagcacaagccctgttttgttcagcggcttgtaagggcgggttaaagagtttgatacataaccaagcatgtaaatatcgtttgagttaataccatcgatcgtcatttttgaaccgcgtgaatcagtgaacaagtaccatttgccgttcattttgaaaacattcgcgcgctcgatttcatcagttaccgtgtttgaagtgatcagcggcttcattacttttttcaatgtgtaatcattatttaactctatgataccgagggcgccgttcgctaactcagcatcgcgttttttagcgctctgctgaagcttctggctttctttacggaagaagttcgtgccgccgccgtagtacgctttgttaaataaagattcttcgccttggtatccgttttctgttcccgtgttgggcttcgaatacaaggtatttatggcctttgtcttcaacgtagtgagggtctctcagcgtatggttgtcgccggatgtataattgccttcatcgataaactgctgaacgttctgatatgtttttccgtctccgtcaaaaatcgttttgtgatcttccactccgttgattttgagtgtgtcatcagattttgacacatttacctgcgctgttgtcaggctttgtttgccgtaatgtttaccggaatagtcagtgtagaataaacggatttttccgtcagatgtaaaggttgcagaaccggaccattcttgcgtctgatctttcaggatcggatcgttggcgtcgaacttatcgctgtctttaaagacacggcccgcgtttttaccatgctgcgctgttgtcaggctttgtttgccgtaatgtttaccggaatagtcagtgtagaataaacggatttttccgtcagatgtaaaggttgcagaaccggaccattcttgcgtctgatctttcaggatcggatcgttggcgtcgaacttatcgctgtctttaaagacacggcccgcgtttttccagctgtcgattgagttgtcgccgaccttttgataaaacatgtagattgatgtgtcatcagcgtctttcgggcttcccgcaagagcaaacacaacgtgatagccgttgtattcagctactgttccgtcagcgttttgcagcggccagctgtcccacacatcaagtccttttgcagactcaatatttttaatcgttgattgatcgaattgaggcacttggtatttttcgttttgctgctgtttagggatctgcagcatatcatggcgtgtaatatgagagacgccgtacgtttctttgtatgctttttggttattttctttcgcgaaggcttgagtcgctcctcctctgcctctggtagccaggaagtttatgcttgctagagcttccagctgagcagtctttcttctacctgaatttgtcaaggtacacagccaccttttgtactggaagcaccagatggcagggcaggaaacttcactcattccacctcctgtggccagatgggtcacattgctagtgcttccagcccagtggtcccacttctgcctaaactctgcaggcaggcagaaacctatgcttcccttgggcagtatggccattttcacgatattgattcttcctacccatgagcatgaaatgttcttccatttgtttgtatcctcttttatttcattgagcagtggtttgtagttctccttgaagaggtccttcacgtcccttgtaagttggattcctaggtattttattctctttgaagcaattctgaatgggagttcactcat

SEQ ID NO: 140386 - DNA, 3090 bp, Homo sapiens; identical to SEQ ID NO: 140293

SEQ ID NO: 140387 - DNA, 833 bp, Homo sapiens
gtaaccctttccgatattctattgatacgtcggaccataaagtcgctgtaccatatgatgaccgctcatgccagcgcttcacgcagcacgtttatagcgacgtgccgatctcgtgggggcccaaaaactccaggacctgccagttgcatcgcgccataaccaagacggttaacggattttgtaccgagattgtacgcatccagattcagcgaactttctttgctgctgtacttcacgccgacgcttgtcaggctattgatgccgccgcccttctgaccgtcatcgacgttaaagtgctgactgcctgcgcctgccaggcttgccgtacgctggctcttcgcgtagctcaggttcggcccgccttccagcgtagcgctagcgctccagccgtctttacctgcgtagtccagtttcagcccgacgatgctgtccaccgccgtttcgctgccactgttaattcagggcctacttttgctgtcgggatatgcagggaggaagcaatggaaaccgtggcttacgctgattttgcacgtctggaaatgcgcgtcggaaagattgtggaagtgaaacgccatgaaaacgccgacaagctgtacatcgtacaggttgatgtggggcaaaaaacgctgcaaaccgtgaccagcctggtgccgtactacagcgaagaagagctgatggggaaaacggtggtggtcttatgcaatctgcaaaaagcgaaaatgcgtggtgaaacgtcggaatgcatgctgttgtgtgcggaaaccgatgacggcagtgaaagcgtgctgttaacgccggagcggatgatgcctgcgggcgtacgcgtcgtataa

SEQ ID NO: 140388 - DNA, 3261 bp, Homo sapiens
atgctacgatttatgcccgtcattactgccggcactagatgccgtgccggctgcgggccttgcacggtgccgtacacggcattgccacgccttcgcctactgcgcgccctgccttacacccccacccccagccctaatcttgcccaaagccgcccgggattgtcctgggcccatgctgccactttgttagcttatgcctacctgtttgacaccgggtttaaactccccctggttagccctaaaaccaaagaaagtcctgctaaaacctgtcaacaaagtccaagggtccccacatatgaccacagattctacatcactataccattgttaacgcagagctgttctcaaaatgggtttagagcaacaaaaaccgccaaatttatcttacaaggaagaccagaagcccacagaatcatgaaaacaggggtacaggttttggtgtgctcacacgccccagtaagcggccccctttccgcgccctgctgcgctttttccaccaacgctaacaacggccttatggttaatgctaatggttacacccagcgtctgccgcagctgttccaggcattgctcgaggggtactttagctataccgctacggaagatcagcttgagcaggcgaagtcctggtataaccagatgatggattccgcagaaaagggtaaagcgtttgagcaggcgattatgcccgcgcagatgctctcgcaagtgccgtacttctcgcgagatgaacggcgtaaaattttgccctccattacgttgaaagaggtgctggcctatcgcgacgccttaaaatcaggggctcgaccagagtttatggttatcggcaacatgaccgaggcccaggcaacaacgctggcacgcgatgtgcaaaaacagttgggcgctgatggttcagagtggtgtcgaaacaaagatgtagtggtcgataaaaaacaatccgtcatctttgaaaaagccggtaacagcaccgactccgcactggcagcggtatttgtaccgactggctacgatgaatacaccagctcagcctatagctctctgttggggcagatcgtacagccgtggttctacaatcagttgcgtaccgaagaacaattgggctatgccgtgtttgcgtttccaatgagcgtggggcgtcagtggggcatgggcttccttttgcaaagcaatgataaacagccttcattcttgtgggagcgttacaaggcgtttttcccaaccgcagaggcaaaattgcgagcgatgaagccagatgagtttgcgcaaatccagcaggcggtaattacccagatgctgcaggcaccgcaaacgctcggcgaagaagcatcgaagttaagtaaagatttcgatcgcggcaatatgcgcttcgattcgcgtgataaaatcgtggcccagataaaactgctgacgccgcaaaaacttgctgatttcttccatcaggcggtggtcgagccgcaaggcatggctattctgtcgcagatttccggcagccagaacgggaaagccgaatatgtacaccctgaaggctggaaagtgtgggagaacggtgagcgcctgattgaagcctctgacggcacaggcaaaaacctttacgattgcggcgctctatttgcgcctgttacttggactaggcggttccgcgcctttccccgcccgctgaccgttgaagaactgctggtggtcacctttaccgaggctgccacggcagaattgcgcggtcgtatccgtagcaatatccacgagttgcgcatcgcctgtctgcgtgaaaccaccgacaatccactgtacgaacgcctgctggaagagatcgacgataaagcgcaagccgcgcagtggttgttgttagccgaacggcagatggatgaagcggcagtctttactattcacggcttttgccagcgcatgctcaacctgaatgcctttgaatccggcatgctgtttgagcagcagctgattgaagatgagtctctgctacgctaccaggcctgcgccgatttctggcgtcgccactgctacccgctgccgcgtgaaatagcccaggtcgtctttgaaacctggaaagggccgcagcgttgctgcgcgatattaatcgttatctgcaaggcgaacgaccggttatcaaagcaccgccgcccgatgatgaaacgctggcttcccgtcacgcgcaaattgtggcgcgttgatatcggtcagaccatcactgctattcgtactcaggcgggcattgttcagcggctggcggcagataacgccagcgtgaagcagagcgggcagctcatcgaacaactatcgctgggcgtttacgacgcggtgcgccgtttgttgggtcggttacgtccgcgccagttggatgatctcaccctggagcaggccatccgctcactgatgcgggaaatggagctggaagggcgcggtattgtcagccatctcgaatggcgaatcgatgaatcagcgttaagcgaaaaccagcgcgtgacgctgtttcgtgtctgccaggaagggctgaacaacattgtgaaacatgctgatgccagcgcggtcaccctgcaaggctggcagcaggatgaacggttgatgctggttattgaagacgatggcagcggtttgccgccgggtttgatgatgttgccgtttctgaaagcgcctgccgatgcgccattaatgactgataaatatgaaattgatgcccgctatcgctactggcgtcggcatattctgctgaccatctggctgggttacgcgctgttttacttcacgcggaaaagttttaacgccgccgtaccagaaatccttgctaacggcgtgctcagccgtagcgatatcggcctgttagcgaccctgttttacattacctatggcgtgtcgaagtttgtctccggcattgtcagcgatcgctcaaatgcccgttattttatggggatagggcttatcgccacgggcattatcaacattctgtttggcttctcgacgtcgctatgggcgtttgccgtgctctgggtgctgaacgcctttttccagggctggggttcaccggtgtgtgcgcgtctgttaacggcctggtattcacgtaccgagcgcggcggttggtgggcattatggaacacggcgcataacgtcggcggcgcactcattcccattgtgatggcagcggctgcgctgcattacggctggcgtgccgggatgatgattgctggttgtatggcgatagtcgtggggatttttctctgctggcggctacgcgatcgcccgcagcgttag

SEQ ID NO: 140389 - DNA, 2326 bp, Homo sapiens
atgttcacatacccgcattcgaagttccgcgtcaaccgctttgtgggtcaagtactactgatcgagttttcgattttactagacgggggtcgtaccggcttgggtcattccttatctgtttggtgcatctccggcgatttgttcttctttcctgcaaggaaaaccaacgtcgctgccgtttgagaaaaccgagtgcgattatttgttctgatagtctttcaggatctgccgacctgctacgtaaatcataatttcgtctgtaccgccgccgatacgttcacaacggacatcacgccaaaagcgggagacgcgcgcctcatcggtatagcccagaccgtccgtcatctagaggatcccatgcgggcatggaagagcattcacaaaagttgtgaaatcctggacccgatccacagggctcctgtcaaggaaaacacccacccagcacgcaagattaatatatccgacccggctgctggcgctgtagcccgcattcggtacgaaggtgtgttatctgtatgtcgtgcatcagcatcagcttatgtgtcgcgctcacggacgattactgtcgcctgttggtacgttagcaacacaggggtgacgggcgctaccattggtgtaaaacgacagcatcgccacgcgcggctcttctccggtgatggcgcgccaggtttcggcactggcaagcgcgatatccgccagctgcgccgccttgtacgcatccagattcagcgaactttctttgctgctgtacttcacgtcccgacgccttggtccagggctattgatgccgccgcccttctgaccgtcatcgacgttaaagtgctgactgcctgcgcctgccaggcttgccgtacgctggctcttcgcgtagctcaggtgatcgaccggtgcagcaaccctggtgacatcatgtctagcgtcgcgcggaggtactggttcatctcgcgttggtctgctaagcgggactgcgcggtgagctacgatcaagaccctggtcaggcgcagcgttcatgtcggtcatgtctggtcgcggttgatcgggggctatggctgtccgcgtattgccggtcactcatgacgcagactctgctacctgacgatgtgccacgcatattgccgaatgcttcttcgccgagccgtttgcggtgcctgcagcatctgggtaattaccgcctgctggatttgcgcaaactcatctggcttcatcgctcgcaatttagcctctgcggttgggaaaaacgccttgttaaggatctcacgcgtattcaggacactgggcgtgcgaaagagattctgggtgcgacggcaacgctggaattccgtctggtaaacaccaacgttgaccaggccgctgcggcatccggtcgcgtaccgggcgactctgaagtgaaacagacccgcgaaggtcagccagttgtgctgtacaaacgcgtaattctgaccggtgaccatatcaccgactccacttccagccaggacgaatacaaccaaccgcaggttaacatctcgctcgatagcgctggtggtaacatcatgtctaacttcactaaggacaacatcggcaaaccgatggcaaccctgtttgtggagtacaaagacagcggtaagaacagatgcaaatggtcgtgcggttctggtgaaacaggaagaggtgattatcatcgccaacatccagtctcgtctgggtaacagcttccgtatcaccggcatcaacaacccgaacgaagcccgtcagctgtcactgctgctgcgtgccggtgcgttgatcgcgccgattcagattgttgaagaacgtaccattggcccaaccctgggtatgcagaacattgaacaggggctggaggcttgccttgccggtctgctggtttctattctgttcatgatcatcttctataagaagtttggtctgattgcgaccagtgctctgattgccaacttgatcttaatcgtcggcattatgtcgctgttgccaggcgcaacgctgagtatgccaggtatcgcgggtatcgtcttaacccttgcggtggcggtcgatgcgaacgtactgatcaacgaacgtattaaagaagagttgagcaacggacgtactgttcaacaggccattgatgaaggttatcgtggcgcattcagttctatcttcgatgcgaacatcaccacgctgattaaagtcatcatcctgtacgcagtgggtaccggggcaattaaagggttcgcgattactaccggtatcggtgtggcgacgtcgatgtttaccgcgattgtcggtacgcgtgccatcgtaaacctgctatatggcggcaagcgcgtcaagaagctgtcaatctga

SEQ ID NO: 140390 - DNA, 999 bp, Homo sapiens
ttaaagcctacgacggtgagattttttatcatcttcgacctcctgttgccgcatctggaagcgttgcaacagagcgcgagcgcgctggcggaactcgacgtgctggttaacctggcggaacgggcctataccgatatttgggataccctgacgccttcgaacacttgcgatacactcactggttccactacgactaggtattccttggtggttgacacactttgttactaccggctcaccaacttcaccaccaaccactaccgactcgacggcgacctgaacacggaccacgggttgccgagaattgctatacggcctagcctctgcggagacaagccacacgcctacgacactgctttgccacacgactgacacaggcactttttgagggatcttagggtgggatcttatcgggtttctaacgacattcaaaaacacggggggagccatatttaccacggcctgttgtgaaccgacaaagggcaggatgggaacatcaagcatggtttggtcggggacccaattgggcccaaggtacttcgtgtgaaactctaaataaacggcgtttgtgtcctctatacaaggcgacctacaaaccatcgtatagcgccgatttgaagggggtgaccgtgaaacgccagcatgctgcagcgagcatgaacggacaatagcgagctgcgcagtagctaccgggagcgcaaacggggctatgcgccggtgcagcaacctgccgactgaccgaccgagcgactgaccgaccgagaccgaccgaccgaccgtgcgaccgaccgaccgacccagttcgctatcggaatcaggatgaccatgagccttgcagatgtcagcaggaaccagtttctcttccagagctgaagctccagcgtgctgcctggcttgaagctgctgccctctgtcccaactctcaccagctctcttgggttgttccctgctcttgatcctaatcagtgcgtgtttctcacaagcctcttcagtcatcat

SEQ ID NO: 140391 - DNA, 1365 bp, Homo sapiens
atgaacggtcttttggatagtgatagtgactctctgagcagttgtcagcaacgtgtgaaggcaaggcttcatgaaatacttcagaaagacagagattttactgctgaagattatgaaaaggtggaaagcagaatatatcattttgcaagattatcagttggtggctatacggctgatagttctctgactttgaaagtttacttgcaattaatgaaagcacccaagaaaagaaggggagaggtgaatgtgggaactgtggttgctttcattaaaggtggttttcctgtagtgaagaaagattacttcagaccggcagcagatggcagcagtgcgctttgtcggttttttcccacgggaaatgttcacgaccaaagtgacccacaaaaggttacagacggagccgtcgtccccgtgcaacctaccgatggcccagggctccgctgcctccgccgtgcccggggctgcggagccgggagacaggggcgggagcaggcgcaggactgcggcgccgagatccaggcagaggccgccagccgagccagccgggtgcaggaaggatcttacccgaggcccccgaatggaccctttagtaccgatctaacaggcctaatgcagttcacaaaactgctggttctgaaggtagagagccagctgacaaggagaattagaaaatgccacaatctgcgtgaagccaacatcagagaggaacttcgctttttcaactgtacgaatgtcgcactgcgtactggcgtgcagttcaatcggcggcccgatagtccagggtattctagaggtgttctgtctcctgaacgtcatgttcgtactagattatattttaccagtgaaagtcatgtacattctttgctgtctattcttcgctatggtgccttatgcaatcgcggcggcacactctgctgtcgggcgatccacacgctccatcgtcataccatcgtactcaatggtgttaccgtcacgctcaacctcgtacagctcacgttttacggtaacgttagtgagatcatcagacatcaatgtcaacttacccggcacggcaatcacccgctgccactgacggcaatccagggtatcgccctctttagtgacaatcaggctgcctatcgcttccgggctgaccagcgcacgttgcggccctttggtctgccagtagcccgccagccagtccggcgcgggggttttcacgacattgttatagttttcgacttcggcacagcccgccagcaacaagagcgcgcctgcaattgcgagttttttcatcattcgtcctgcatgagaagaaaagaggattgtggcattaaagccctgatgtcgccagcctttcaaggttcagagagaaatttgatctaa

SEQ ID NO: 140392 - DNA, 1417 bp, Homo sapiens; identical to SEQ ID NO: 130019

SEQ ID NO: 140393 - DNA, 2652 bp, Homo sapiens
ttaacatcgattcggtaccaccgggcttacaatctcaaggtgagacgggttaaacgccagcgccaggtgcaccaggccgccatcggtctggaagtcagacgagaagcccatgtggtatttcacgtcacccgtgccgaggtgttctttatgtttaccggcgaactcgtcgaacaagtcttgcggttttttacccagcacgttcaccagcacgttcagacgaccacggtgcgccatcccgagaaccacttcgcgggtgccgctgttgccagcgtggcggatcatctctttaagcatcgggattaacgcgtcaccgccttccagcgagaagcgttttgcgccagggaattttgcgccgaggtaacgttcaagaccttcagcggcggtcagttcgcttaagaagcgttttttctcttcgctattgaaagtcgcgcgaccagactcgatacgctgttggatccagcgtttttcttcggtgctggtaatgtgcatatactcggcaccaatcgggccgcagtaggtttgcttgagggcttccagcagctcgccgagtttcatggtttctttgccgctggcaaatgaaccgacgttgaaggtctcctggaagtctgcttcggtcagatcgtggaaagacggatccagatcggccactttatcttgctgccacagtcccagcggatcgagattcgcatgctggtgaccacggaagcggtatgcgttaatgagctgcaggactttaacctgcttcacattggtgtcaggctcggagatcgttgaagagtacgtgaaacagccgatgatctgaaaggcaaaaaagtgggggtcggtctgggcaccaactatgaagagtggctgcggcagaatgttcagggcgtcgatgtgcgtacctatgatgatgacccgaccaaatatcaggatctgcgcgtagggcgtatcgatgcgatcctcgttgatcgtctggcggcgctggatctggtgaagaaaaccaacgatacgctggcagtaaccggtgaagcattctcccgtcaggagtctggcgtggcgctgcgtaaaggaaatgaggacctgctgaaagcagtgaatgatgcaattgcggaaatgcaaaaagatggcactctgcaagccctttccgaaaaatggtttggtggtaagctggaatttctcgcggcagatgctctgcgtgaaggtgccgatacgctgattactgccggggcgatccagtctaaccatgtgcggcagactgccgcagtcgctgcctaactcggtctgcactgcgtggcgctgctggaaaatctgaccgatcccaatgcccaactggaagagctggcgacgcgagtcgaagcacaaggctttcgcccgtatgtcattccggttggcggttctaatgctcttggcgcggccggactggctgttgggctggaacacctgatgcctgaaagcgaactgattggcgtgaccgtgtcgcgttccgttgccgatcaattgccgaaagtggttaacgacaggcgattgcgaaagaactggagctgaccgcatcagcggaaattttactctgggatgactattttgcacctggctacggcgtgccgaacgacgaaggcatggaagcagtgaaattgctggcgcggctggaaggcattctgcttgatccggcggtgcgcctgcgctgatcgccatgacggtcaggctcattctttgccctcggtaccggaataccaggaaatccagccccagcgcatccgctttttgcccgttctcgaaagcagtcagaattaatggatgcactaacgctccaccaatcaccatggcagtaaatggattaccgccgaagcgtttccccgcggtgtatcccaggattatcgggaagaaccaaaacaaggcatcactggcgctgaataaaattaaataagtaccactttgttcggtcgtccactgaaaagtgagcgccagagccagcatacctttcaagatcccggttgccgccatcaaaccgatcagaggcgtaaaaatacctgaaataacataaacaaagcggtttagcagattacctttatcatcattttccggtgcctgttgcgctttttcgtcaaggcctgccacactgttaaccgccaggaagacatcggccacatggttacctatgaccacctgaaactggccaccgctttccaccaccataataataccgggggtctttttcagtacctctgcttgcgctttgctttcatcctttaatttaaaacgtaatcgcgttgcgcaatgcatcagactcacaatgttatctgcgcccccgactcctgcgactatttttctggctaactccgtcataacttgccctctaccgctttgcggcaaaactccaaaaaaaaacgttgatactggaacccataaaatgggatcgttccgccttgcagctgggggtattcgttcccgcggcggaggatccccattgctggaatggctgcggatggctgtagaccgtattgatggtggataaatcagtagtgccggagaccaacaaacaagtggtcgatagttaacgtcatctcgccaaagagaatacatgactggctgggtgcaatggatcacatttgtaatcctaggcacttggggaggcaatgcaggaagatcatttgagaccagcgtgtgtgacat

SEQ ID NO: 140394 - DNA, 1674 bp, Homo sapiens
gaaataatgcagcaggtgtttttccaggaaactgagtttcttaattcagttattgattatgatcataaagtagaaacagaaaatctttgtctggacatcgcttatggaactgacaaaaactttctatttggttgcggaatttcgattgcttcaatattaaaatataatgaaggaagtcgattgtgtttccatatttttactgattattttggtgatgatgatcgcaaagcactggcactggaaaaacagctttatgaagagctgttcgacctgctgttgccgcatctggaagcgttgcaacagagcgcgagcgcgctggcggaactcgacgtgctggttaacctggcggaacgggcctataccctgaactacacctgcccgaccttcattgataaaccgggcattcgcattaccgaaggtcgccatccggtagttgaacaagtactgaatgagccatttatcgccaacccgctgaatctgtcgccgcagcgccgcatgttgatcatcaccggtccgaacatgggcggtaaaagtacctatatgcgccagaccgcactgattgcgctgatggcctacatcggcagctatgtaccggcacaaaaagtcgagattggacctatcgatcgcatctttacccgcgtaggcgcggcagatgacctggcgtccgggcgctcaacctttatggtggagatgactgaaaccgccaatattttacataacgccaccgaatacagtctggtgttaatggatgagatcgggcgtggaacgtccacctacgatggtggaaggctggtgcgctcagtttatataaatacgcaaatagtgactgtgttcgaccgcgtttggcccccacaccaattgagttccgcctgctggcggtgctgctcaacaatgccggaaaagtactcacccagcgccagctccttaaccaatcaggcgctggcgcggacggcattgtatgctgcaaaagagaccgtccctgaagagcggctggtacattcgtttcacagctactttcttcgccctggcgatagtaagaagccgattatttatgatgtcgaaattgctcgtatgaatcccagccctaccggacattatcagggaaaccataaccgctgcacgccagaacagacattacgttatctcaaccggctctcggggccctttctcgaccgcttcgatctctcactggagatcccattaccaccccccggcattttgagtaaaacggtagtgccgggagaaagcagcgccaccgttaaacaacgcgtaatggattcagccacgcctgcgctgttgcccacatcatcggatgtttgtcgggattttcccgcagccatccagtcggtgtttaccgttggcggctttggcttcagcggtcaggggcaaaacaacggcctggcgtttatcagtctcaagccgtggtctgaacgtgtcggtgaggaaaactcggttaccgcgatcattcagcgggcaatgattgcgttaagcagtatcaataaagccgtcgtcttcccgttcaacttacccgcggtggctgaactgggtaccgcgtcaggttttgatatggaactgctggacaacggtaacctggggcacgaaaaactaacccaggcgcgaatggcacatgcatacatatgtaacaaacctgcacgttgtgcacgtgtaccctaa

SEQ ID NO: 140395 - DNA, 3947 bp, Homo sapiens
atggtggtggaaagcggtggccagtttcaggtggtcataggtaaccatgtggccgatgtcttcctggcggttaacagtgtggcaggccttgacgaaaaagcgcaacaggcaccggaaaatgatgataaaggtatttttacgcctctgatcggtttgatggcggcaaccgggatcttgaaaggtatgctggctctggcgctcacttttcagtgcgtgaacaaaacaatgctacaggccagactggctgttgagctgcaaatcctcagggatgaattactctcaggccactaccagcccttgcccgccagacgggtttacatccctaaaagcaacggcaaactgcgaccactgggtatccccgcgttgcgggatcgtattgttcagcgggccatgctgatggcgatggagccgatatgggagagtgattttcatacgctctcatatggcttccggcctgagcgcagtgtccaccacgcgatccgcacggtgaaattacagctcacagactgtggtgaaacccggggacgctgggtgattgaaggcgacctgtccatttacttcaacgccgttcatcagggtctcctcatgaagtttgcactccgcaggatcagtgacgcaccgccagactggccatggagttacaggcagagcctattattcgatcgaattttgacgttctgactcgctgtacgaaagccttttttgtcgtgggtaacgcgcttgatgaaaatcccctgattcgggtgggcgtgctgaataagaaggaaatgcagacgtatcgggatttaggcgcagtaggtgtcatttgtggtcgcttctatgacaaggaagggatgcccgtcgtggctgatgttgaccagcgtattctgggaatcagtctggctcagctaaggcagattgaacggaagatcttccttgctgcgggaaaactatttcgcaacgtcgcgcttgtggctaaaatagccgccatttttcagctactggataagaatgtgaccgtatcttctcatcgacttgaaactgtttaagcccggcaaccgatgccgctattgccacgcgaagctaattttgcacggtgccgaatgctgtttatatcggcggccctggttttggtgcccgtcataatgccagtaatagcttgaaagatattgccgagctggtgccgtttgcccatcgttatggtgcaaaaattttcgtcacgcttaacaccattttgcatgatgatgagctggaacccgcgcaacggctgattactgacctctaccagaccggtgtcgatgcgctgattgttcaggatatggggattctggaacttgatattccgccgattgaactgcacgccagtacgcagtgcgacattcgtacagttgaaaaagcgaagttcctctctgatgttggcttcacgcagattgtgctggcgcgagagctgaatcttgatcagatccgcgcgattcaccaggctacggacgcgaccattgaattctttattcatggggcactgtgcgtggcctattcgggtcagtgctacatttctcatgcgcaaacagggcgtagcgccaaccgtggcgattgctcgcaggcgtgccgtttgccatacacattgaaagacgatcaggggcgggtggtttcctatgaaaaacatctgctgtcgatgaaagataacgatcagactgccaacctcggcgcgctgattgatgctggtgtacgctccttcaagattgaagggcgttacaaagatatgagctacgtgaagaatatcaccgcccattatcgccagatgcttgatgccattattgaagaacgtggcgatctggcgcgcgcttcatcaggtcgtactgaacatttctttgttccatcgacggaaaagactttccaccgtggtagcacagattattttgtgaatgcccgtaaaggcgatattggcgcgttcgattcgccgaaatttatcggcctgccggaagaaagtcactgttgttttatcgcatcgggctataacgaagatctggatgagtggcgcgcgctggctgacggcgcgaccgattatctggagcgtctggaagtccgcgagcgtgaacgtaccggcctggacacgctgaaagttggctttaatgcggtgcacggctactacattcaaatcagccgtgggcaaagccatctggcacccatcaactacatgcgtcgccagacgctgaaaaacgccgagcgctacatcattccagagctaaaagagtacgaagataaagttctcacctcaaaaggcaaagcactggcactggaaaaacacgctttatgaagagctgttcgacctgctgttgccgcatctggaagcgttgcaacagagcgcgagcgcgctggcggaactcgacgtgctggttaacctggcggaacgggcctataccctgaactacacctgcccgaccttcattgataaaccgggcattcgcattaccgaaggtcgccatccggtagttgaacaagtactgaatgagccatttatcgccaacccgctgaatctgtcgccgcagcgccgcatgttgatcatcaccggtccgaacatgggcggtaaaagtacctatatgcgccagaccgcactgattgcgctgatggcctacatcggcagctatgtaccggcacaaaaagtcgagattggacctatcgatcgcatctttacccgcgtaggcgcggcagatgacctggcgtccgggcgctcaacctttatggtggagatgactgaaaccgccaatattttacataacgccaccgaatacagtctggtgttaatggatgagatcgggcgtggaacgtccacctacgatggtctgtcgctggcgtgggcgtgcgcggaaaatctggcgaataagattaaggcattgacgttatttgctacccactatttcgagctgacccagttaccggagaaaatggaaggcgtcgctaacgtgcatctcgatgcactggagcacggcgacaccattgcctttatgcacagcgtgcaggatggcgcggcgagcaaaagctacggcctggcggttgcagctctggcaggcgtgccaaaagaggttattaagcgcgcacggcaaaagctgcgtgagctggaaagcattttgccgaacgccgccgcttcgcaaagcacatcagagcgcaaagttgccgaggtcattctggcttcgcccgataacgcgatccattcgagtattgctgctatggcactggaagccaatgttagcgaaccgacggtgaatcgtttctgtcgcagcatggacacgcgcggttttcctgattttaaacttcatctggcacagagtctggcgaatggcactccctatgttaatcgcaatgtcaatgaagatgacagcgttgaatcatacacagggaaaatatttgagtccgcaatggcaacgcttgatcatgtccgtcattcactggataaatctgccatcaaccgcgccgtcgacttgctcactcaggcaaaaaaaatcgcctttttcggattaggctcttcagccgccgttgcccacgatgcgatgaataagttctttcgttttaatgttccggtggtgtactccgatgatatcgtgctgcaacgcatgagttgtatgaattgtagcgacggagacgtggtggtgctgatttctcacactggaagaacaaaaaatctggtcgagctggcgcagctggcacgcgaaaacgacgccatggtgattgccctcacctctgcgggtaccccgctcgcccgggaagcaacgctggcaattaccctcgacgtaccggaagatactgacatttatatgcccatggtttctcgacttgcacagctgaccgtgatagatgtgctggcgacaggatttactttgcgacgcggtgcaaaattcagagataacttgaagcgggtcaaagaagcgctgaaggaatcgcgttttgataagcagttacttaatttaagtgac

SEQ ID NO: 140396 - DNA, 891 bp, Homo sapiens
atatcgcccgatttttgggaggaaccacgcgtccgcccacgcgtgcgccccgatctgtttcctgcatttttatgcagggaagaaatctaaattcaaaaccgggggtcacaggaagaccctgaaccccgagttcaatgaggtgagccagggccaggcaggtcccagccaaccctggccttgacatgctgagccactaccctaccggggcctgcttcttaagctgggggagagccgaggctgcctccttcccgcctctctgcccttctccctgcaggaattcttttactcaggcccacgggaggagctggcccaaaagacgctgctggtgtctgtgtgggactatgacctaggcacggctgatgacttcattggcggcaagtgcgacccggctgaccaagatgtggtgcacacggccctgcgggaaaacccgggaggagctgggcctggcagtgcccgaggagcacgtgtggggcctgctgcggcctgtgtatgatccgcaaaaggccaccgtggtgccagtgcttgctggtgtaggcccactggatccccagagcctcaggcccaactcggaggaggtagatgaggtgtttgcactgccgctggcccacctgctgcagacgcagaatcagggctatacccacttctgccggggtggccacttccgctacacactacccgtcttcctgcatggaccacaccgggtctggggcctcacagctgtcatcactgagtttgccctgcagctgctggcacctggtacctaccagccccgcctggccggcctgacctgctcaggggctgagggtttggcccgccctaagcagcccctggcttcaccctgtcaggccagctccactccaggactgaataaaggtctttgacagctctaaa

SEQ ID NO: 140397 - DNA, 396 bp, Homo sapiens
ttattttcttaaacatctgcaagctgcagaattccttagtcctcagctatagtttctgctagatatcttaaagctgggacagttccactgtgactcctcctcagctatggggtgggtgcctagtcatccaaaatctggaatgtccatccataggagtacccacggtagcctttggatgcatagtaagcgatgcgcaggtggtaaaatccgggtaggaacaccagaatgcccaatgatcagcactggaacggcccggtctgccccctgaaggtcaatgtagccatcgtctgtgctggagagccttgaatatttcactttactactggggattccagtagccaggttggtacgggacggcatcataacacgctgacacaggttattctcctacccgtc

SEQ ID NO: 140398 - DNA, 960 bp, Homo sapiens
tcagattgtcagaatcagaaggccaaacaccacagtagcaaagaagcccccaatgaagccttcccaggtcttcttcggggacagcttgatgagtggggtccgaccaaagaaaaagccaaacatataggccatgatgtcattacagatcacacaagatatggggacaatgaaccagatcattccttcaaataggttgtggataacaagatgtgactgtgttacaacaatcagcaatgtcacatgggtccagccaaatttgattttaaaggctcgtttgaatccacttgcgaagaatcctccaaaggggccaatgaccgaggcaaaggtggagagagcgatgctgtgaatctggaaggggtacatccggaccggggtccagccaatgactgactggatcaccccaggaatgttgtactcctgcaggcgaaacaggtccgagggctcacagtccacagtgaagctgttggtgtcattgttgtactccacagggcagacaaagcatctgtacccggacatcacataggacagcttgaaggcagttgggtctgataatagtaccttcttccagctgagcgtcctgaaccagggcagatcatatgagtggtagacgttgtagccaatagtgattatctcatggaaacacttaatctgaacgcacatcacctgggagagctgcttcagtggaacaggtggggttgaagttgggttgttgtggtttgaggaatgatgcacagccagggaggggacatgaaatgtcgacagctcttcccagaggtttacccatgaagtggggaagaaagtgcattggttggatgagctgtcagaagttgtttgttgagcctgcctagatggttgtaagtagggctgaaggtcaatgtagccatcgtctgtgctggagagccttgaatatttcactttactactggggattccagtagccaggttggtacgggacggcat

SEQ ID NO: 140399 - DNA, 538 bp, Homo sapiens
  misc_feature (1)...(538): n = a,t,c or g
catctntgggaaggacccaaaaaatctggccattattttcttaaacatctgcaagctgcagaattccttagtcctcagctatagtttctgctagatatcttaaagctgggacagttccactgtgactcctcctcagctatggggtgggtgctagtcatcaaagtctggaatgtcatcataggagtaaccacggtagcctttggatgcatagtaagcgatgcgcaggtggtaaaatccgggtaggaacaccagaatgccaatgatcagcactggaacggcccggtctgccccccctttgctgatgtagcctgacagcaggagggagcctgaaggtcaatgtagccatcgtctgtgctggagagccttgaatatttcactttactactggggattccagtagccaggttggtacgggacggcatcataacacgctgacacagcggagcgccgcgccaggccgcccgcacacccagagctcgcccacggttggcagcgcccaaggttgcaggcgaattcgccacgtgtatgatatcataat

SEQ ID NO: 140400 - DNA, 2529 bp, Homo sapiens
atgcaaccttgggcgctgccaaccgtgggcgagctctgggtgtgcgggcggcctggcgcggcgctccgggcggggacagaaccgtcctctcgggctctgggcgtgtccgagaccgcgctccccgccgaaatcaagctccgagtcatccgtgtggggcattcgtcccccctggcacagttggcctctttccagaagcccgttttgtttgttttacgtctaaattcgcgtcggttcttatttctctccctggcaaggtctgaagacggggacgggggtctccagtgcagcccactcctcgtcatggtattactccagtacaactccaatctgacctacagttttggtgtttggcatggcaggggcgtgatccctactacatacaaccagccgggcacccgagggcccttcgcgctacccgggcccggggccgccgtcggctgcgacaaagggtcagagaacaagacgacccctctgcgcgcgtcccccgcaggcctcccggatgcgccgctgtcccggccgcgcccaccccgacgctgccgctaccttgtcctcgggtggcgcaaccggctcatgggccaccctctgcctcagctctgtcatcctgggaaaatcggccctgttgtcgccacgagctagcagcgaagccgccggagcaggcagctcggcgcgggcacgcgcggactcccacggccggccccgccccgcccgggaggcgcgcggctctgagcggctcacagttcccttagcagcccagcagccagccctggagctcggccccacccagtgccgtcaccgccctttcacccgggccgagcggggccaaggagcccagttcatgacctacctgtaccagctggcacaggagaacctcctgccactggtgtatgggcaggatgcagattctaaccagctgtgtcagcgtgttatgatgccgtcccgtaccaacctgggctactggaatccccagtagtaaagtgaaatatttcaaggctctccagcacagacgatgggtaacatttgacctttcagtttaaaggaaaacccctccttaaggatcccttataagggccatcgcacttgccactgtgctgttttttgattggcgcctttctcattattataaggctcccctcctgctgtcaggctacatcagcaaaaggggggggcagaccggggccggttccagttgctgatcattgggcattcttggtgttcctaacccggattttacccacctggcggcattcggttaattatggcattccaaagggttaccgtgggttaatcctaatgaatgacattccagacttttgaatgactagcacccaccccatagctgaggaggagttcacagtggaactgtcccagctttaagggtatctaggcagaaactatagctgaggactaaggaattctgcagcctgccagatgtttttaagaaaataatgggccagattttttggggtccttcccaaaggatgttaagtggaacctacagttaggctaattagggacaaggctcctatttttcatccctgggggccctggacaagttttttcccacagggaatatgtatcatggaaggaatagagggtttattcttgtgaatggaaaagttgttgccctgcccaccacccctcttgtaggagcttgaagccatttctttttaaatagtcttcaattggcaatttgttctttgtagcaaattgggaacaatgtgggtatggctaatttcttattattaagtaatttattttaaaaatatctgagtatattatcctgtacacttatccctaccttcatgttcccagtgggaaggaccttagtaaaatccaaggatcagtgagttccatctggtaatattttttttactggctttcttactgacagccaacccaggaattttttttatccctgcagagccaagttttccaaaaatggtaaaatacctcccctcggtttaaaacaggtcccttgggacccattcctggatcccaggttcacccagtagggttgggccagccatataattttgcattcattttggccccttggtaaatcaagatgttctggcagattattccctttaacgggccgggactttttggctgtttcctaatgaaacaatgtagtggttattatttagagtttatagccgtattgctagcaccttgtagtatgtcgatcattctgctcgatgattccaaggtatcagccgtggatagcctagaggactagccatcaccttagtttgattcatattttttagcttgcaaaaagtgacttatattcccaaagaaattaaaatgttgaaatcccaaatccctagaaataaaatgagttaaacttcaaacatttcagaaaacattttaatgattttatgatatctttaatcccagtacctaggatctaccttagtttctaggtagctggcattgtggggtcacacttcaacttttccctaaactctgtaggtttttgggacttgggcaactggaagcttgaacatgccatcagctgagttgcag

SEQ ID NO: 140401 - DNA, 1512 bp, Homo sapiens
tgttaggacagtggtttaaaatatataagagaatcagtattttcttttcttttttttttttttttaagtatatattgatcattcttgggtgtttctcgcagagggggatttggcagggtcacaggacaatagtggagggaaggtcagcaaataaacaagtgaacagaggtctctggttttcctaggcagaggaccctgtggccttccgcagtgtttgtgtccctgggtacttgagattagggagtggtgatgactcttaatgagcatgctgccttcaagcatctgtttaacaaagcacatcttgcaccacccttaatccatttaaccctgagtggacacagtacatgtttcagagagcacggggttgggggtaaggttatagattaacagcatcccaaggcagaagaatttttcttagtacagaacaaagtggagtctcctgtgtctacttctttctacacagacacagcaacaatctgatttctctatcttttccccacatttcccccttttctattcgacaaaaccgccatcgtcatcatgacccgttctcagtgagctgttgggtacacctcccagacggggcggctgccgggcggaggggctcctcacttctcagactgggcagctgccgggcggaggggctcctcacttctcagacggggcggttgccaggcagagggtctcctcacctcccagacggggtcgcggccgggcagaggcgctcctcacatcccagatggggcggcggggcagaggcgctccccacatctcagacgatgggcggctgggcagagacgctcctcacttcctagacgggatggcggccgggaagaggcgctcctcacttcccagactgggcagctgggcagaggggctcctcacatcccagacgatgggcggccaggcagagacgctcctcacttcccagaaggggtggcggccgggcagaggctgcaatctcggcactttgggaggccaaggcaggcggctgggaggtggaggttgtagcgagccgagatcacgccactgcactccagcctgggcaacattgagcattgagtgaacgagactccctctgcaatcccggcacctcgggaggccgaggctggcagatcactcgcggttaggagctggagaccagcccggccaacacagcgaaaccccgtctccaccaaaaaaatagaaaaaccagtcaggcgtggcggcgcgcgcctgcaatcccaggcacttggcaggctgaggcaggagaatcaggcagggaggttgcagtgagccgagatggcgggagtacagtccagcttcggcttggcatcagagggagactagggaaaggggagaggggagaggttagtattttcaaaaatcatcatatagtacgtggttacacaactctgaatatactaaaacacattgaattgtatactttaaaggagtgaactatatctcaatatataaggggtgagttatagctcaataaagctgttaacaacaaaacaaaaatgccatacc

SEQ ID NO: 140402 - DNA, 3372 bp, Homo sapiens
atgagaaaggggagagaacagtatgggccagagttcttagaaggacttcatatggaggaggccagtaatggtgacattactcaggcagtcagccttctcactgatgagagagttaaggagcccagtcaagacactgttgctacagaaccatctgaagtagaggggagtgctgccaacaaggaagtattagcaacaactgaagcatttaaccaagatgggaatcactgtaggtggagcagatttgagatggtagatgaagagatcagtttggggaatactaaatttgaaatgcctgttagacattcacggcagaagtgtcagaaagatggtggagacccaggtgcacagttcagaggagaggtccaggctggagaagttatagaccttactcatgataacaaagatgatcttcaggctgccattgctttgagtctactggagtctcccaaaattcaagctgatggaagagatcttaacaggatgcatgaagcaacctctgcagaaactaaacgctcaaagagaaaacgctgtgaagtctggggagaaaaccccaatcccaatgactggaggagagttgatggttggccagttgggctgaaaaatgttggcaatacatgttggtttagtgctgttattcagtctctctttcaattgcctgaatttcgaagacttgttctcagttatagtctgccacaaaatgtacttgaaaattgtcgaagtcatacagaaaagagaaatatcatgtttatgcaagagcttcagtatttgtttgctctaatgatgggatcaaatagaaaatttgtagacccgtctgcagccctggatctattaaagggagcattccgatcatctgaggaacagcagatcatacctggctctttgggggttgatgaaaatgcactatttttgcttttgaatgatgcttggattttatgtagcacatatcttaatccaaacaatccagaattgtctccttttcctaaaagcagcagtcccaggaacaaatctgaaaatccaatggtgcagctgttctatggtactttcctgactgaaggggttcgtgaaggaaaacccttttgtaacaatgagaccttcggccagtatcctcttcaggtaaacggttatcgcaacttagacgagtgtttggaaggggccatggtggagggtgatgttgagcttcttccctccgatcactcggtgaagtatggacaagagcgttggtttacaaagctacctccagtgttgacctttgaactctcaagatttgagtttaatcagtcccttgggcagccagagaaaattcacaataagctggaatttcctcagattatttatatggacaggtacatgtacaggagcaaggagcttattcgaaataagagagagtgtattcgaaagttgaaggaggaaataaaaattctgcagcaaaaattggaaaggtatgtgaaatatggctcaggcccagctcggttcccgctcccggacatgctgaaatatgttattgaatttgctagtacaaaacctgcctcagaaagctgtccacctgaaagtgacacacatatgacattaccactttcttcagtgcactgctcggtttctgaccagacatccaaggaaagtacaagtacagaaagctcttctcaggatgttgaaagtaccttttcttctcctgaagattctttacccaagtctaaaccactgacatcttctcggtcttccatggaaatgccttcacagccagctccacgaacagtcacagatgaggagataaattttgttaagacctgtcttcagagatggaggagtgagattgaacaagatatacaagatttaaagacttgtattgcaagtactactcagactattgaacagatgtactgcgatcctctccttcgtcaggtgccttatcgcttgcatgcagttcttgttcatgaaggacaagcaaatgctggacactattgggcctatatctataatcaaccccgacagagctggctcaagtacaatgacatctctgttactgaatcttcctgggaagaagttgaaagagattcctatggaggcctgagaaatgttagtgcttactgtctgatgtacattaatgacaaactaccctacttcaatgcagaggcagccccaactgaatcagatcaaatgtcagaagtggaagccctatctgtggaactcaagcattacattcaggaggataactggcggtttgagcaggaagtagaggagtgggaagaagagcagtcttgcaaaatccctcaaatggagtcctccaccaactcctcatcacaggactactctacatcacaagagccttcagtagcctcttctcatggggttcgctgcttgtcatctgagcatgctgtgattgtaaaggagcaaactgcccaggctattgcaaacacagcccgtgcctatgagaagagcggtgtagaagcggcactgagtgagcttaaagaagctgaacccaagaagcccatgccccaggaaacaaaccttgcagagcagtcagaacagcccccaaaggctaatgatgcagagtctactgcccagcctaattctgaggtctctgaagtcgagattcccagtgtgggaaggattctggttagatctgatgcagatggatatgatgaggaggtgatgctgagccctgccatgcaaggggtcatcctggccatagctaaagcccgtcagacctttgaccgagatgggtctgaagcagggctgattaaggcattccatgaagaatactccaggctctatcagcttgccaaagagacccccacctctcacagtgatcctcgacttcagcatgtccttgtctactttttccaaaatgaagcacccaaaagggtagtagaacgaacccttctggaacagtttgcagataaaaatcttagctatgatgaaagatcaatcagcattatgaaggtggctcaagcgaaactgaaggaaattggtccagatgacatgaatatggaagagtacaaggagctgaatgccaaagcagcttctctttttgaaacaaatgatgatcactccgtaactgagggcattaatgtgatgaatgaactgatcatcccctgcattcaccttatcattaataatgacatttccaaggatgatctggatgccattgaggtcatgagaaaccattggtgctcttaccttgggcaagatattgcagaaaatctgcagctgtgcctaggggagtttctacccagacttctagatccttctgcagaaatcatcgtcttgaaagagcctccaactattcgacccaattctccctatgacctatgtagccgatttgcagctgtcatggagtcaattcagggagtttcaactgtgacagtgaaataa

SEQ ID NO: 140403 - DNA, 529 bp, Homo sapiens
agatggagctggcaaaggtggtaaagagccaccccagtgccaagatggttctgtgcattgctaccgatgactcccactccctgagctgcctgagcctaaagtttggagtgtcactgaaatcctgcagacactctgcttgaaaatgcgaagaagcaccatgtggaggtggtgggtgtgagttttcacattggcagaggctgtcctgaccctcaggcctatgctcagtccatcgcagacgcccggctcgtgtttgaaatgggcaccgagctgggtcacaagatgcacgttctggaccttggtggtggcttccctggcacagaaggggccaaagtgagatttgaagagattgcttccgtgatcaactcagccttggacctgtacttcccagagggctgtggcgtggacatctttgctgagctggggcgctactacgtgacctcggccttcactgtggcagtcagcatcattgccaagaaggaggttctgctagaccagcctggcatggaggaagaaaactgttccacctcca

SEQ ID NO: 140404 - DNA, 2580 bp, Homo sapiens
ctagtaagtgttcattgagtgttccagaaagatgggaggaacacagggaagaaagagttggcgacggagaggcagcgagtctgggttatgccggagtgatgacgccgacaggactcgcgccctggcgtaggcgcatcggggatgagatgggtcgcgacccatgtcagtaaggatgggtgagacagacagaggggttcggaacggagacgcctcgtactggtcgctgcccaacggcggaccggtagtgggcaggactccatggagacgcggtgccaggcgatcgtcagtcccgcgcagggggcgcagtgttagcgccctgtcgcagagttgggcggccgggcggggtacgagagcggcgccgatgctcgcggcggcaggcacggctgccacgcagcgggcacggacgtcgggcgcaggcgcggcctcggcgcgcgctcggcggtgcggcgccgcgcgcgccgtgggcgcggctggcacgggcgcggcatcgaagcgccggtgagtgtcggcggtggctggccgccgcccgcgttcggctgccagagcgcgcgcggtgcgcgtcgtggtggcgcgcgaggcggcgtcgcgcggcgagcgcggcggcgtctgggcgccgcggctcgcgggagtcgcgcgcacggccgtcgcggcccggacgtgtcgccggagccacgtaaaaggcggtaagaggggttttcctttagttttggccattccatttcccctctcttgtccatacttcaccgagtgatcggagggaagaagctcaacatcaccctccaccatggccccttccaaacactcgtctaagttgcgataaccgtttacctgaagaggatactggccgaaggtctcattgttacaaaagggttttcctgtatgcagaatgctcttgaaggtcaggctgcaattctggacatcaaatggaaaagcatatgtctctaaactgcacgcagagaccacctggatgggcttatagttctcaatggtcccagatgagttcacataaacatagggaaggtcaggggatctttcaatgtccacactatatgaaacacaagagaacttggttgtcacagagaggatgttggtcatttcaaaacataggaactcattgatgatgatatcgggggcccagatggcacttagaggtagggagatctctctaatctcatcaaacatgctagaagggtcgaaggcgccgcgggctggggtcggtggcttagggagcccgtccggccatggtggccgcggctggtggttggcgcggctgcgctgcggcccggggcagtgcggagctgggacagtcgcggcgctgacgcccgcgggccccagctgcagatatgaagcggagccgctgccgcgaccgaccgcagccgccgccgcccgaccgccgggaggatggatttcagcgggcagcggagctgtctcagtctttgccgccgcgccggcgagcgccgcccgggaggcagcggccgccggggtgagtttaaccagagaattcaaccctctttgaaactcagttccctgctgttcctcagatgatcggaatgctccctttaatagatccagggctgcagacgggtctacaaattttctatttgatcccatcattagagcaaacaaatactgaagctcttgcataaacatgatatttctcttttctgtatgacttcgacaattttcaagtacattttgtggcagactataactgagaacaagtcttcgaaattcaggcaattgaaagagagactgagggtatctgtctgccagctttgtacgacaaatatagtttctcatctccaaactcgtatttgaacaactggcacagatttcccgttttctcgagccgtggccgtctgccgcgccggccgcgtcgtcctgctgcagctccgcagtcatggccgaggcgcccagccgcgggtcaccggtctcccgccgcagccgccgccggcccagcctctcaggacagacgtcggtcacgtgatcccggccccgcctgtcgctgttggtcagcttcacagccggtggaggctgcgggccgcgctgccagtgtccgggaactgggtttgcgaatcctgggagccgcgttcctgagtcttctccgctctctgccctcaaaacctcatttgtaggactgacctccggctccaccctccccacgggcgagttaaaactgttcccccgccgtgggaaactgccgaatgaccgtggaataaaggatttcccatcaggctttgtagccatttccaactccaatgacatgaagaagtgttcaccatcacccacaaacacgtgggaattatccaggtcacactgatgcaaaaggtgggttcccatggtcttgggcagctctgcccctgtggctttgcagggtacagtctccctcttggctgctttcatgggctggcattgagtgtctgcagcttttccgggcacacagtgcaagctgtcggtggacccaccattctgggctcgcgcggcaccgccgcgggcgccccggcccacacccgccggcggcacccgcagcggcgccgcggcggcggccccacacgcgtcccgccccccgcacgcgcgcat

SEQ ID NO: 140405 - DNA, 2213 bp, Homo sapiens
atatgaagcggagccgctgccgcgaccgaccgcagccgccgccgcccgaccgccgggaggatggagttcagcgggcagcggagctgtctcagtctttgccgccgcgccggcgagcgccgcccgggaggcagcggctggaggagcggacgggccccgcggggcccgagggcaaggagcagccgcctgccttggcctcccaaagtgccgagattgcagcctctgcccggctgccaccccgtctgggaaggcttctgggattccagaaagcctgcaggtgttggagcctcaaccctcatatcctcatggccctgctgaggtctcttgtcccacctgacaagaaacacccacaggtgtggaggggcaggccaccccttcatctggcgcccaacgtggggcttttctctagggtgaaggtacgctcgagcgtggtcattgaggacaagtcaatgagagattcccgaagaggcctatctcaaagaagaagaaggagaaagaagaagaagagaggtagcagcagcaagaagaagaagaggaggaagaagagaaagaagaagaagaggaagaagaggaagaggaggaagaataggaagaagaagaagaagaggaagaacaagaggaagaagaagaggaagaaggaagaaaagaaagaagaggaagaagaaagaagaaagaaggaggaggaagatgaagaaggaagaggaagaggaagaaggaagaggaagaggaagaagaggaagaaaagaagaagcagaaagaagaaagaaacagcagcagcagcagcagctggagaaaggctgggaaaatggtggccaggagagtgtccggtagagtgtgttgcatactttctaaggcggcggctgcagcagcggctccatccagcccgtcagctcctcctgcaaggcatggctggctacctgagtgaatcggactttgtgatggtggaggagggcttcagtacccgagacctgctgaaggaactcactctgggggcctcacaggccaccacggacgaggtagctgccttcttcgtggctgacctgggtgccatagtgaggaagcacttttgctttctgaagtgcctgccacgagtccggcccttttatgctgtcaagtgcaacagcagcccaggtgtgctgaaggttctggcccagctggggctgggctttagctgtgccaacaaggcagagatggagttggtccagcatattggaatccctgccagtaagatcatctgcgccaacccctgtaagcaaatttgcacagatcaaatatgctgccaagcatgggatccagctgctgagctttgacaatgagatggagctggcaaaggtggtaaaaagccaccccagtgccaattttcacattggcagtggctgtcctgaccctcaggcctatgctcagtccatcgcaaacgcccggctcgtgtttgaaatgggcaccgagctgggtcacaagatgcacgttctggaccttggtggtggcttccctggcacagaaggggccaaagtgagatttgaagagattgcttccgtgatcaactcagccttgggacctgtacttcccagagggctgtggcgtggacatctttgctgagcttggggcgctactacgtgacctcggccttcactgtggcagtcagcatcattgccaagaaggaggttctgctagaccagcctggcagggaggaggaaaatggttccacctccaagaccatcgtgtaccaccttgatgagggcgtgtatgggatcttcaactcagtcctgtttgacaacatctgccctacccccatcctgcagaagtcttccaccaagagcctgcggaccactatcggcgaggccttcgagcggctgcaccggctgctgcgtgaacgccagaaggccatgctagaggagctggaggcggacacggcccgcacgctgaccgacatcgagcagaaagtccagcgctacagccagcagctgcgcaaggtccaggagggagcccagatcctgcaggagcggctggctgaaaccgaccggcacaccttcctggctggggtggcctcactgtccgagcggctcaagggaaaaatccatgagaccaacctcacatatgaagacttcccgacctccaagtacacaggccccctgcagtacaccatctggaagtccctgttccaggacatccacccaggcaggaagagcaaggaggttaacgtggctggagggagatga

SEQ ID NO: 140406 - DNA, 876 bp, Homo sapiens
atgaagaaagaagatgcatttttgaaggcattctatattgttcatgggaagtggaactgtgtaaaaggctcattaaccaggactccatgctgctgcacaaattgcctggcaggagggatatggtgcatgagagtccaaatcttccagctggagaacaaggtgctgcctggctttccatgggcttgcagagtggacctctatggccagattggatttgatgctgcagctcagtgcctttctctgagtgtaagtaaggcagagccactggtaaagaaggctccaccggagttgagggagcagctggccagaaaaactctcagtagtgataaccttaaatacctgtttgacaacaaagatatcatgaaggtaaaacaaagcaagaagaaaaaagagcacagtttcagaaagaataatggatgcattaaaatcatcgcgttcagcgaccatgccgaggacttccgcaagctgggctgcgaagtgctgggcatctcagtggactctcagttcacccacctggcttggatcaacaacccccagagggagggagacttgggccccctgaacatccccctgcttgctgaggtggccagtggcttgtctgaggattacgccgtgctgaaaacagatgcgggcattgcctacaggggccgctttatcagtgatggcaagggtgtcctttccagatcactgttaatgatttgcctgtgggacgctccgtggatgaggctctgcggctggtccaggccttccagtacgcagaagagcacgcggaagtttgtcccgctggctggaagcctggcactgacacgattaagctcaacgtgggtgacagcaaggaaaatttatccaaacacaattaggctggctgacggatag

SEQ ID NO: 140407 - DNA, 1050 bp, Homo sapiens
cccacgcgtccggtcttggttcgggccgggcataaaaggcttcgcggcccagggctcacttggcgctgagaacgcgggtccacgcgtgtgatcgtccgtgcgtctagcctttgcccacgcagctttcagtcatggcctccggtaacgcgcgcatcggaaagccagcccctgacttcaaggccacagcggtggtctgatggcgccttcaaagaggtgaagctgtcggactacaaagggaagtacgtggtcctctttttctaccctctggacttcacttttgtgtgccccaccgagatcatcgcgttcagcaaccgtgcagaggacttccgcaagctgggctgtgaagtgctgggcgtctcggtggactctcagttcacccacctggcttggaataacaaccccccggaaagaggggaggcttgggccccctgaaacatccccctgcttgctgacgtgacccagacgctttgtctgaagattacggcgtgcttgaaacagatgaggggcattgcctacaggggccttctttatcatcgatgggcaagggtgtccttcgccagatcactgttaaatgatttgcctgtgggacgctcccgtggatgaaggctctgcggctggtccaggccttcccagtacacaagacgagcatggggaagtttgtcccgctggctggaagcctggcaagtgacacgattaagcccaacggtggatgacagcaaggaaatatttctccaaacacaattaggctggcttaacggatagtgagcttgtgcccctgcctaggttgcctgtgcttgggtgtccaccctgtgtccccacatctgggtgcccttatgcttgacccagggaaaggccaagaccctgcccctccaaactccacaagtaatgggaccctggaagggctaaggccaaaggctttctcatgcctccaacctaagaaagctgaataagttgacgcccctcccccaaagcccacccagcccgcacacaggcctagaggtaaccaataaagtattagggaaaggtgaataaaaaaaccaaaaaaggggg

SEQ ID NO: 140408 - DNA, 807 bp, Homo sapiens
atggctgctgaagatgagttactgttgccgcggctccccatgctgctcgaaacaggcaaacagcttctggacgaagtagaattagcagctgaaaccaccggttaccagatagtccaggagaagcgggctcgagaacattttataaactacttaactcagtgccattactatcacattgcaaagtttgagctgctcaaaaccaagaacaactcagctgaaaatcacactgctaattcctccatggcttatcctagtctcgttgctatggcatctcaaaggcaggctaaaatagagagatacaagcagaagaaggagttggaccataggttgtctgcaatgaaatctgctgtggaaagtggtcaagcagatgatgagcatgagaggcctccagtgaaatccttcattctcacgcggaacacagcccaagccaaattatttggagctagttatccaagtctggcaactatgacagtgagtgactggtatgaacaacatcggaaatatggagcattgccagatcagggaatagccactgcaacaccagagaaattcagaaaagcagctcagcaacagaagtatcaagaagtgaaggagggagaggatgatgaacactctacagagttcgggagtgggataactggaaggacacccatcctgggggctatggcaaccgacagaacatgggctgatcttcccccaacacgacaggactgcagggtgcacacctcccccaccaaggaaaaccatgcagtgttcccctccctgggctcccgcttcagctgtgtacaacgaaggcaaagatgctaa

SEQ ID NO: 140409 - DNA, 1156 bp, Homo sapiens
  misc_feature (1)...(1156): n = a,t,c or g
aactacttaactcagtgccactgctatcatgtggcagagtttgagctgcccaaaaccatgaacaactctgctgaaaatcacactgccaattcctccatggcttatcctagtctcgttgctatggcatctcaaagacaggctaaaatacagagatacaagcagaagaaggagttggagcataggttgtctgcaatgaaatctgctgtggaaagtggtcaagcagatgatgagcgtgttcgtgaatattatcttcttcaccttcagaggtggattgatatcagcttagaagagattgagagcattgaccaggaaataaagatcctgagagaaagagactcttcaagagaggcatcaacttctaactcatctcgccaggagaggcctccagtgaaacccttcattctcactcggaacatggctcaagccaaagtatttggagctggttatccaagtctgccaactatgacggtgagtgactggtatgagcaacatcggaaatatggagcattaccggatcagggaatagccaaggcagcaccnnnnnnnnnnnnnnnnnnnnnnnnnnnnnnnnnnnnnnnnnnnnnnnnnnnnnnnnnnnnnnnnnnnnnnnnnnnnnnnnnnnnnnnnnnnnnnnnnnnnnnnnnnnnnnnnnnnnnnnnnaggaattcagaaaagcagctcagcaacaggaagaacaagaagaaaaggaggaagaggatgatgaacaaacactccacagagcccgggagtgggatgactggaaggacacccatcctaggggctatgggaaccgacagaacatgggctgatcttcccacaacaccacaggactgcagggtgcacaactcccctgccaaggaaaaccatgcagtcctcccctccctggtctcctgcttcagctctgtacaacgagggcaaagatgctaaatcttgctttgcattcagtaaagtgtcaagtgattaagtgtgtatttgtaccctagatgatatgaaccaccagtcttgttttggcatcatcctcatcatgttgtattccagcttcttaagtggaaggaaaagagtgctgagaaatggctctgtataatctatggctatccgaattctctgaaaaaataataaaagtcccctctattatatgagcctgtacagaaaaaaa

SEQ ID NO: 140410 - DNA, 587 bp, Homo sapiens
caggaaagccgagagaatccacagacgctttgaaggaagaggcttgctgctgtaggctttgtgagatagccaaaaaactgagtgcccaaagtgtgatatggggagtgtccacccccgaacacacatcctctgtggaaaacctgaaggtccagatcatgggagaaggatttgacctcacatgcagctgaggcaaatttacagccaagcaaaatataggggtagaggaagcagcaggacgagccctgtgggcacttgcagtccccagggaaaccattcctgactttgtcttgcagagatccttggggagggctgccagtgtaactggagaaagaccataggaagaagaaaagttccagctgaactttgtaaaaatttaaaccgaatacagtttcctggacagaaccctcgtggtgagcgttacagttcttaaaggtggtgtgtccagagtttgttccttctgatgttcggatgtgtttggagtttcttccttctggtgggttcgtggtctctctggcttcaggagtgaagctgcagaccttcgtggtgagtgttacagctcttaaggtggcgcatctggagtcgctcat

SEQ ID NO: 140411 - DNA, 3858 bp, Homo sapiens; identical to SEQ ID NO: 135741

SEQ ID NO: 140412 - DNA, 1293 bp, Homo sapiens
atggctctttcaactctgtcatttggcgtgttcgcggcggaaccggtaacggcatcccaggcacagaacatgaataaaatcggcgtggtttctgccgatggcgcatccaccctcgatgccctggaagcgaaactggctgagaaagccgcggcagccggtgccagtggatacagcatcacttccgccaccaacaacaataaattaagcgaaagcccgcaacgtctcttccggcatccaattgccgcgctgcattacataggcctgccagcttccgcattcagtgaatcccctgcttctgcggtccggagcgtgttacagagcctgccgtgttgtgaggtacccggatattatcgtgaggatgcgtcatcgccattgctccccaaatacaaaaccaatttcagccagtgcctcgtccattttttcgatgaactccggcaccatctcgtcaaaactcgccatgtacttttcattccggtgggggacgacataatgcaggccttcacgcttcatgcgcgggtcatagatggcaaagtaccaggcatcttttcgcgtcacccacatgctgtactgcacctgggccatgtaagccgattttattgcctcgaaaccaccgagccggaatttcatgaaatcccgggaggtacgagtattgccggaagcgtggcctgtatccggatgcagagtcttatccgtggaaatcgaacgcgcattacagaacatgcgggccaatgcgctggctgacgcggaattacggcgcaaggctgccgatgaactgacctgtatgacagcgcgaattaaccgtggtgagacgatacctgaaccagtaaaacaacttcctgttatgggcggtagacctctaaatcgtgcacaggctctggcgaagatcgcagaaattaaagctaagttcggagctgatagtctgatcgacaatacaagtgggaccgtggtcccagaccgataatcagaccgacaacacgagtgggatcgtggtcccagactaataatcagaccgacgatacgagtgggacccgtgtcccagatgattaaatggtgctctactctgcctccttcttctagaacatcctgaaggatgcccttggcattctgtgtggtcaactggacattcgctagaacccatgcatttccgcttccccagttctcaagacttgcaactgctactccctctgcctggaaagctcgggtaccgagctcgaattcgtaatcatggtcatagctgtttccttcaaaggcgaaaaaccgtctatcagggcgatggcccactacgtgaaccat

SEQ ID NO: 140413 - DNA, 978 bp, Homo sapiens
  misc_feature (1)...(978): n = a,t,c or g
catgctgtcgcactagtgattttcccgggtcgacgatttcgtctttcagtggatttcggataacagaaaggccgggaaatacccagcctcgctttgtaacggagtagacgaaagtgattgcgcctacccggatattatcgtgaggatgcgtcatcgccattgctccccaaatacaaaaccaatttcagccaagtgcctcggtccatttttccgatgaactcccggcacggatctcgtcaaaactcgcccatgtacttttcatcccgctcaatcacgacataatgcaggccttcacgcttcatacgcgggtcatagttggcaaagtaccaggcattttttcgcgtcacccacatgctgtactgcacctgggccatgtaagctgactttatggcctcgaaaccaccgagccggaacttcatgaaatcccgggaggtaaacgggcatttcagttcaaggccgttgccgtcactgcataaaccatcgggagagcaggcggtacgcatactttcgtcgcgatagatgatcggggattcagtaacattcacgccnggaaagtaaattcaaacaagggttctggcgtcgttctcgtactgttttccccaggccaagtgttttagcgttaacttccggagccacaccggtgcaaacctcagcaagcagggtgtggaagtaggacattttcatgtcaggccacttctttccggagcggggttttgctatcacgttgtgaacttctgaagcggtgatgacgccgagccgtaatttgtgccacgcatcatccccctgttcgacagctctcacatcgatcccggtacgctgcaggataatgtccggtgtcatgctgccaccttctgctctgcggctttctgtttcaggaatccaagagcttttactgcttcggcctgtgtcagttctgacgatgcacgaatgtcgcggcgaaatatctgggaacagagcggcaataagttcgtcatccat

SEQ ID NO: 140414 - DNA, 2530 bp, Homo sapiens
  misc_feature (1)...(2530): n = a,t,c or g
atgcagcggagactgaagcgccgcaatgcaggcttgccgtgttgtgaggtacccggatattatcgtgaggatgcgtcatcgccattgctccccaaatacaaaaccaatttcagccagtgcctcgtccattttttcgatgaactccggcaccatctcgtcaaaactcgccatgtacttttcattccgctcaatcacgacataatgcaggccttcacgcttcatgcgcgggtcatagttggcaaagtaccaggcatcttttcgcgtcacccacatgctgtactgcacctgggccatagccagatcggcctgttgatggagtatccggacgagctgttgtgggaatgcaaggaggacgcgctggcgttgatccgccgcgacgcgccgatgcttacggatttcacccacaacctgcttaacgcgccgctgctggataaacaggccgaatggtgcgaagtgtttgaccgcgggcgcaccacgtcgctgctgctgttcgaacatgttcatgccgagtcccgcgatcgcggccaggcaatggtggacctgctggcggagtatgaaaaggtcggcctgcagctggattgtcgggaactgcccgattatctaccgctgtatctggagtatttaagcgtactgcctgacgatcaggcgaaagaaggattgctcaatgttgcgccgatcctcgccctgcttggcggtcgcttaaaacaacgcgaggcaccgtgggacgcgttgttagatgctcttgtggcaactggggggaagctccctttcaagtgacaatgttaaaaaacaagtaaacagcgaagagcgcgatgacacccgccaggcgcttgatgcagtgtgggaagaggaacaggtgaagtttattgaagataacgccacggcgtgtgacagctcgccgcttaatcaatatcagcgacgctttagccaggatgtcgcgccgcaatatgtcgacatcagtgcgggagaaggccaaagttccttccaattagtttcctactgggagaaagatgttcagacgtgtttggagtttcttccttctggtggatttgtggtctcactggcttcaggagtgaagctgcagactttcacagaaacggacaacttggtcaaagatataacgttctttggcaaaatatcaacaagaagcttaaaaacctacctgaaggatgtcacagagaaaagggaacagagttgtgtcaacctggaattgaagtgatctggcacgggaccctccagcacagtgttccagcaggtcctgttggagatgatatgttccattggcaagcctacaataatggggccaaatgacagtcccctatccagggtggagtatttttcttgacaattcatttccccaacagattaccccttcaaacccacctaaggttgcatttacaacaagaatttatcatccaaatattaaccataatgggcagcatttggtcttgatattctacggttcacagtggtctccagcactaactatttcaaaaagtactcttgtccatctgttcctctgttgtgtgatcccaattccaggatgatcctttagtggcctgagatttgctcggatctacaaaacaagatagagaaaacgtacaacagaatagctcggggaatgggactcaggaagtatggcggatgtaatttaaaggaaattattggggataacctctacaaaataaaggtaggggggaactcttggaaagaggaaagtccttttttggattttccattttggacttgcttttctatggagcccacggcctcatcttcccctgtgcacatgtttacctgatacagcagtgctgccgtgttggtacatacttgggaaccaccaacctangaaatacttgtacttctggtaccaacattggcctcctagcagagaaagtgtgtggtgtgacaagccagttctacaggcattacctaggtgtgagactaaaagcttttcttattgacttaaatttgggataacagcaaggtgtgaggggggtggtgggtatggtgtgtgcttggatgggaaagaaaaggctccactcacctataggagattatttttaagtggaatccatttaaactcaaaacagttatgaaaagcaaggtgaagaagaacatgaagctgtgtcctgtattcattttattcccgaaggagcttaccgtcttaagggtgaaaagttatgaccaaccagattaaactctaccccacatcctgcattttaaggtctaaggtttaactggtcaacatttaaatgggattgggagctattagtacatcaagtgtgatggggccttgttcccaactctttttacatctcccttacccctttcaacctttgggccttttcagcccttcctttctctctttccatattctttggtttgtatgtggtttctcagttaatacatagctaatagctcttatttttcttatgtttttaaccgcttagggtctatttggatgtaagggtgaaaattcatttgatggaaatacttgtgtatatttaaagacccaattgctcctctg

SEQ ID NO: 140415 - DNA, 786 bp, Homo sapiens
atggagcccaagagtcagtttaagtgtcacaccgtcccagttaatatagcccaagatgcctatacaacagctgaagtggtttattcttggactctcggaaagaacaaatccgtggaagtggcacaggatggttctcgcttgaaccagtatgaccttttgggccatgttgttgggacagagataatccggtctagtacaggatttgccggatttcgaaccaccatcaaacagattatcgctgctgggcaaaccagcgtgaccgctgctgcaactctctcaggcccagcggtgaagggcactcagctgtgcccgtctcactggaagcgccggtttcttcaccaagaaatgggaaaaaaggtggaatggaagaatgactttggaggaggtgaagagaaaaagggctttcacaccgatcaaatttattgtgaggaaagccagaagcttcagcagagcgctaaaaaacgcgatgctcagttagcgaacggcgccctcggtatcatagaggagtacactattgatgtattttttcggcagacatggcatgatgaaagactgaaatttgatggcaaaaagaagatccttccactgaacaatctcctggctagtaagatctggacaccggacaccttcttccacaatggcaagaaatcagtggctcataacatgaccacgcccaacaagctgctcagattggtggacaacggaaccctcgtctatacaatgaggacactagtcgtgttggatgaggggcccaccctactccagtacggcatgccctcatcttaa

SEQ ID NO: 140416 - DNA, 1817 bp, Homo sapiens
tcccgggtcgacgatttcgttcaggagagtgacccagagagagaagaagcagccagaagccgagctctgtcagggctcaacctccaacttgtttcagttcattcatccttctctcctttccgctcagactgtagagctcggtctctccaagtttgtgcctaagaagatgataatcacacaaacaagtcacatgttacatgaccagccttgggattcttttcctgattaatattctccctggaaccactggtcaaggggaatcaagacgacaagaacccggggactttgtgaagcaggacattggcgggctgtctcctaagcatgccccagatattcctgatgacagcactgacaacatcactatcttcaccagaatcttggatcgtcttctggacggctatgacaaccggctgcgacctgggcttggagatgcagtgactgaagtgaagactgacatctacgtgaccagttttggccctgtgtcagacactgacatggagtacactattgatgtattttttcggcagacatggcatgatgaaagactgaaatttgatggccccatgaagatccttccactgaacaatctcctggctagtaagatctggacaccggacaccttcttccacaatggcaagaaatcagtggctcataacatgaccacgcccaacaagctgctcagattggtggacaacggaaccctcctctatacaatgaggttaacaattcatgctgagtgtcccatgcatttggaagattttcccatggatgtgcatgcctgcccactgaagtttggaagctatgcctatacaacagctgaagtggtttattcttggactctcggaaagaacaaatccgtggaagtggcacaggatggttctcgcttgaaccagtatgaccttttgggccatgttgttgggacagagataatccggtctagtacaggagaatatgtcgtcatgacaacccacttccatctcaagcgaaaaattggctactttgtgatccagacctacttgccatgtatcatgactgtcattctgtcacaagtgtcgttctggctcaacagagagtctgttcctgcccgtacagtctttggtgtcaccactgtgcttaccatgaccaccttgagtatcagtgccagaaattccttacctaaagtggcatatgcgacggccatggactggttcatagccgtctgttatgcctttgtattttctgcactgattgaatttgccactgtcaactatttcaccaagcggagttgggcttgggaaggcaagaaggtgccagaggccctggagatgaagaagaaaacaccagcagccccagcaaagaaaaccagcactaccttcaacatcgtggggaccaccctatcccatcaacctggccaaggacactgaattttccaccatctccaagggcgctgctcccagtgcctcctcaaccccaacaatcattgcttcacccaaggccacctacgtgcaggacagcccgactgagaccaagacctacaacagtgtcagcaaggttgacaaaatttcccgcatcatctttcctgtgctctttgccatattcaatctggtctattgggccacatatgtcaaccgggagtcagctatcaagggcatgatccgcaaacagtagatagtggtggcagtgcagcaaccagagcactgtataccccgtgaagcatccaggcacccaaaccccggggctccccttcgcgtatttcaggattctcctttttacccctctaccaagctgtgaccctcaattcatatttatgaatctctacgcaaaaaaaaaaaaaaaaa

SEQ ID NO: 140417 - DNA, 559 bp, Homo sapiens
tgaattatgcccgtcaggttaacgaaatttctttgtataccgcacttggtggcggttgacagcaatatactcgtcatacttcaagttgcatgtgctgcgtctgcgttcgctcaccccagtcacttacttatgtaagctcctggggattcactcgcttgtcgccttcctgcaactcgaattatttagagtatgacttttaactccaggagagaataaatgaaaaaagcactgcaagtcgcaatgttcagtctgtttaccgttattggctttaatgcccaggctaacgaacatcctcatgaaaccatgagcgaagcacaaccacaaattaatagcgccactggcgtggtaaagggtatcggatcttggaaagcaaaaaaatcaccatccatcacgatcccgattgctgccgtgaactggccggagatgaccatgcgctttaccatcactccgcagacgaaaatgagtgaaattaaaaccggcgacaaagtggcgtttaattttgtccagcagggcacgctttctttattacaggttattaaagtcaggaagccagcgcaga

SEQ ID NO: 140418 - DNA, 376 bp, Homo sapiens
atatgagggaacacagtatcattttagatcttagaaagcaatgagcatctgataagtctttggggaaataggaaaggaggaaattctaataaagccaaagttcagcaaaagaaaaacaaagagaggctacaaaatgcagttatctacctggaattataagagaggggctaaatgtagtcatctcctctttttggagatcagaaggtctgtgggaaaagagaagaaccaatttttcagaaaataactagggtcacagaatgaacaagtggaattagagagccagtgatggacgtgaggaaacagctgtgtaggttttgaccagtgagcaggtggtggtaatagtatcacagggttgttacttactgaatcattgcga

SEQ ID NO: 140419 - DNA, 622 bp, Homo sapiens
aagtaagcggtggggggtgggagccatctggtactttgacagcattcaaaacagcatcggccataacaacagaaatggccagtcggtcccataggtatccagcagcttctgcaagctgagaagcgggcagctgagaaggtggcagatgccagaaagaggaaggcccggcgactgaagcaggcaaaggaggaggcacagatggagagtggagcaataccgcagagagcgagagcacgaattccagagcaagcagcaggcggccatgggcttccaggggaacctgtatgctgaggtggagcaggctacaaggcgccaggtgcagggcatgcagagctcccagcagagaaaccgagagcgtgtcctggcccagcttcttggcatggtctgcgacgtcaggccccagagaccttctgatctccaaaaagaggagatgactacatttagcccctctcttataattccagctagggcctgccggttcctagtgcgtgcccagcagtcctcaggtcaccttcactaccgggccaaggaccccgtgggaactcgcagccttcgccacactcgttcctcgcgcatccacggaggggtgcctacagagaagacctgcgtggcaaaaacctaa

SEQ ID NO: 140420 - DNA, 187 bp, Homo sapiens
ctctgctgcacaccaaaactggtttgaactggcaccgaaagcggccaatatcattgtaaaagacgaaaaatgggaccagagccaattatcaaaagtctctgggcgcgttctgacgaaccggtattctggggcctttcggggccggtggtatgtggagcgccatcattgcgccggtgatgatccgctg

SEQ ID NO: 140421 - DNA, 1129 bp, Homo sapiens
atggctgtctggcccacgggcgcactcgcgctgacaccttcacctgccggcgacgccggcgcctgctccaccgcgggcggcccctgccagggtgctcgagggccgcggggcagcgggccacctgcctggggcccggatgccgtccttgaaccccttcgggggcaacgtaaaccgtatgtacggccaatgacgtccacctggtggaaaaaattgccgttttatcgcttttacatgctgcgcgaaggcacggcggttccggctgtgtggttcagcattgaactgattttcgggctgtttgccctgaaaaatggcccggaagcctgggcgggattcgtcgactttttacaaaacccggttatcgtgatcattaacctgatcactctggcggcagctctgctgcacaccaaaacctggtttgaactggcaccgaaagcggccaatatcattgtaaaagacgaaaaaatgggaccagagccaattatcaaaagtctctgggcggagcctgagatgattaatccaaatccaaagcgttctgacgaaccggtattctggggcctcttcggggccggtggtatgtggagcgccatcattgcgccggtgatgatcctgctggtgggtattctgctgccactggggttgtttccgggtgatgcgctgagctacgagcgcgttctggcgttcgcgcagagcttcatttggtcgcgtattcctgttcctgatgatcgttctgccgctgtggtgtggtttacaccgtatgcaccacgcgatgcacgatctgaaaatccacgtacctgcgggcaaatgggttattttacggtctggctgctatcctgacagttgtcacgctgattggtgtctgtacaatctaacgcatcgccaatgtaaatccggcccgcctatggcgggccgttttgtatggaaaccagaccctatgttcaaaacgacgctctgcgccttattaattaccgcctcttgctccacatttgctgcccctcaactaatcagcaatattgtgcatcgcacaattaccccgcttatagagcaacacaagatcccgggtatggcggtgccggtaatttatcagggtaaaccttattactttacctggggctatgcggacatcgcctaa

SEQ ID NO: 140422 - DNA, 894 bp, Homo sapiens
ttacatgggctttcctctgtgcatgtggtcagggggtggtggcggggctccaagcgtccggggagagcagaagggctgacgactgagttgataaccaatggccaacgatgttacccatgaacgtacccatcccactatcaggtaagtcttccgcaagatgactgtagcccatcctgtcacactctcacaagccatgacataggttgggctatggacatagccctgcgacaacactgtgaaagtccattgtcgcctttcccacatgaaggcaaactggtcccagctctctggagcgatgttgatggagaaaaatgcattggccaagtccactacataatggtattgtgccagttccatcaacaaatggtccattatattcatgattgacagcacagctgcatgcaaagggggtgttactttattcagttcccagtagtccaccattatctgcgaagttccatcaggcttcctaactgaccacactggagaattgtagggactatgggtgccacacactatctgcacctcctccagctttttaattgtctcagttatctctgtatgcccacccagcaaatggtattgacaggtggaagtaaccttctgacggaccactgggcgaccctgcaacaggggttcttcctcctcggtatcagactgagtggggagtctccggctgtactgcacctcagggactgggtgtgtacttttttgtagcacagtcaaagagccccatctgactctgccggcaaaggctccctccttctcagtgctgtgtgcttccagttgctccagcaccttctccatgcttgcaggagacccatctaccaccacccaggtatccaccggagcccatccaagcagcacagctgccaatgggtaccaccaacccat

SEQ ID NO: 140423 - DNA, 558 bp, Homo sapiens
cttgatcaaaattaagtcacagattgccagatacaaactgaccacaagcacgtacttcctataccatatgtacgtctaagtccctttctaagaatacattccaatttagtatgaatagaaattacatttatagtctttagaaatataatcagttaataacttgattatattttctgcatatattatatatatttggattaatatattggatattggattaatattttaccacaataattattttaactgtaatcctgtgtttattttggggaaaagccctttttttttcagttgggaatcacttttaatatttaaatacaaaaaatgaggcactggcttctctttttttaaacacacacacaaattctaacagccaaaatgtgcagaggaaatgagctcctgctctgtcttccccagtccccatcctgtggctgaagctgcagccagcctctttcctcttatacatagggattcatagtggccacattacaccacagttgtaatgcattttgtctgttttacattgtgtgcatgtccctccccaacagctccattctt

SEQ ID NO: 140424 - DNA, 2190 bp, Homo sapiens
gtcgacatcatcatcatgatcgctcgacatcgaatacgactttttttttttttttttttttttttttttttttttgttggaatcatttttaatatttaaatacaaaaagtgagcactgacttctcttttttttaaacacacacacaggtctaacagccaaaatgtgcagaggaaatgagctcctgctgtcttccatagtccccattctgtggctcgaagctgcagcctgcctccctcctcttataccatggggattaataggggccactttacactacaggtgtaatgcattttgtctgtttcacattgtgtgcatgtcctgccccaacaactccattcttttaaaaaaaaaaaaaaaaaaacagtcgttaatggtcaggggcacatccctcccactgggcatcggttcctaccccacaaggggaaaagtgagatcttccagtttaggagcaatttgggtgaaaaggaggtccgggtgacccagagcatggaataacccgtctgcatggctggactctgggtatcagagtggagacagaagtaaggatagtgtggagggcacagttgcaaagttgaagtctttcccatgagacaaatgtggggataattctcccccacccaggtttagatagatcaatgtgcccaaagttaaaaaaaaaaaaaatcccaaattatcagcagttcaaacacttgaatttcaaacttatcccactgagacagctcaaacagcaataacaatctagatctttcccaggaagtgaaggaagagcccccttgcattcttcctgagagccctgtgttaggccctagaagtatctgctgctgctgcagttgctgctgttgctcggtttgcatcttctcagtctcaaagacaacgggaagaaccaggatcataaaggaagtggtcccaatccacacggctgccctgggaaaccggaccctcttcggaaacatctccatcaggccccatagtctctccgaccaggtctcatctagcttctcctcgtcgtcctcctccaactcctccttagtcttctccacgtcgccttttgggagcaattcctccggggataggggttcccccgttgaatgaatgaagataggtccatgtgcaggattgtctctgatcaactcagcagcatcctcactccgtctacttagggcaatcatctggaacttcttttccaagaatctctttccagtatagttctgggtcagttctccaagcgtccggggagagcagaagggctgacgactgagttgataaccaatggccaacgatgttacccatgaacgtacccatcccactatcaggtaagtcttccgcaagatgactgtagcccatcctgtcacactctcacaagcctgtagggcttgtgcctgctgaatagaccgcttggctgccaggaaggcggtctcagccacatcagcccaatcccggatagctcccattgtggtgggccggggacatgcctgaattttgtcaatgatggcttctggtatggcctttgtcttacctgaccagataactcccaagaatctggcagataatccaggaccttggaccttggattcgttgacggcccaaccacatgctgctaaatgttgccgcaagagggacgccactgcttctaaatctgtcggggttgtggcaggacccgaggctggtgatgcatatgtccatgcagcactggcttcatcacgtgcacctggagtctgaattccccagccatggtttgtaacaccaggccatgtaaaagtacacccccagaatgtattctgcttgcctaattcccgcaactcagttgcggtacaggcaatatatgaagtgtgttgtgttatagtgggcaatccctgagcccgcccttggggtcccaacagctgttcatgatctaccttctgacggaccactgggcgaccctgcaacaggggttcttcctcctcggtatcagactgagtggggagtctccggctgtactgcacctcagggactgggtgtgtacttttttgtagcacagtcaaagagccccatctgactctgccggcaaaggctccctccttctcagtgctgtgtgcttccagttgctccagcaccttctccatgcttgcaggagacccatctaccaccacccaggtatccaccggagcccatccaagcagcacagctgccaatgggtaccaccaacccat

SEQ ID NO: 140425 - DNA, 657 bp, Homo sapiens
tcagggcagcaggatggagagcgaggttataattttaatgagggtggtgattagggatgtgcttgcggataaggtaacatttgagtcaggacttgaaggaggtgagggatccccagtgtggggatctgaggactccatgctccaggcagaggaaccagcacctgcaaagactcttggcaggagggttaggacatgttgaggaccaaggagactgtcctttgttacaggccataaagcatacaggggcctcggtattgtctctgggcccactgttcctcttgtctgcgcggtctgctgctcatactgggaccccggtgtccctcgtgtcgtgcgcctggttgttcgtctgtggccgctgtgccgctgcggtggtcggtctggtgatgcctctgttgccgcggccccgctcgtgtgtggcggcgggatatgagactgggaccactgccccttcgtgtgtgggccgtcgttgtgtgccctgcgtccctcgtgcggctgcggttctggcatggcgtgtcgtgtggtgttgttgctgcggtgtcccctcgcaatgtttgcctttacttcattcttctctgttacagaagtggggaaattttctcccttccccctacccgaattctttttctccggtttcgccttagatttgtcccttcccat

SEQ ID NO: 140426 - DNA, 404 bp, Homo sapiens
  misc_feature (1)...(404): n = a,t,c or g
gagaagaaggcagcaggggccacttcaagcttccctgcttcctaagcttaggttgtcagaagcctttttagagatacatttttagaaaaagaaaaatagtgtggtaacagtttactacttgcttcnnnnnnnnnngttggtttaaagtattttatagtaatattactatagctttatgtctagcttaccaaataaggggtgaagtgtgccccaaaaaacgctgttactgtaaaaacgtgtcttagccccaatttccactcattggatacaatgagggatcaagcactcgaggctctgtcggtttcactgggcacccggcaagcagaacctgagctcgacctccgttcaattaaggaagtcaatgaggataaagatggaaaaccactattgccagagcctgaaga

SEQ ID NO: 140427 - DNA, 3165 bp, Homo sapiens
gaaaagtggatcagccacatcttggcaaaactcacaatttcagttttgctttgtctcatccgtgttatcaatccacatatgccaaatgtggatttacagtgtattgtaaactttaaaatggtgaaatctgtgactgttgctgaaggactcatagaagaccattttgatgtcactgtgaagatgagcacctatctggtggccttcatcatttcagattttgagtctgtcagcaagataaccaagagtggagtcaaggtttctgtttatgctgtgccagacaagataaatcaagcagattatgcactggatgctgcggtgactcttctagaattttatgaggattatttcagcataccgtatcccctacccaaacaagatcttgctgctattcccgactttcagtctggtgctatggaaaactggggactgacaacatatagagaatctgctctgttgtttgatgcagaaaagtcttctgcatcaagtaagcttggcatcacaatgactgtggcccatgaactggctcaccagtggtttgggaacctggtcactatggaatggtggaatgatctttggctaaatgaaggatttgccaaatttatggagtttgtgtctgtcagtgtgacccatcctgaactgaaagttggagattatttctttggcaaatgttttgacgcaatggaggtagatgctttaaattcctcacaccctgtgtctacacctgtggaaaatcctgctcagatccgggagatgtttgatgatgtttcttatgataagggagcttgtattctgaatatgctaagggagtatcttagtgctgacgcatttaaaagtggtattgtacagtatctccagaagcatagctataaaaatacaaaaaacgaggacctgtgggatagtatggcaagtatttgccctacagatggtgtaaaagggatggatggcttttgctctagaagtcaacattcatcttcatcctcacattggcatcaggaaggggtggatgtgaaaaccatgatgaacacttggacactgcagaagggttttcccctaataaccatcacagtgagggggaggaatgtacacatgaagcaagagcactacatgaagggctctgacggcgccccggacactgggtacctgtggcatgttccattgacattcatcaccagcaaatccgacatggtccatcgatttttgctaaaaacaaaaacagatgtgctcatcctcccagaagaggtggaatggatcaaatttaatgtgggcatgaatggctattacattgtgcattacgaggatgatggatgggactctttgactggccttttaaaaggaacacacacagcagtcagcagtaatgatcgggcgagtctcattaacaatgcatttcagctcgtcagcattgggaagctgtccattgaaaaggccttggatttatccctgtacttgaaacatgaaactgaaattatgcccgtgtttcaaggtttgaatgagctgattcctatgtataagttaatggagaaaagagatatgaatgaagtggaaactcaattcaaggccttcctcatcaggctgctaagggacctcattgataagcagacatggacagacgagggctcagtctcagagcgaatgctgcggagtcaactactactcctcgcctgtgtgcacaactatcagccgtgcgtacagagggcagaaggctatttcagaaagtggaaggaatccaatggaaacttgagcctgcctgtcgacgtgaccttggcagtgtttgctgtgggggcccagagcacagaaggctgggattttctttatagtaaatatcagttttctttgtccagtactgagaaaagccaaattgaatttgccctctgcagaacccaaaataaggaaaagcttcaatggctactagatgaaagctttaagggagataaaataaaaactcaggagtttccacaaattcttacactcattggcaggaacccagtaggatacccactggcctggcaatttctgaggaaaaactggaacaaacttgtacaaaagtttgaacttggctcatcttccatagcccacatggtaatgggtacaacaaatcaattctccacaagaacacggcttgaagaggaaataaagatgaaattaaatatcaaaattctaatcgatgatatcagtggggtccgcagaccgtgggggtgcaaacgggccccgcttgagagctatcgcatagcggctgtaaaaacagaacctgagaagaagtcacagtcaaccaagccaaaaagcctacccaagcaggcatcagatacaggaagtaacgatgctcacaataaaaaagcagtttccagatcagctgaacagcagccatcagagaaatcaacagaaccaaagactaaaccacaagacatgatttctgctggtggagagagtgttgctggtatcactgcaatatctggcaagccgggtgacaagaaaaaagaaaagaaatcattaaccccagctgtgccagttgaatctaaaccggataaaccatcgggaaagtcaggcatggatgctgctttggatgacttaatagatactttaggaggacctgaagaaactgaagaagaaaatacaacgtatactggaccagaagtttcagatccaatgagttccacctacatagaggaattgggtaaaagagaagtcacaattcctccaaaatatagggaactattggctaaacccatagggccagatgatgctatagacgccttgtcatctgacttcacctgtgggtcgcctacagctgctggaaagaaaactgaaaaagaggaatctacagaagttttaaaagctcagtcagcagggacagtcagaagtgctgctccaccccaagagaagaaaagaaaggtggagaaggatacaatgagtgatcaagcactcgaggctctgtcggcttcactgggcacccggcaagcagaacctgagctcgacctccgctcaattaaggaagtcgatgagatgggccagtttctatcttcgactttcttggagggctcaccggccacagtgtggcacgataagctttgtgacggtgaacgcagaggagcaagagaagcagttcgtatcttccaggaccaagtaatgtattgggaagaagggaaacttgattacaacacaatgtga

SEQ ID NO: 140428 - DNA, 394 bp, Homo sapiens
  misc_feature (1)...(394): n = a,t,c or g
cagcatgtgccttcagagaagaaggcagcaggggccacttcaaagcttccctgcttcctaagcttaggttgtcagaagcctttttagagatacatttttagaaaaagaaaaatagtgtggtaacagtttactacttgcttcttttttttttgtttgtttagagtattttatagtaatattactatagctttatgtctagcttaccaaataaggggtgaagtgtgccccagagaacgctgttactgtagaaacgtgtcttagccccaatttccactcattggatacaatgagtgatcaagcactcgaggctctgtcggcttcactgggcacccgggcaagcagaacctgagctcgacctccgctncaattaagggtagtcgntgtagggntaaag

SEQ ID NO: 140429 - DNA, 1637 bp, Homo sapiens
  misc_feature (1)...(1637): n = a,t,c or g
atggatgctgctttggatgacttaatagatactttaggaggacctgaagaaactgaagaagaaaatacaacgtatactggaccagaagtttcagatccaatgagttccacctacatagaggaattgggtaaaaagagaagtccacaattcctccnaaaaatatagggaactattggctaaacccatagggccagatgatgctatagacgccttgtcatctgacttcacctgtgggtcgcctacagctgctggaaagaaaactgaaaaagaggaatctacagaagttttaaaagctcagtcagcagggacagtcagcaagtgctgctccaccccaagagaagaaaagaaaggtggagaaggatacaatgagtgatcaagcactcgaggctctgtcggcttcactgggcacccggcaagcagaacctgagctcgacctccgctcaattaaggaagtcgatgaggcaaaagctaaagaagaaaaactagagaagtgtggtgaggatgatgaaacaatcccatctgagtacagattaaaaccagccacggataaagatggaaaaccactattgccagagcctgaagaaaaacccaagcctcggagtgaatcagaactcattgatgaactttcagaagattttgaccggtctgaatgtaaagagaaaccatctaagccaactgaaaagacagaagaatctaaggctgctgctccagctcctgtgtcggaggctgtgtctcggacctccatgtgtagtatacagtcagcaccccctgagccggctaccttgaagggcacagtgccagatgatgctgtagaagccttggctgatagcctggggaaaaaggaagcagatccagaagatggaaaacctgtgatggataaagtcaaggagaaggccaaagaagaagacctggaaaagcttggtgaaaaagaagaaacaattcctcctgattatagattagaagagggcaaggagaaagatggaaagccactcctgccaaaagagtctaaggaacagcttccacccatgagtgaagacttccttctggatgctttgtctgaggacttctctggtccacaaaatgcttcatctcttaaatttgaagatgctaaacttgctgctgccatctctgaagtgctttcccaaaccccagcttcaacgacccaagctggagccccaccccgtgatacctcgcagagtgacaaagacctcgatgatgccttggataaactctctgacagtctaggacaaaggcagcctgacccagatgagaacaaaccaatggaagataaagtaaaggaaaaagctaaagctgaacatcgagacaagcttggagaaagagatgacactatcccacctgaatacagacatctcctggatgataatggacaggacaaaccagtgaagccacctacaaagaaatcagaggattcaaagaaacctgcagatgaccaagaccccattgatgctctctcaggagatctggacagctgtccctccactacagaaacctcacagaacacagcaaaggataagtgcaagaaggctgcttccagctccaaagcacctaagaatggaggtaaagcgaaggattcagcaaagacaacagaggaaacttccaagccaaaagatgactaa

SEQ ID NO: 140430 - DNA, 774 bp, Homo sapiens
tcagtgcatcggactggcagctttaatgaacttgtacatttgttcagtatgtaatgcctgtagacttgttgaaactgtgcttcttgcctgaatgtgcttttcatctttccaaccgtcttccttctgtgcttctatgcatatcttgggtccaaatttcccctttttataaggacgcgcatcatattggagtaggcccaccctaatgacctcacctttacttgattctataaggaacctatctaaaatcaggtctcgttttgaggtactggggttaagacttgaacatatagtctcatttggtaccatgggaattggaaaagtgcattcttcatttgctagggttatgatccattcttccacttgagtgcttgccgtaagttacccatcactgtgcctgcttctttagaaacccatagggccagaagatgctatatacgccttgtcatctgacttcacctgtgggtcgcctacagctgctggaagaaaacaaataaggggtgaagtgtgccccagagaacgctgttctgtagaaacgtgtcttagccccaatttccactcattggtaagttcttttcctttctctcttttgcaaggtttcaaataaaattgcctttctccatcagctaggctgggggtgctggcaggcattgctgtcacaatgccccatctctgcttcacttcctgttctgagtcatcagggaaggggagtctccctgacttccacaacaatccttgagtctgggactgccctggcctaagatgggccagtttcat

SEQ ID NO: 140431 - DNA, 2495 bp, Homo sapiens
acattggtaaggtgttttcccccattgaaactaatattttctattttcaagaaaaaagcagcaagcctcggcagcagtcaatcctccagaacctatgctggtggaacagcctcggccaccaaggtgtcagcttcctctggtgcaaccagcaagtcttccagtatgaatcccacagaaaccaaggccattccagtcagccaacagatggaaggaccacatcttcctaacaagaaaaaacacaaaaaacaggctgtaaaaacagaacctgagaagaagtcacagtcaaccaagctgtctgtggttcatgagaaaaaatcccaagaaggaaagccaaaagaacacacagagccaaaaagcctacccaagcaggcatcagatacaggaagtaacgatgctcacaataaaaaagcagtttccagatcagctgaacagcagccatcagagaaatcaacagaaccaaagactaaaccacaagacatgatttctgctggtggagagagtgttgctggtatcactgcaatatctggcaagccgggtgacaagaaaaaagaaaagaaatcattaaccccagctgtgccagttgaatctaaaccggataaaccatcgggaaagtcaggcatggatgctgctttggatgacttaatagatactttaggaggacctgaagaaactgaagaagaaaatacaacgtatactggaccagaagtttcagatccaatgagttccacctacatagaggaattgggtaaaagagaagtcacaattcctccaaaatatagggaactattggctaaaaaggaagggatcacagggcctcctgcagactcttcaaaacccatagggccagatgatgctatagacgccttgtcatctgacttcacctgtgggtcgcctacagctgctggaaagaaaaactgaaaaagaggaatctacagaagttttaaaagctcagtcagcagggacagtcagaagtgctgctccaccccaagagaagaaaagaaaggtggagaaggatacaatgagtgatcaagcactcgaggctctgtcggcttcactgggcacccggcaagcagaacctgagctcgacctccgctcaattaaggaagtcgatgaggcaaaagctaaagaagaaaaactagagaagtgtggtgaggatgatgaaacaatcccatctgagtacagattaaaaccagccacggataaagatggaaaaccactattgccagagcctgaagaaaaacccaagcctcggagtgaatcagaactcattgatgaactttcagaagattttgaccggtctgaatgtaaagagaaaccatctaagccaactgaaaagacagaagaatctaaggccgctgctccaggctcctgtgtcggaggctgtgtctcggacctccatgtgtagtatacagtcagcaccccctgagccggctaccttgaagggcacagtgccagatgatgctgtagaagccttggctgatagcctggggaaaaaggaagcagatccagaagatggaaaacctgtgatggataaagtcaaggagaaggccaaagaagaagaccgtgaaaagcttggtgaaaaagaagaaacaattcctcctgattatagattagaagaggtcaaggataaagatggaaagccactcctgccaaaagagtctaaggaacagcttccacccatgagtgaagacttccttctggatgctttgtctgaggacttctctggtccacaaaatgcttcatctcttaaatttgaagatgctaaacttgctgctgccatctctgaagtggtttcccaaaccccagcttcaacgacccaagctggagccccaccccgtgatacctcgcagagtgacaaagacctcgatgatgccttggataaactctctgacagtctaggacaaaggcagcctgacccagatgagaacaaaccaatgggagataaagtaaaggaaaaagctaaagctgaacatagagacaagcttggagaaagagatgacactatcccacctgaatacagacatctcctggatgataatggacaggacaaaccagtgaagccacctacaaagaaatcagaggattcaaagaaacctgcagatgaccaagaccccattgatgctctctcaggagatctggacagctgtccctccactacagaaacctcacagaacacagcaaaggataagtgcaagaaggctgcttccagctccaaagcacctaagaatggaggtaaagcgaaggattcagcaaagacaacagaggaaacttccaagccaaaagatgactaaagaaatacaagttaaggtatctggtatctgcatgtaaaatcttcagctggtggatggtgacttttgaagaacaaaaggctttggcaacagaaaacaattgttctgggtgatttctagaatggtttttgttgagtctctgaacatcctaaatattggtttgttattctttccagaaagaaaatgaatttgactggttcggaattc

SEQ ID NO: 140432 - DNA, 2337 bp, Homo sapiens
atcactgcaatatctggcaagccgggtgacaagaaaaaagaaaagaaatcattaaccccagctgtgcccagttgaatcctaaaccggataaaccatcgggaaagtcaggcatggatgcctgctttggatgacttaatagatactttaggaggacctgaagaaactgaagaagaaaatacaacgtatactggaccagaagtttcagattccaatgagttccacctaccatagaggaattgggtaaaagaggaagtcacaattcctcccaaaatatagggaactattggctaaacccatagggccagatgatgctatagacgccttgtcatctgacttcacctgtgggtcgcctacagctgctggaaagaaaactgaaaaagaggaatctacagaagttttaaaagctcagtcagcagggacagtcagaagtgctgctccaccccaagagaagaaaagaaaggtggagaaggatacaatgagtgatcaagcactcgaggctctgtcggcttcactgggcacccggcaagcagaacctgagctcgacctccgctcaattaaggaagtcgatgaggggagtctccctgacttccagcaacaatccttgagtctgggactgccctggcctaagatgggccagtttctatcttcgactttcttggagggctcaccggccacacagaggaagtgataagctttgtgacggtgaacgcagaggagcaagagaagcagttcgtatcttccaggaccaagcaaaagctaaagaagaaaaactagagaagtgtggtgaggatgatgaaacaatcccatctgagtacagattaaaaccagccacggataaagatggaaaaccactattgccagagcctgaagaaaaacccaagcctcggagtgaatcagaactcattgatgaactttcagaagattttgaccggtctgaatgtaaagagaaaccatctaagccaactgaaaagacagaagaatctaaggccgctgctccagctcctgtgtcggaggctgtgtctcggacctccatgtgtagtatacagtcagcaccccctgagccggctaccttgaagggcacagtgccagacgatgctgtagaagccttggctgatagcctggggaaaaaggaagcagatccagaagatggaaaacctgtgatggataaagtcaaggagaaggccaaagaagaagaccgtgaaaagcttggtgaaaaagaagaaacaattcctcctgattatagattagaagaggtcaaggataatgatggaaagccactcctgccaaaagagtctaaggaacagcttccacccatgagtgaagacttccttctggatgctttgtctgaggacttctctggtccacaaaatgcttcatctcttaaatttgaagatgctaaacttgctgctgccatctctgaagtggtttcccaaaccccagcttcaacgacccaagctggagccccaccccgtgatacctcgagtgacaaagacctcgatgatgccttggataaactctctgacagtctagaacaaaggcagcctgacccagatgagaacaaaccaatggaagataaagtaaaggaaaaagctaaagctgaacatagagacaagcttggagagagagatgacactatcccacctgaatacagacatctcctggatgataatggacaggacaaaccagtgaagccacctacaaagaaatcagaggattcaaagaaacctgcagatgaccaagaccccattgatgctctctcaggagatctggacagctgtccctccactacagaaacctcacagaacacagcaaaggataagtgcaagaaggctgcttccagctccaaagcacctaagaatggaggtaaagcgaaggattcagcaaagacaacagaggaaacttccaagccaaaagatgactaaagaaatacaagttaaggtatctggtatctgcatgtaaaatcttcagctggtggatggtgacttttgaagaacaaaaggctttggcaacagaaaacaattgttctgggtgatttctagaatggtttttgttgagtctctgaacatcctaaatattggtttgttattcttttccagaaagaaaatgaatttgactggttcacctgtgtactgagtattgataaactttgaatttttttaattgccttcaattgggagagaaagctttatatttgtgtgaggacttctgcatcttacagtcagcacagaacacactgagacttgaatcaagtcagcaacagagcaaaataaaggttagataagtccttgtgtagcaaatttcgagcataagaaataaaatctaattaattcttagggt

SEQ ID NO: 140433 - DNA, 384 bp, Homo sapiens
cccaacccttgactcaacggggacaactccagaaggtcattccagatccagagatccccatcgaactgaaggatcactgggttgcagacacattgcaggtcagcttcttcctctgcccagtcctgccctcactccccagtgaatcctcaattttctgtctcgttgtctgtccagataattgattctaagacatgttaggtatataaggagtgtagataaggcttcagccatgagtcaccccccagtaagccccagagtatattgaatagaaattctgcatgtgtggggagaatggacaaggacttaggaaaaagtcctcatcaaagaacagcttttttgggacaagctttacatgggtggggagggaaaatgtgaaacacatta

SEQ ID NO: 140434 - DNA, 2349 bp, Homo sapiens
aatgtagagactatgaagaaattgacccaaaatcataaagcgaaaggtgagaattgttgagggagccggagggatgaagaggaagccaaggctccaggttcacctgaaaatgcttcagacattttttttttttcctgaagtgctggctcattttccagagaatagacatatattctcaggaatctatacaaagaagtgatgctggagaattacaggaatcttctctcattgggtaaggctgtgttctttcctttccttcattaattcagtagagatttactgatcacctaatatgtaccacaaagtcagcagttcctcagtcaacatgtacttcagatcttcctgggcttatgtgcagaaaatcacttccatccagggaattctagcccagggcattggaaacagcaggggcagcagtattcccatgtaagctgttggtttgaaaatgcagaaggtcaggagagaggaggtggctccaaaccctggtctgcaaggacagaggagagagaaacctcaagggcattccccagcccactccaaagacagtcagcaagtcctagaaaaggcaacatggtggtagaaacagagcccagctcagcccaaagaccaaaccctgtgcagctagacaaaggcttgaaggaattagaaaccttgagatttggagcaatcaactgtagagagtatgaaccggaccataacctggaatcaaactttattacaaacccgaggaccctcttagggaagaagccctacatttgcagtgattgtgggcgaagctttaaagatagatcaaccctcatcagacaccatcgtatacactcgatggagaagccttatgtgtgcagtgagtgcgggcgaggttttagccagaagtccaacctcagcagacaccagagaacacattcagaagagaagccttatttgtgcagggagtgtgggcaaagctttagaagtaagtccatcctcaatagacatcagtggactcactcagaggagaagccctatgtttgcagcgagtgtgggcgaggctttagcgagaagtcatccttcatcagacaccagaggacacactccggtgagaaaccctatgtgtgcctggagtgtggacgaagcttttgtgataagtcaaccctcagaaaacaccagaggatacactcaggggagaagccttatgtttgcagggagtgtgggcgaggctttagccagaactcagatctcatcaaacaccagaggacacacttggatgagaagccttatgtttgcagggagtgtgggcgaggcttttgtgacaagtcaaccctcatcatacacgagcggacgcactctggagagaagccttatgtgtgtggtgagtgtggccgaggctttagtcggaaatcactcctccttgtccaccagaggacacactcaggggagaagcattatgtctgcagggagtgtaggcgaggttttagccagaagtcaaatctcatcagacaccagaggacgcactcaaatgagaagccttatatttgcagggaatgtgggcgaggcttttgtgacaagtcaaccctcattgtacatgagaggacacactcaggagagaagccttacgtgtgcagtgagtgtggccgaggctttagccggaaatcactcctccttgtccaccagaggacacactcaggggagaagccccagatgaccttttcaggggtaacaccccagctgcttgagagaacagtgttgctgctggcagagatgcattccagagatgcactccgctctggaactcactctcagccacagggagctgcatgcaccacaggggcaatgcacctttgcaggggtaccttctggccccaacccttgactcaacggggacaactccagaaggtcattccagatccagagatccccatcgaactgaaggatcactgggttgcagacacattgcaggtcagcttcttcctctgcccagtcctgccctcactccccagtgaatcctcaattttctgtctcgttgtctgtagcatcaattacgcagtggctcctcagtcaggtctgatgagggaaaaggatgtgcatgtctgggagtgtgggcccccaccctttgccagaactgcccctataacaccaacttctgatcagaattggaggccactgagggaaaagtatatgcaggcatataatctctagggttttgaagagggaaggggtaggccctccccattccggacaatccccagaagaaagagagatgcaaattctccactccaggactatggctttggtgcctaagaaggaagagttcagtttttgtgtagagcttatttccaacatgagatgggtgttcaaatgcctgcagcatcc

SEQ ID NO: 140435 - DNA, 1173 bp, Homo sapiens
atgtccctacaaatcaccaaagatcttgttaagatgcagattccaattcaactggattggggcggtgcctcagagtctgcatttctaaccaactccagcaagcttgatgctgctgccagtccatggaccaccctgcagacagcaaaggcacaggagatgatgtggaagaaatttggacacacacagacaccggtgcacgcacgcacagaggaaagagcgtgtgaggacacggcagagagatgtcatccacaagcctctgagggaaggaagccctcgggagaatcccatcctgcccgcaccttgaccttggaatgcaccctcagaaacaaagatgttaacactcaggaagttggaggagtggtatttgagaatgctgtatcatttttacaactttgctgcgaaactctaaaactactgcaaaataaaaagttgaaacactttctgtttgacagccatgaagatcctctgcatgtggttttccaggtggcacagccggtgggtcggcatgcagggcccctcctgctgacctcagaggactttgtggatggccactctgtccagcactggcaggtcttgcgtccctgcggcatgtacacccgctccctgcggtcgaatctcagcagcaggcaggctgcgctgctctcagctccttcctcatgctcctgcgccagcggcttgctgcagctgcccctctgtacacatctcctttcagcccctctgacagttgagaacttccctctggactgtgcagatgaaaagccaggtaacacaaacacaagtgggcagccattcttctacttcccaggccagagctctgcagggccaccagcaagtgcagaagccagggtcaagaatcaggacaggaggagtgaagcctcaactcgagggacctggcagatggctgaaaatcaggttagagggacacagctggacatgcagacaataacactcaggaaagagggaggagaaaaagggtggaaacttcctggaagacatggagttctccaagggtactttggtctagcccatagacagagaggagttatgaagcagattggtcctcattccaacagggaccctacaaatgctcccacaaccagctcaaggcaacagcacagtcacttttttaaagtacagagaataaacagcgagactcgagataaaaactactag

SEQ ID NO: 140436 - DNA, 4514 bp, Homo sapiens
cttttatgaatgtcaagctattaattcaagacttggaggatattgagcagagggtgcctgtgatggatgcccaatacaagataattacaaagacagcacacctcattaccaaagaaagcccccaagaagaaggaaaagaaatgtttgcgaccatgtcaaagctcaaagagcagctaaccaaggtcaaagaatgttactccccactcctttatgagtctcagcagctgttgattccgttggaggaattagaaaagcagatgacgtccttttatgacttacttgggaaaatcattgaaattattaatgctattgagcgtgaggcacaatcgagtgccctttttaaacaaaaacatcaggaactgttagcttgtcaagaaaactgtaagaaaaccttgacacttattgagaaaggcagtcaaagtgttcaaaagtttgtgaccttgagcaacgtgttaaagcattttgatcagacgaggctacaaagacagattgcagatattcatgttgcttttcagagtatggtaaagaaaactggagattggaagaagcatgtggaaaccaacagtcgcttgatgaagaagtttgaggagtctcgagcagagttggagaaggtactgcggattgctcaggagggcctggaggaaaagggggatccagaggagctcctgcggagacacactgagtttttcagtcagctggatcagagggtgctcaatgctttcctgaaagcttgtgatgaactcaccgacatccttccagagcaggagcagcaggggctgcaggaagctgttcgaaagctccacaaacaatggaaggatcttcaaggagaagccccttatcatttgcttcatctgaagattgatgtggagaagaataggttcttagcctctgtagaagaatgcagaactgagctggatcgagagaccaagctgatgccccaggaaggcagtgaaaagataattaaagagcacagggttttcttcagtgacaaaggtcctcatcatctctgtgagaaaaggttacagctcatcgaggaactctgtgtgaaactcccagtgcgggacccagtaagggacacacctggaacctgtcacgtgactctcaaagagctcagagctgccattgacagcacctacaggaagctcatggaagacccagacaagtggaaggactacactagcagattctctgagttctcatcttggatatctacaaatgagacacaattaaaggggatcaagggtgaggccatcgatactgccaaccacggagaggttaaacgtgccgttgaagagatcagaaatggtgttaccaaaaggggtgagaccctcagctggctgaaatccaggctgaaagttttgacagaagtttcttctgagaatgaagcccaaaagcagggagatgagctggcaaaattatccagctctttcaaggctcttgtgacgctgctgtcagaggttgaaaagatgctaagcaattttggggactgtgtccagtacaaagaaatagtcaaaaattctctcgaagaattaatttctggctctaaagaagtccaggaacaagctgagaagatcttggatactgaaaatctgtttgaagcacagcagttacttcttcatcaccagcaaaagacaaagcggatctcagcaaagaagagagatgtgcagcagcagatcgcgcaggcgcagcagggagaaggggggctgcctgaccgaggccacgaggagctgcggaagctggagagcacactggatggcctggagcgcagccgggagaggcaggaacgccgcatccaggtcacattaagaaaatgggagcgatttgaaacaaacaaagaaacagtagtaagatacctttttcaaacaggttccagtcatgaacgcttcttgagttttagcagtttggaaagtttatcttcagaactggaacaaacaaaggagttttctaaacggacagaaagtattgcagtccaggctgagaaccttgtaaaggaagcttcagagataccgcttgggccccaaaataagcagctgcttcaacagcaggccaagtcaatcaaagaacaagtcaaaaaattagaagacacgcttgaagaagagtatgtgattgacaagtcctaaactttcttctctgagataaagtttcatacaatctttcctgtaccttgtattcaaaacactcttttaaaatctcaaagtgtctgtgtatttcagcatgttttgaggaaacaactcacagttcaaaagaaagtatcgctaatacagaaaccaatatctataacagagcccaaaaaatataaaggatgtgggttttgcatcttaaactgatcatgttcatgagaaagccatatctattctattctgtggcctttgtacattgtagagggaatcttgaaaaagaactaatatttaaaataatttttttactatattattctgctgtcaccatttagagcgaaaaggagatattttgttagtgtagattccaggcctaaatacacatcacatagaccatatatctccaacctgaagaagctcctggagcttgtttacagtgcctcggtattcaagttatcctgactaatatgctctttccagaaattaactttaaaatattttatttttaaacttttaatgtttgtttatctgaaaaaaaaaaactgcttggcctattgatatcctgttatatacccaaaatatacaaaaaagtttggaggggaaaaacatatgaggatacagccaatattattcaaaacaatatggctaaacatttctatttttaacataatttagtggcaaatcaatgatacataatagcatattattattaagggacaggccatcatttctaaggtgggttttaaaatgtaaaatgtgtttttaatactattaacagcttaaaattaacattttacatttgcctaaactttaaaatttgatacatattttatttaaaacaaattatgacttgaaattttgaggactttatattacattaaatattctctatcaagttatggaaatagtaaaacagagtttattagaaaggaatttacttctattaagaatagccattttaacctttatttaatttaaaaagttgcaatataacacagcttgcattacctgtactgctgacagcattaggcacattcagggtataaatttgagactgcaatattatttaatttgacagtcaatgatgccactctatttttcttgatgtcttcaagtgccttttggtaaacagggacattctttcactttttttttttttaacccaaggacttactagttcaattatatactgttagtttcttagtctttttctaaactgaaagccatagtcacctggttatacatgcatagctaatacaaattagaaatctatagttgaaattctgttcactagatttgttacaaataaaacctataagttgtctaaaagtagttagggtgctcatgtacaataatttataaatgtcttttggaatcaggaccataagacatttatgaaaatggctgaagtcacaaagattatacatcgcaggattagctctaataatagaaacagttcttgcccggcagcatgggattgagatcacgagctctgtcttgattgataagatgcagtttataaaggtatttctatagaaagcatcactgcagtgtctctcctttaagtgtaagaagaacatttctttggaaataggactattgaaaagctgtgtacactgaaatcttttctggcatagtttataaaaataagtcctggcaacaactggtcacatgcagagtttaattagattctacctggattcaaacccctttggacccagcaatgttttgttcaaagtgcagtttcactcaaagtgtagatactgcctcattaaatgttcattctcagagaagataggaaaacctgataaactactcagaacaactgtgcaattttttttttagcgtgaatagtttcaactttgaaatggtcacaaatgtcttcattatctcttcacctggtgatttcaaggaaaatgtgttgttgttctctattaaaatactgagttttatttacttaatttggttaattttagtattaaaaccatggaaatggtgaaaaccaagtgggatcattttggcagtaattttgagactctgtccgtctggataactgagaaagaaaaagaactcaatgccttggaaacttcgtcatctgccatggacatgcaaatcagccaaattaaggtgacctgctcacacattatatttataatccatgtctagcttttaagaactactttcttacatttcatcaaatgctgttcggtcccaggacaagactttcattgcaatgtgactattaaaattaaattcatacattttatcaagctaagaggtctggattaatactgggcaacatttatagttggaattatgtattcacattgtctgacttgtgcattcaaagttaatattgtgtgaaatatcattaaaatatttttatggttacattaa

SEQ ID NO: 140437 - DNA, 2256 bp, Homo sapiens
ggaatcgtcgaaagtttagtgtaagtattggattttatactgtgatggatgcccaatacaagataattacaaagacagcacacctcattaccaaagaaagcccccaagaagaaggaaaagaaatgtttgcgaccatgtcaaagctcaaagagcagctaaccaaggtgcgaaaataatttaatgcactcctttatgagtctcagcagctgttgattccgttggaggaattagaaaagcagatgacgtccttttatgactcacttgggaaaatcaatgaaattatcacagttcttgagcgtgaggcacaatcgagtgccctttttaaacaaaaacatcaggtgagaacaatccttttcaaatggtgtaattcaagccaaaaaatgaccctctgccttgtgctgggctcaatgatttccatgctgtctactgccaaaatcacaattgcaggctacaagtcagaggtggaggtgtctgtaagtcaccattgcatctaaaactgtaagaaaaccttgacacttattgagaaaggcagtcaaagtgttcaaaagtttgtgaccttgagcaacgtgttaaagcattttgatcagacgaggctacaaagacagattgcagatattcatgttgcttttcaggtaatttgctctccctgctgagattggaagaagcatgtggaaaccaacagtcgcttgatgaagaagtttgaggagtctcgagcagagttggagaaggtactgcggattgctcaggagggcctggaggaaaagggggatccagaggagctcctgcggagacacactgtgagtccaccctttagggatcagagggtgctcaatgctttcctgaaagcttgtgatgaactcaccgacatccttccagagcaggagcagcaggggctgcaggaagctgttcgaaagctccacaaacaatggaaggtgagtcaggacaggacggcttatcatttgcttcatctgaagattgatgtggagaagaataggttcttagcctctgtagaagaatgcagaactgagctggatcgagagaccaagctgatgccccaggaaggcagtgaaaagataattaaagagcacagggtacgtctcccacaccacagtcctcatcatctctgtgagaaaaggttacagctcatcgaggaactctgtgtgaaactcccagtgcgggacccagtaagggacacacctggaacctgtcacgtgactctcaaagagctcagagctgccattgacagcacctacaggaagctcatggaagacccagacaagtggaaggactacactagcaggtagcctcagaatggcctctggatatctacaaatgagacacaattaaaggggatcaagggtgaggccatcgatactgccaaccacggagaggttaaacgtgccgttgaagtaagttcagggtcattatccaaaaggggtgagaccctcagctggctgaaatccaggctgaaagttttgacagaagtttcttctgagaatgaagcccaaaagcagggagatgagctggcaaaattatccagctctttcaaggctcttgtgacgctgctgtcagaggtacagcatttactcacacattttggggactgtgtccagtacaaagaaatagtcaaaaattctctcgaagaattaatttctggctctaaagaagtccaggaacaagctgagaagatcttggatactgaaaatctgtttgaagcacagcagttacttcttcatcaccaggtaaaaatgcctctttcttcagcaaagaagagagatgtgcagcagcagatcgcgcaggcgcagcagggagaaggggggctgcctgaccgaggccacgaggagctgcggaagctggagagcacactggatggcctggagcgcagccgggagaggcaggaacgccgcatccaggtaggagccggaagttaggagcgatttgaaacaaacaaagaaacagtagtaagatacctttttcaaacaggttccagtcatgaacgcttcttgagttttagcagtttggaaagtttatcttcagaactggaacaaacaaaggtatattatggctccttggaaagtattgcagtccaggctgagaaccttgtaaaggaagcttcagagataccgcttgggccccaaaataagcagctgcttcaacagcaggccaagtcaatcaaagaacaagtcaaaaaattagaagacacgcttgaagaagagtatgtgattgacaagtcctaaactttcttctctgagataa

SEQ ID NO: 140438 - DNA, 586 bp, Homo sapiens
  misc_feature (1)...(586): n = a,t,c or g
ggcacttctctgtttgatgaagagggagccaagattgtcaaagacctaatgtccaaagctgagaagaatggtgtgaagattaccttgcctgttgactttgtcactgctgacaantttgatgagaatgccaagactggccaagccactgtggnttctggcatacctgctggctggatgggcttggactgtggtctgaaagcagcaagaagtatgctgaggctgtcactcgggctaagcagattgtgtggaatggtcctgtgggggtatttgaatgggaagcttttgcccggggaaccaaagctctcatggatgaggtggtgaaagccacttctaggggctgcatcaccatcataggtaagcggtcctatacaaagctaatacccatataagctggcagaattctgatcagaggaaggtggaatggagaacttcttctatgtctctttattctgggtaaatgttaagaggtaaacaggtaggtaatttacagaggagcctcttggtaagatagagttgggggtttatcagctaccttttgggttggggagcacactgccttacagttttggtgccaatcccttttttt

SEQ ID NO: 140439 - DNA, 2253 bp, Homo sapiens
ctgcagattcgaggcccatatccagtgcccttgacaggcatctcttgtcagctgtggtgtgcagtgtcctgtgcaattcaacagatggtcttcctttgatttccataggttttgcacccaccctgggcctctacaatcagcaggtggcaaagcaagtgaggcctgtattctttccttcagggcagcaaggttcctcaggccccagttgggtctggaagttgctctactacccccctgtggctgttctggtacctaagcccccttacttttctttctgcttttctcaagcagaaggaatttttcctggtaaccaaaggaatgtatattttacagtcatggaggcaaagaagtccaagattgacaagctacatctggtgagggccttcttgcaggcaggaactccctgaagagttccaaggtggcacagggcagcatgtgaaatgagacagcatcggctgggtgtggtggctcatgcctgtaatcccagcactttgggaggctgaagagagagggttgcttgcagcagggagactgatttgagtgataatgaaactctggtctcccgcacagcgctcagcgtgaattattctttcgccattgcaattcccgtcttcataaatcagctctgtctaggcagcggacaaggtgaacccattgggcggttacactttcgttttcaatacatctctgcttttattgcttcattcttcgaccctgggtctcgcacattcttcacgtccgttcgcagcgtcacccggatcttcgccgctacccttgtgggccccccggcgacgcttcctgctccgcccctaagtcgggaaggttccttgcggttcgcggcgtgccggacgtgacaaacggaagccgcacgtctcactagtaccctaatagcggctgctcagcagggcgcgccgagagcagcggccgggaaggggcggtgcgggaggcggggtgtggggcggtagtgtgggccctgttcctgcccgcgcggtgttccgcatcgggtcgttatgaggtaattctgcacgtttgcccgcgtgctctctgtgctctgtcgcaaacctctttggccggagccgtaatccttgggctgggtttaagatgtgtgtaggtacacaggatgaaatgttatgagccacctaggccggcctgatggtgtgcccatgcctgacaagtactccttagagccagttgctgtagaactcaaatctctgctgggcaagtaagtgccaggctctggtgctggtagactttgtggcgggggaagttgtcaagcacgttgttacgctgggtctgtcatcctgctggagaacctccgctttcatgtggaggaagaagggaagggaaaagatgcttctgggaacaaggtaggacctgtgattttgacattattgggggtgagggcctgagtctgtaagagactgtggttgaatgtcaatgatgcttttggcactgctcacagagcccacaggtaccaagaaccttgtagactaccacactgagaacagtattcctatttacttgagtagcccaagtactttgcaaaggccttggagagcccagagcgacccttcctggccatcctgggcgggtatgaagaactctttaagatcatgctttaagtattgtttgcctggtagtaggccataacttggattggtggtggaatggcttttaccttccttaaggtgctcaacaacatggaggtaggaaacaaatgccaagtggatgtgaaatagctctccatgataatagcaggttgtataaatgagaagaatggtgtgaagattaccttgcctgttgactttgtcactgctgacaagtttgatgagaatgccaagactggccaagccactgtggcttctggcatacctgctggctggatggtgagtcacttgagtgggttggtagtgtgagtgaacagaaactctgtggtgtcatttattcattttgtgtggaatggtcctgtgggggtatttgaatgggaagcttttgcccggggaaccaaagctctcatggatgaggtggtgaaagccacttctaggggctgcatcaccatcataggtaagcggtcctatacaaagctaatacccatataagctggcagaattctgatcagaggaaggtgcactgggggtggtgccagtttggagctcctggaaggtgagggtcttctgttttttggcttgtttgggataagggtggactgtgcagtgagaggtgggtaaagtctgaaaatgtctttattcgacc

SEQ ID NO: 140440 - DNA, 482 bp, Homo sapiens
gacacgccaagcttggcacgagggcccgcgcggtgttccgcattctgcaagcctccggagcgcacgtcggcagtcggctccctcgttgaccgaatcaccgacctctgtccccagctgtatttccaaaatggcgctttctaacaagctgacgctggacaagctggaccgttaaagggaagcgggtcgttatgagagtcgacttcaatgttcctatgaagaacaaccagataacaaacaaccagaggattaaggctgctgtcccaagcattcaaattctgcttgggacaatggagccaagtcggtagtccttatgaggccacctaggcccggcctgatgggtgtgcccatgccttgacaagttactcctttagagccagttgcctggtagaactcaaatctctgctggggcaagggatgttctgttcttgaagggactgtgtaagcccagaagtggagaaagcctgtgccaacccacctggtgg

SEQ ID NO: 140441 - DNA, 412 bp, Homo sapiens
agcaggcgcagcccagcctcgaaatgcagaacgacgccggcgagttcgtggacctgtacgtgccgcggaaatgctccgctagcaatcgcatcatcggtgccaaggaccacgcatccatccagatgaacgtggccgaggttgacaaggtcacaggcaggtttaatggccagtttaaaacttatgctatctgcggggccattcgtaggatggtgagtgtttccctgggctttgctcatcacttcgggacatcgtggactttaccgtgcgcattggagtgtgtgatggtgcctgagcagatctgctggcagagtagtttgagccagctggactgggctggccgcctgccgcttcttgagggtggaagaggggtgctctgagaagacactcaggcagcagactctgcctctcactg

SEQ ID NO: 140442 - DNA, 667 bp, Homo sapiens
ctggtttatattattttccacaactgcctttacacttgctctgggtatggccgttttaagacaactaaagcctgaatgctttccatggggtccactcagacatgcttgctcattcaaactctgcgagtcctgaacgcttacccctctgctggcccaaatcctcaccagccgtctcaaatagcttcagccagctttgcacccttggaattctccaggctagagaaaggcacccagtctcatggagtgatacatcaaaatccgctctcggtagacgtcttcccttcgagatctgctttgagggctgccctaacttggcataagaggacaaaccctcggctttctctcgcgtgcgcggtgtggtggcagcaggcggagcctcgaaatgcagaacaacgccggcgagttcgtggacctgtaagttccgcggaaatgctccgctagcaaccgcatcatcggtgccaaggaccacgcatccatccagatgaacgtggccgaggctgacaaggtcacgggcaggtttaatggccagtttaaaacttatgctatctcctacttcttgaatcttttccttcaccactgactcattcaagctgtcttttcctctttcgtggatcatggcaatagcttcccagcctctattcttgtttctcttaaaaatatcctccat

SEQ ID NO: 140443 - DNA, 495 bp, Homo sapiens
cggacgcgtgggatctctgccgggtgactagctgcttcctttctctctcgcgcgcggtgtggtggcagcaggcgcagcccagcctcgaaatgcagaacgacgccggcgagttcgtggacctgtacgtgccgcggaaatgctccgctagcaatcgcatcatcggtgccaaggaccacgcatccatccagatgaacgtggccgaggttgacaaggtcacaggcaggtttaatggccagtttaaaacttatgctatctgcggggccattccgtaggatgggtgagtcacatgattcctttctccgaatggcaaaggccgatggcatcgtctcaaagtaaggttgggggctcacatttgggcagagtgagtggacttaggactgcttccagaggcgtggtctttaacgttgtccttttcccctggttctaggaacttttggacttggagagaatcacagattgtggaatatttgtcataaataaataatgaaaaaccta

SEQ ID NO: 140444 - DNA, 529 bp, Homo sapiens
  misc_feature (1)...(529): n = a,t,c or g
cgccgatatctctgccgggtgactagctgcttcctttctctctcgcgcgcggtgtggtggcagcaggcgcacgcaagccctcgaaatgcagaacgacgccggcgcagttcgtcggacctgtaccgtgccgcggaaaaatgtccgctagcaatcgcatcatcggtgccaaggaccacgcatccatccagatgaaccgtggccgaggttgacaaggtcacaggcaggtttaatggccagtttaaaacttatgctatctgcgggggccattccgtaggatgggtgagtcagatgattccattctcccgattggccaaggccgatggcatcgtcttcaaagaactttttgactggagaggaatcacaggatgtgggaatattttgtcataaataaataaatgaaaacctaaaaaaaagggggggcccgggtaccccaatttcgcccttttagttgagtccgtatttacaatttcactgggccgtcgtttttacaaccgtcgttgantggggaaaacccnggggggtttacccc

SEQ ID NO: 140445 - DNA, 354 bp, Homo sapiens
ggcacgagcttgatggatgatttgtggagtcaccgacctgctgctgtaaaaaccataaacctcaataaagtgatgtggaaatgtagtgtacagctgcagacttttaaaagtaagaagaggaaggaacacatgttcgtcttcctcccccagaagaaaaacaacattggattctaaaagatggcctcctcctttttgctcccactgaatgccacagctgttaatggacagtcttagaggagatgatggggtcatcagtctgtttctggagcattccgaggctttagatagggagcagcatgattctagcagtgctgcgtgttcttgggcagcgtgtccttctagtaggagtccaaa

SEQ ID NO: 140446 - DNA, 1473 bp, Homo sapiens
gggcttttctgactctgcaaaggcattcactatggctacccccaatggcgagtcttcaagaagacgaaatttcattggcctggaaaaaccacttcctcctctgaacacagctctcatctggagccccgacgtgtcatattcctccacctttcctgtggacgtgcacatgcatgcacacagtgtgcacacagggtgaggcaccgtgaagctgaagccgcacttctgggctttcagccttggcattgtggtttccatcgctgggcctgctatgaagccacgctgcttttcagaaatacttttaaaagtctgcagctgtacactacatttccacatcactttattgaggtttatggtttttacagcagcaggtcggtgactccacaaatcatccatcaaggagtctggagacacatggtgtcttgtcaggaggatggagatgatgacagctgccctgctgcgggcgccaagagcccgcctcagccacatgtgggcttttagcctctgatcccccagtttcctctgactcttgtctgagcgcattgggcttctttcagcatcttccaacttgtgcatgctggggtggcctggcttgctgtctcttgagtaccgtgggaactgaggcgggctggccttgtctccccagcgcctgctcacagaaggtgccccatgatgtctgtcgtgcagatgaatgtgtccacgcgtgctgggctagtacagaagatcgtgtaggcaggggtcttcgtgggcctagggccctgaggaggaccgatagcctttgggactggttgggtttttgagagtctgttccggagagggcccctgagccaggctgtctgctgtggatggctctgccatggcgctatctccttcatccttatctatctcttcattgttagtggagggtgttgggcatctgttatttgctttattcgagtctaggccacgagctgccccccactggaaaggctgaacctctctggctacattgttgtagaaaagctcccaggcggggctctgctcaggctctctgcatttctgggagacatccttgctgtccctgctccgcccgtgacagccaccatgactgagcccacactggcctcctggactcccaccttccgcattgatatacgcctttcttgggcgctcttcaaggaataaacggagactgatgaagacgatgaaggtggaagcctgtgaggacctgtccgctcctaaatatctgaggatccagctccccacgggatccccaagaagaagatctgaagctcctgaagtttgcattttccaggggtcctcctctctctctagtgcacccaccacctttgctgagctatccctctgccaggagatagccccagactcctcctcgcccccctccacggcacccaagtctgcacccgctgcatcctccaagcgcccaaccttaattctagctttgaattgttgagtggaaatggccaagaaaaacat

SEQ ID NO: 140447 - DNA, 335 bp, Homo sapiens
  misc_feature (1)...(335): n = a,t,c or g
tacacagttatcaaaaatgcagacacttcacttngcatctccagcaccttcagctttctgggcctggtcttttttggcaactccattttctgtagggttattcccctccttgccagcatcagcttttccctttttcccttttgggtaccttctcagggncctttttaggctntgctctggctttngaggagcaggtttagcagacaactttgtggatcttctctgtggttcatccttcaccttgggctttcatctccntcagcatccccctcagccttttctcttgtggcatgctnggcaacaacagngacgggactaggttgctgggcacagtg

SEQ ID NO: 140448 - DNA, 1090 bp, Homo sapiens
atgatacatgaacaaaacgagaacatcaagaaaaacacaaaaactataaaaaagaaccaaacagaaatcctggagctgaaaaatacagtaacggaatggaaaaacttattagaggtattcaacaacagttttaggcagaatgaagaatcagtgaacttgcagacaagttatctgaaatcactgagcagaggagaaaaaagaaagaagaaatgtgaagagatgataagggatttaggacaatatcaaccaggtccatatatgcatgatgggtattccagaagggaaagtggcccgaatgtgccacgacgcgcccaagtcgacggcggcgacgcgcgcaagggtacccataggaggaaaagggtcttggaaagggggttatggctaaaaagggaagataaaaaggcccaagggtataagggacggacccacaagaggaagatctgcaaaggttgtccgctgaaacctggcttgtcctatagccagagcccaggccttaaaaggcccctgctaagaagggagagaaggtaccctaagggagaaagggaaaagctgatgctggcaaggaggggaataaccctgcagaaaatggagatgtcaaaacagatcaggcacagaaagctgaaggtgctggagatgccaagtgaagttgtgtgcatttttgataactgtgtacttctggtactcatatccattcttgggaagtgcagctcctattatgactaatcctcctgtagaagttcggaaaaacatggaagtttttcttccccagtcttactgtgcatttgattttgcaactatgcctcatcagctgcaagacaccttcttaaggaggcatgaactaggtgaaaagcttcaacggcaaacgccacctttcggaaaaggattccaggaaccaatgttatgtacaatagctacccaacatgagatacctaagattaacttaagtaacaaggataccgaagcaggagaaactcttaaaatggaacttctcaggttctctatgaagttctcatgcaagcatgcgcttaacagcaacagctgtgcaagaactcctaccagctgcataaggctagctagttttggagaatga

SEQ ID NO: 140449 - DNA, 663 bp, Homo sapiens
atgttgaaagtgaccttgggctttcataaaccaggagattataaaaatggatcttcgttctacaagagaagttctgaaaaactccttgcacatctcaggctattcttcatttctgcacttcatgaaggaacagagtgttccctgggaactctgggtagccttgtggagaatgagcttccctgggctgcttgtccttatgctacaggtcagaaatacaaagcattgcctgaattgccgatgtcacttgatgaaacccatttgtcctgtaggctcagacctgagatttctgaaaaccaagctcagagtatcatcctgcaagtggctaaactacaacacaaattgaatttcaaaccttgccaactgtcttctgttgaagtgactgcattgattgggaagaaatgggatcctggaaatgggaatggaacatatggagagattccgatgaagctggggacactgaacttctgccttcttctgagcttcatttaccaatactgtcttctaggttctggggatacaggagtaaatgcactaaatcctactcctccaatacacagaaaattaaagaatgccttacaagtcaataagaaaaggacagacaaccctatagaacaatggataagtgtcttgaacagacctttcacaaaagataatgtccggtaa

SEQ ID NO: 140450 - DNA, 1035 bp, Homo sapiens
  misc_feature (1)...(1035): n = a,t,c or g
ctaggaccccaggatttccaggtcaaacgaccccaaacctgcttttggagcctgtgcaacaccacttccagggtccttcctccagagggtggagcccatgactagagtgctccccactaggcctgagaagtggtctgcacgagagggagggaggcccacaccanttctggttaataacctgatgctgccagtgttactggctcctaagcgtattaagtggttaatggaagtgccttcaggaacctgcttctctccaggatctaagtcatgtggctgaggtacgacacactcagtgaaacccatatgcaccagctcttgggcctcaacctcctcttcctgctgtcccaggattaggtggctgagttccacatggagttggagtggctgcctgccacggacacacagaccaatgcctacatcaagcgccctgtgtccctggagccatacctgatggagggcggctacaacaaggtgttcctggccaagggtaacatccctgccaagagctacaccttcatccacatcctgcttgacactatcagggatgagatggctgggtgcattgagaaggcctatgagaaaatccttttcaccaaggccacctggatcctcttcctcaacacacccaaacagatgatggacaacaccaagaagtgagggtgggtcctgggccccaacaactactacagttttgccagccagcagcagaagctggaagacaccaccattccaagttgagtatgcctggcagcccaccaggcacctttttttttttactgactgaccatcaagtgacatcggcaattcaggcaatgctttgtatttctgacctgtagcataaggacaagcagcccagggaagctcattctccacaaggctacccagagttcccagggaacactctgttccttcatgaagtgcagaaatgaagaatagcctgagatgtgcaaggagtttttcagaacttctcttgtagaacgaagatccatttttataatctcctggtttatgaaagcccaaggtcactttcaacat

SEQ ID NO: 140451 - DNA, 487 bp, Homo sapiens
ctcagtgctttaaagatgttgattcaccaaatcctcacagttgacccagagaggtgtgtaattagggtcccagtctcaacacagagaaactgaggcacagagaggtgaagttacttgtcaagggtcgttgggcagagtacgattggtgagaaaagagagcataggacacgtgggcaagtgctggccccatagggtggggatggagcctttgtgatcactctactcgtctctaatccctcctttcctgcagcgagggtgggtcctgggccccaacaactactacagttttgccagccagcagcagaagccggaagacaccaccattccctccacagaactggccaaacaggtcatcgagtatgcccggcagctggagatgatcgtctgagccccccgggcactgggtggggcagggcacgagttatttaaaacagttacactgcagggtttcgcccaataaaggtggactgacattccctcaaaaaaa

SEQ ID NO: 140452 - DNA, 956 bp, Homo sapiens
cgcagctccccgagtcagcctatatgcaccagctcttgggcctcaacctcctcttcctgctgtcccagaaccgggtggctgagttccacacggagttggagcggctgcctgccaaggacatacagaccaatgtctacatcaagcacccagtgtccctggagcaatacctgatggagggcagctacaacaaagtgttcctggccaagggtaacatccccgccgagagctacaccttcttcattgacatcctgctcgacactatcagggatgagatcgctgggtgcattgagaaggcctacgagaaaatccttttcactgaggccacccggatcctcttcttcaacacacccaaaaagatgacagactacgccaagaagcgagggtgggtcctgggccccaacaactactacagttttgccagccagcagcagaagccggaagacaccaccattccctccacagaactggccaaacaggtcatcgagtatgcccggcagcctggagatgatcgtctgagccccccgggacctgggtggggcagggcacgagttatttaaaacagttacactgcagggtttcgcccaataaaggtggactgacattccctcttccaaggcccttgtctccccagttgggacggcagagagacaaagttcttatatctgaagaacttggaggttttggggcattcaggagttggagatagcctccaactgggtcagcctctgtctggtgggcattgctcagggtctcaaacatggacgcccactgtggggccccagcagcactgtggcctgcaggagggcatggccccaggtgtagggggactgttctagccagctgtggacacataggaatgctggaccagggtaccagattttttcaacaaagggggtgaagtgtcctactaaaaagaataaatgttggcagtgaattaaacaatttttcaaatgaaa

SEQ ID NO: 140453 - DNA, 4810 bp, Homo sapiens
tgcttataaaaatggttattcagtatacattctgcaatgcaaaggtgacaaactaaaatataaaaaggctgttatggcttaacatttttgttgcagaataaatatgcagcattgaaaaatggaaaggcgtggcttcatctctgaccagcagagttaaaaagaaaaatctctccattttccttcatcatcatgggatacactgttcaggcaatccaaattaataaagacttgcactttcatatgaacacaagatcaagtgtaccagttaggttttcacattcacagtatataagaagatacacatggaaggagaagtaaagggttaacttaacaaggatttattcacaggaatacatgtaagtagagaaaaatcacagaaaagctaaacaaatgaaatcgaagaggatccaaaccaactttcactctgtaggcttttaaccttgcaccctggtgtgcatatatctaggggcacagaggggccaccaacatgcgcccaaaaataccagtgtaggaaccctgccattacatcccatttaacttaaacatatctttaagatccatgctttgaacaaaaaaaggggaagcttagaacggcagtactgttgagtgggaataaacattgaaatatagcaatcatttttcaaccttctacaattgtctttatgtgccaactaacattttattgcagccttttacaagatcttttaccacgtaatttaaattttagaagttttgataaaatccacctagtagtatataaccatgccagaaagcacatcacactggacagcacagaggcaaaggattttgcacaggtatatcagctttcccacattgtgcaggttacacacaatacaatatcaatccttattcctaacagatcctaaaaaagatatttcaaggcctacctgtaaactaccggtactttatatatcctatgtccttaataaaaataaaatcccacaaatccttaaaaaggaactttaaatgcagggctatattgaattggtaaactgcaacacaaactggcgcaacataggtaaatgaataccaatctcactctatgtgcatgcaagcatgctagctttcccactaatttaaattactttcaaccactatgagccagaatgcatgcctgaaccttaaactgcactttaaaaagtaacatcttggcctagaaattaaatctaatgaagtataatcatcaaattatatccgctacattaatgttcaatgcaaaattaagatgtcatctttagtttgatatgcccaaccccatttattcctccctccctgcccaccccaaaaaaggtaaaagaagtgacctcatttgcaatttcacaagggtgcttcaattgtttaatgtttgttttgttttaatttccaacttttttggggtaccttaaattgtaacttccaagaacctgcttctactacgggaaggcaagctgacttttaactatattagttttctttgtgtagttcttcatcaacatgcaaaacaaggccccatcatgtgggaaaacttacataaaaaaactttaaattaaaaaaaaaaaaaaagcttctttactatttgtaactcccattcttaggtttcctttattgtgcgctatagaattgttcctctttcttgtccctaggcatcatttatatggttcttgttttggtacaattccccataatattccacaatgtactgttttgtgagtagactgaatagattttttttttttttgcttcttcacatccactgcggagttgtaactggagacatatttccacccacaaaggctccagatgttaaaacgtttccccacaatcgacttaatacaggcgacggcaacacatccctcccgccccttccagtagggttgggattgtactgtattccctactggcttacccttcccccctgtaaagggtaacaattttccctggggtgcaagaggctcccttatagtctccaagactgaagggacccctaattttggggactgcagcttaagtgtattaggattaaacaccataaaaaggctggcaaggacgctcttttaaggggaaggagggaaactgggtcaggaggaaacgccttccaatttttcattcggccaacttggatttttttaaatccatggaggatcttacagaacatgtctctgtagatcatcttttggggttaattcactgatgcaacgggcatcacaaaaaaatataaaatcttggattacgcccactgggattcacaactgatcatggtacaaattccacggaatgctgaatccttttcctcattgtctcttatgtttctcagagaggtgcaaccaggggtcttataaactgctgtagcatgggggccacctctttgagaacaaacggtaccaggaggacaatttgttatggcggtattccctaacaacgtctttggtgtgttgggtctgttaatgatttctacaagctggtgcaacaccataggaatataaggctgcatctctatacccatttggatggagatttctccaattgcccatgtggcattgttgcagactgaaatgaattctggatttaagtcggtttccaatattggcatgaaatcagctatacaaggcttaacatgctgaaagcaagcttttgtgaggtcacctaacagggcaaaagaactctgtcgaacttctggcattttatcctgcatgcactgatacattagtgtcaggatgttacttcgggctaccagctgttcaatgttgcctccaagtccttcagccaggccactcagtaaatcaagagccactatcataaaatctttatctggagcttcatattgatctggttgagcattgtttagcatggcttgtgcaagagtcttctgtactaggtttacacaacgctgatacacaggttcacagtacggaaggaatccagactgcagtgctgtggcaactgaagataggcactcaagtaaagggaagagatctttatcttcatcctttaacatgttccatttctggatcagtggaggcattagcatctgaatatattctggtttgtttaaatgatgtcctactgaatctgctaatgttcctatggcatcgtaaagaatgagcaggttcttatgctggtatttactaaatgcaaagaccagggtatcaagtatataagcaaggtaaggaacaagttctgtacaagcctcctcttctagggtagcaaaggcactgcaggcagcttcttgtactctcttgttgctgtccaggatgcgctttagcaattctgtcattaatggcttcaggtacgtgtctggcggctggctgaccacccagtgtgcatagcggctaagagtccagcatgttatggaacgcacaagagcctttttatcagagaggcactgaataaggtgaggaataagctcaggcaagtatggaatcatgccctgcatgcaaccttcagcaattgctcctaaaaccaaaatgcctgattctttaacaacccattcatgatgaaaaagtaattctttcaaaaggggcaaaatatgtggcagcagttcatcacgatacacatttgcaagaacatccagggcagcagcagaacattttcttagattccagtctgaaattgtatcatcatcatcaatttcatcatcatcatcgtcttcctcttcaattccatcttcatcatgctgctgagccaccgtcctcgatcggtgaaaacgtggccgtatatcctgttcactatcaggaatcgtttcgtcttcttcaacatcacccttaagtaggataatatctatgtctgagtacttcatgccattcactaacacaggaatcaacttaggaagatgccttacgagtacatctttgcatattggctgttcagctaaagttagccaaaattcacaggcttctaaagccacattttcatcttgatcttgagtcctctgtagcatgtactcaactatattatgcatgtgaggaagcaggcgatccattcgaacttcgagcaacatcacaagtgctcggcacacatttttccgtacctctggttcttcatcaccagctaatgcaaagagattctcagtaaaagaatcaatgtgcaacattagagcttgagtcctactgatgataaactgattgacacatgcaacagcgtgagaccttatttttggactactatgcttgaagaactgtaaaaatttgggaatcatgatgttgagaggacgatctaaaacatcactgtctaaaatctcagcagaatcttcacaaatcttctgaagggcaccaaatgctccctcacaggtattataatcttcagaatccaacaggctacagagttttggtaagaggtcaggccaattctgcaattctcccttggaggctatagttgtgatcaaaataccaacagtggctctaatcagaggagaggagtcaccaatattatttaaacattcacttttaataaagtctgttacaccatttgggaagttctgaaagtgtgctttcacattattcttcaagataagaccactcaatgatcttgtgggttcatcttcagattttaattttgtaagaacaaaaatcaagtagttgttaaagtctggatactgattaagttgttccagtttttgttgcacggttctctggatggtggtgtctggggactgggactccttcaacagctgcaggatttgctgaagcccttgctcgtcaggtttccactcatactccatcttggtttgccggtcccacaccatcccagagccctcgggcggctcggccttcggccgaagcggcactgcctcctgtccggggcctgaaatgct

SEQ ID NO: 140454 - DNA, 408 bp, Homo sapiens
atgagggaaagtttggaacttcctagagccttgttgaacggttttgaccaaaatgctgatagtgatatggacaatgaagtccaggctgaggtggtctcagatggagataaggaacttattgggaactggaacaaaggtcattattgctatgctttagcaaagagactgcttagggacttggtgccctgcatcctagctgctttagctccagccttggctaaaaggggccaatgtacagctcaggtcattgcttcagagattgcgggccccacggctcagtggcttccacatgatgttgggtctgccgttctggatgttgggaagcagaagaacaaggtgccagcagatccagtgtctgtgagagctgctgtcagcttccagatggtgccttattgctacatcctttaa

SEQ ID NO: 140455 - DNA, 702 bp, Homo sapiens
atgtgggaaagtttggaacttcctagagacttgttgaatggctttgaccaaaatgctgataatgacatggacaatgaaatccaggctgaagtggtctcagatggagatgaggaacttgttgggaaccagagtaaagggacttggtgccctgtgccccagctgctccagctatggctaaaaggggccaagatacagtttgggccatggcttcagagggtgcaagccccaatccttgccagcttccacaaggtgttgagcctgcagggcagtgcagaaggaaaatgtggggttgaagcccccacacagagcccccactgggcactgcctagtggagctgtgagaagaggaccaccgtcctccagaccccagaatggcagatccaccaactgcttgcactgtgagcctggaaaagctgcagacactcaatgccagcctgtgaaagcagccaggagggaggttgtaccctgcaaagctaaaggggcagagctgcccaagaccatgggaaccgacctcttgcatcagtgtgacctgggtgtgagacatggtgtcaaaggagatcattttggagctttaagatttgactgccccactggattttggacttacatgggccctgtagcccctttggtttggccaatttttcccatttggaacagctgtatttacccaatgcctgtaccccccattgtatctaggaggtaa

SEQ ID NO: 140456 - DNA, 264 bp, Homo sapiens
atgtgggaaagtttggaacttcctagagacttgttgaatggctttgaccaaaatgctgataatgacatggacaatgaaatccaggctgaagtggtctcagatggagatgaggaacttgttgggaaccagagtaaagggacttggtgccctgtgccccagctgctccagctatggctaaaaggggccaagatacagtttgggccatggcttcagagggtgcaagccccaatccttgccagcttccacaaggtgttgagcctgcag

SEQ ID NO: 140457 - DNA, 955 bp, Homo sapiens
  misc_feature (1)...(955): n = a,t,c or g
caaagagtaagttttttgatatacttgtcgttgagagctagagagagaaagcagaacatatatgtcacagtgtagattttgacggctttatcgtctcagttaagagtttatcgagaggaagcatcggtaccgagaattgtatcatttaagctgcatgtatacaagcaacacagtaaattggtatgaatagagtggggcatggctgcaaagatacccgaaaatgtggaagtgactttggaactgggtaacaggcagagattggagcagcttgaagtgctcagaagaagatgaaaatgtgggaaagcttggaactttacatagaaacttggaggacttagaagacaggaagatgtgggaaagtttgcaacttcctagagacttattgaatggctttggccaaaatgctgatagtgatatggaaaatgaagtccaggctgaggtggtctcagcaatcattcaagaggtgcccgagcataaacgtttagaaaatttgcagcctgaacatgcagtagaaaagaaaagcccattttctggggaaaaattcaagctctgcatcccagctgctgtagccntggctaaaaggggccaaagtacagctcaggccattgcttcagaaggtgtaagtccccagccttggcagcttccatgtggtgttggtcctgtcagtacacagaagacaagaattgaggtttggaaacctccacttagatttcagaagatgtatggaaatgcctggatttccaggcagaagtttgctgcagaggtagagccctcatggagaacctctgttaggacagtgcagaagggaaatgtggggtcagagcccccacacagagtccccactggggcactgactaatggagctatgacatcctccttcccccagaatgatagatccacctacagcttgcgctgtgcccttggaaaagctgcaagcactcaatgccagccatga

SEQ ID NO: 140458 - DNA, 1917 bp, Homo sapiens
ggcacgagggagagagactcaggtatagaaatatccttactgccacctgacctgaagcagaagaaatcacagacagcttccagaccaggcccaacatgtgtagcaccagtgggtgttgacctggaagaaatccccctagatgatgatgacctaaacaccatagaattcaaaatcctcgcctactacaccagacattcatgtctttcaagagcacccctgctctgcttctcaccaaagctgctgagaacaagaagtttgtcccagagggccatggggaattgttcagcaaatgagtcatggacagaggtgtcatggccttgcagaaattcccaatccagtgagaaggccataaaccttggcaagaaaaagtcttcttggaaagcattctttggagtagtggagaaggaagattcgcagagcacgcctgccaaggtctctgctcagggtcaaaggacgttggaataccaagattcgcacagccagcagtggtccaggtgtctttctaacgtggagcagtgcttggagcatgaagtgctgtacaaagcccagaagtgccctaggagtttgagcacaccaaccttctgtccaaaacgccactccattactgtcttcaagtcctgtgaattacctaatgttagtcttcaaatgttacatgctgtggaccccaaagtcatttccattgccaaccgagtagctgaaattgtttactcctggccaccaccacaagcgacccaggcaggaggcttcaagtccaaagagatttttgtaactgagggtctctccttccagctccaaggccacgtgcctgtagcttcaagttctaagaaagatgaagaagaacaaatactagcccaaaattgttgagctgctgaaatattcaggagatcagttggaaagaaagctgaagaaagataaggctttgatgggccacttccaggatgggctgtcctactctgttttcaagaccatcacagaccaggtcctaatgggtgtggaccccaggggagaatcagaggtcaaagctcagggctttaaggctgcccttgtaatagacgtcacggccaagctcacagctattgacaaccacccgatgaacagggtcctgggctttggcaccaagtacctgaaagagaacttctcgccatggatccagcagcacggtggatgggaaaaaatacttgggatatcacatgaagaagtagactgaaatatcagatttgtcatcaggaatactctttgtctactgtggtcctgtgcacgttggccctcagatggacctacaggagattacaacgtacaaggcagatggagcattgacgttttcaaaaccattattcctgtgactggagaggcatcaggagaggtctcgttcgtctccagctcataaaatgtagcagcatcatccttgacagtgatgtttttcaggccctccattgagaacctgaggaaatctgtaaagataagtggtgatgttgtttcaaacgttcagaacagataccatcatcctgcctttgttagctgctgtagggaaagtgcgttacagatgtctgctgacctcacaagagtgaaaagataaactgtgcatgtgtttccacttccgtttctagtactatttatttttaaactacacttggggtggcctaatacctaggaagatgttgctattcacgttagtaaacagcctaaagaaactcttaggtttactgctacatccatttgtttggagaggtaactgttgtctgtgcctttttgaaaaacttccatttggtacaaaatttttactccaacaccccctcaacccttttctcagggaccacacctcttcttcccaaggtccctgggacttcctcattctttgtggtagtacaatgattggtagcaggtaaaataaatacatagaaagactactgtcaaaaa

SEQ ID NO: 140459 - DNA, 508 bp, Homo sapiens
cttcgccgcctgggcatcacgcacgtcctcaatgcctcacacagccggtggcgaggcacgcccgaggcctatgaggggctgggcatccgctacctgggtgttgaggcccacgactcgccagcctttgacatgagcatccacttccagacggctgccgacttcatccaccaaaacaaaagggccatctctgccctgcacttgtgcagaaagtcagggatacggcaagcatgaatgcaatggtgtagagttgtgtgaaacccctagcatagagacagacagcgaaagagatggtgtgaaaagcttgcagaaccagacagagaaaccccacagtactttccactccaagcacaggaggaggtagctagcgtgtgagggttggcactaggcccacggctgctgcttgggccaaaaacatacagaggtgcatggctggcagtcttgaaattgtcactcgcttactggatccaagcgtctcgaggataaataaagatcatgaaaaagaaaaaaa

SEQ ID NO: 140460 - DNA, 1304 bp, Homo sapiens
  misc_feature (1)...(1304): n = a,t,c or g
ctcggtattaggcctcacgctgccagccccacggttcaagaccctgcgaaggcgatgggtccagggccagaaggtcctcaggaaagccccgtttgggaaaaagccccgggggtctttgaccttctggagggcctccaccagggtaagggacatggctaacaaccgccgggagcttcgccgcctgggcatcacgcacgtcctcaatgcctcacacagccggtggcgaggcacgcccgaggcctatgaggggctgggcatccgctacctgggtgttgaggcccacgactcgccagcctttgacatgagcattcacttccagacggctgccgacttcatccaccgggcgctgagccagccaggagggaagatcctggtgcattgtgctgtgggcgtgagccgatccgccaccctggtactggcctaacctcatgctgtaccaccacccttacccttcgtggaggccatcaagaaagtcaaagaccaccgaggcatcatccccaaccggggcttcctgaggcagctcctgggcctgggaccgcagcttgcggcagggtctggaagcatgaggggagggggagaaaagctcaggccagnccccgtgggtaggtccctggctcccagctggagataggaggcccaggtggcaggtagcaggaggcccagatcacccatcctcccctggggtacaggagaggccgagccccaggccactgttcactctttgttgggaggggacggggagtgaggttgggcagtgtggtggatgggcaccccaggaagggtttgaccagggaaggaggcagcttaggctgtagatggaaagatggtcctggggattcgaaacacccgcttgggatctgggcccagggtgctccccctgggaattccacagtccccttcccccctctttgtgcccccaagtgtttcccctctcctcccctcacccaaaacaaaagggcccatcctcctgcccctgcacttgtgccagaaaaagtcaggggattaccggcaagccatgaatgcaatggtgtagagttgtgtgaaaacccctagcatagagacagacagcgaagagatggtgtgaaaagcttgcagaaccagacagagaaccccacagactttccaactccaagcacaggaggaggtagctagcgtgtgagggttggcactaggcccacggctgctgcttgggccaaaaacatacagaggtgcatggctggcagtcttgaaattgtcacatcgcttactggataccaagcgtctcgaggataaataaagatcatgaaaaagaaaaaaaaaaaaaa

SEQ ID NO: 140461 - DNA, 1353 bp, Homo sapiens
gctaaaaatttaccaaaatagtttgaacacataaaaatatttttaaaaaaacagaaccaaaaacccagcataaatttagttgtataggcattggttagaggacactgttttcactaaggattatattcaacaactttctcttgagttgttactaaaattctgattctgaaccttatagcttataatggtgccaactattagaaatgggaccctctaattcagtccaatcgcaacatgtattatgatataatagatgaagggtatgtctacactataataaaaaataaacatatttttggttatttaaagaccatcttcctaacctgtaactaaaataactgtatttgatttaaacttatttaagtgcagtgaattatggaaagctaacttaaaggtttgaataatcaattatgagtaaggaacacctgttgacagccccgtgacccttcagaaccaggcatttgctgaaaaaaagaaatcactagcattgaatatagcccttagtcacatgagagattaacttcatgagcaacccagcatgtagaggatgaggtggactttcccagccacccactccttgaggggacagtagtattcatagtgaaactgctcaaactctggtgtctggcggatttcgcataagaaggagagatcaatacctgactccaaaaggaggaggagcaggggaaatacaaagagcagcagtcccaggcccaccacaaggagcctggaaaaactcttgaccagtgggtcaccccgaatatggccagtcagaatgtcgtagctccacgacaaagcacggcgagcctccttcagctcctcttcttcagcaatcaaaaaggcgttttcatctgcttccagatcctcaaatgaatctgtgtcttctctttccaactcaagcctagaaggacagtcaaagagcatgtcaatctcatcgtcatccacaggggtggggagcaggctggcacttgggttgtacactagttcagagatggttaaaggttcttcttttattttatcttcctcttcactagggggatcttcatactcccgggctgccttcactggggagctggagatcaagggagcagaaatgttctcctctttaggcaatggaacaccagtgttacgagctgtgaccttggagccgagtctcagcagacgaacaaacacattactgttgcagtggttccccatgtgcaattggaggcttcgtcgagtctggatctagaccaagcattatgccatactggttattccaatcccctatggtctcctcggcctgcatggcccagggcagcctttccctaacagtccattctgttataaaggacctaggcacccacgcgtccg

SEQ ID NO: 140462 - DNA, 1338 bp, Homo sapiens
  misc_feature (1)...(1338): n = a,t,c or g
ctcctcgctttgcagactagagatgcttctagtccctgttggcacactcaggatgggggctacgggaagcccaagaattcaccctctctcctaaatgtcaactgttttccagtaacccacaggtcaggnatccccatacgtttcattctccctcccacagtgacccacaatatccatcgggtgtttatatatcccaaagaagaggctactcattcccatctggtaaacccaacatactccatgatttagtggaaaagagcccctggagtggcacagaagggctgccctcaatacacacttactgagcgtctaacaatgaaatgggtcaagcccttcgtaggcactggcaatgggaagatgaccaatacagacggctgaaccttgctttcaaggccttcataaagcactggagatgacaaacacggtccgatacaaagggtcgggttcaggactccaaccattattatcaaagagccacgggaatacaaaggaaggattactaggggggaagttccaggagggcatcacaaagagacctctgagctggatccagaaggacagatgagtttaagctgaaagtggggacggtcgttcccgctggtgggaaccgaaggagccgaggcagcgctgaggcggagaccaggtggcacccgcggcgctgcaaggacacacaagctgttgcgagggggtcaactctccgggccttggcttagaaacctgggacgattacaccctaaaagcgcttggaaaaactgcagaactcgtgctgattttcgccaaagctactcccccgccgtgagggcaggaagccctgcgaggcgcctgcgaggacgcaaacgccgcgaagcaagtcctccacgcctccatcccaggtttagtgaagtgtagactctgacccacagccgaaaggaaagcaagaccggagtcggggagggcccctccaggagcgggctcagcgggagtctgggccgaacttgcttgctgccacagtggttccgcggcctcgcgctgagcgccatccggcgatttccaccgagggccccaccggccctccggaaggctcggcaccttccgccacttcctcggtcgctgcggcgggtccggctcctcacagccgctaaacccaggcctattctgtgttagagtcgggcctactcggacctcttcgccgggacgaatcatcgcccggctgggaaagtatcaaaactcggggagttttagaggatccaatgggtcctgaaaaaaatccctgagtgtgctaagcatcaccgcatcttcactagaaggttattttttctaaagagggtcgggtggggcccggaaaaaaaaaaaaaaaaa

SEQ ID NO: 140463 - DNA, 5646 bp, Homo sapiens
gactgtgtcagaagattttaaaaagtcaaatagtttataatcaaaatgaattgtgtttaacttgatacttatatggaattgcttcagcattataaataaaaacccaaaacaaacgccatttaaatgtgagttctgatgaaatgcatttgtaatacaattttgttaaaaatttttaataagagattgtaggctaaagttatatgcttgtaatttctagaaacatatgatgtccttgctttatgaaaatgatcctactgactgtcccgcagtagaatgcatttgagacacttttctatctgggataaggggctgtgttgcttgatacatgtttcttccagaccatgagcccctagtgggagcacgaaggggatgaaggtctgcagctggggactggtggcagttgagtctggtctcatttaacatcatgttctatgagtcacagaatcatccaaatgagtatcagccagatacaaagaaagctttgtattttctcatgcttagatagttcacaaacataatatttaaataattgtggcaaaatcctgttttaacaaaaataattttcacattccattctacataatgaggacatttccaaaatgcattggcccacattactattactttgctgatatgaagaaaatgaattatgatggtaagatccatatacagatatacacatgtgtatccatattatttatatatttaatatcagaaatgttcctacttccttgtctcttagaagtcactttacttttaaatgattctttgggagtgtggtcaatttgcacacctgacttgacacaatctgacggtcagcacaaagcaccttctgattgtataacactttacaaagtactttttgctttctcatctgtctggaacttctgacaatctgccatgacaatgagggtgggcatgattactctcatttgacagatgaagaaatatgaatccagagaggttaagtaagctgcttcagttcacatggctggtgagatatcaaaccaggactatacctggtgctcatccttgactgctggttgacaatggtgaagacaaaacgcagggtacattaatctgtgaattgcttcccctaaaccatgctgatgctgtggtgtttggaaagtagaaagtggttttgctactgtcacatttcagatttctatcaggtgctaatgagtactcatcatgttataccccaacaaacttaaaccaagaaccagaggtactttttacagttctcacagggtgtgtatatatatatatttaagaagattcgtaacatatatttacaattattcctaaatcaccaagataccatactgagaaataggtttaatctttttaagagcattttctatataatcattccaatataaggatgaaacaatataagtatgaaatataaatacagtcttggcacactttatctttgcaggtgtgctggaacctagaacactttcccttttgccttattctgcttacgcctacttttgattgttttacaaattcatagacacatttgcaagttccttgaggatcaggactcagcttctctgaagctgacaactcttaccccagagcatagcacagcgctaggcacgcagcattcaataaacgtttgatgaatacatgtacatggtctttatgtacttcagtttggttaaaggaagatatgaactgtagcattttgcctacagaattctggatttgtaattaaaaacattgtcttcatagtaaacagtattttaaaaggcataagaaatagtaataaatttaatacaaattatgcattataacaactctttggttattttaaacaaattatttggtttttttactagagtgatactaaaaatataaaaatgcgactacagaaattagcttaatctgtaaacatgataaaccctgtaaacatacatttactacataattgtacaagtgtaaagaatatctagtaaaggcaagtgctatacacttcatttagttcttcaaggcatatttagaaatactgctttgtggatctttaatgtttgaagaaggaattcttctaactacactaaaatatgaaaaagtgatgactataccaatggtcaataggatatgcaggcaagagaaaggctttaatactttttacccattgcaaatatgaatttgcttcacatgtcttatgaaccatctgtttagtaaaactgcatattaacaaaagccaaatacttcgaaagtgaagaagtaaacagtttttctgtgagttagttggctagaaatataggtaacacactttccaaagttttttcccaaaaatctaggcagtaaggtgcataaggcaggtctacaaaataataaatagctgcgagtagcactaaatatattgtagtttactcaatagtaaagtatttctttttccaaatttcagttttccatctcaaaatgcatcaaacttttcacacatgacacgtatcacaaatatttcacagttatcatctcagtagtttaagaaaaaactgcctggcagatactatacaagaggtaaatgttaaggataaaattcactatttaagtcatacaggacttatatcctattgtgtgaactctaaagccaggtgtggtggtgcctggctttaggcaggcacctaactctaaagacagcatgaaacaactgtgtaaatgcaacacattatttaaaagtgattaaaaataagttgtcgtactatttcttcaaatgctttttatatgattttcttcaagatctgggaagactcagtggccacattttagtagttccccggaaaattttaagtcaagattttggttataaaactatggcagtaaaaacactacagattgttatttgtaatctaatcaactccatcaaagccctgggtgttttcaattgccatctgaagtttatcccataattcttcaaatgattcataaggtggcaagtccaggcgattaaaacaggtatgagctcttggcagcttttcaggcgtaccccactgttcaactgtaaatgactgtggtccatttgaaccgtatagttcagcaaatccattcataggcacccgagatgtgccagtgacaaactgaagtaatcttattcttttttctgaatccatcattaaaacagccttccaaaaccactgtataacctgatgatttgcactgtagccatttttatactttgtatgttccctccagtcattcacatcaacatctcccagtccacacataagaagctctagttcattttcatcaaaaattttgatgagatcctgtggtattagttcaaagaatccctctttaaaagcagccatttgcttctggattcggtttacaaatcgccattgtattacaagataaatatattcctttttgttcttattggtgacaactatttctgatccaccatttttcagctcatgttgatgtgtctgtccaaaaagttcttcatctatgataaacctgaggtccaattctgttgggtcattttcaagaatccatcttagggaattgtaatattcactatccacagattccatatcatgaagggttattggtttgtgaagcatcatcttgtaaaatgggcggatgaaaaaaccatccaacagtttgccatgataaactgccattccagctacccgaccaataaacttgaagtaagagaggtgatcttcgttacacaatccagagtttggatttatctgtagggtataattgtccgtagcagaatattcaaacaacccataataagggttaaacatttcctttgagatcaggaagaaccattctctggcaactcctccataatccaatcccttttcaccatcaaactcaatccacagtcgagccttcaggaagtctgctctcttgacacccataattctccggtaagagtcttcaagaacagttgctcggcgaagtttcatttcaaatttgtttggaatgtcattctgcttcttcaactttcttcggaagaactcatactttcttttgtaatccctggagtagggcactgctggtccagttattgctacattctccaaccgaggatcttcccattgtgttctttttatattgtgatttatgtagaagattcttccatctgtgtgagttctctcttcccatcctggaggtaaaggccctagatcattggaagtatcaagtgatgtctttcctctcagatgggctggaattttcaatcttggatcttcccaggtggtggttttagtgttgtggtcaataaagaaaggcctcccatttggtgcatgccggacttcccagcctttaggaaggaatccttgctcaatttcagatggctgggtcacctgctggcctgaatcactggtggaggcttgtgattgagggcctgcagaactctggcttgaggtcagctgactggtctccactgtggcctgtacagtgggctttgtccaagtagtcgttctggaattgtgatctacataatatgatcttcctctttcatcttgtttttcttcccaacctggtggtaatccagatgaagtaggcaaaagcacaggaagtgtaggttgttcctcaaaagtataggcttgtaagctgcctcttctgctggaatgatttgagctcgatgctggctggctcacggctgaatttccaaaaatggtgagtctggcattcaattcttctgcaagatgagttggaacatccaagttacttgacggtggaggtgatgggaaggcctggctgctatacatggtggcttcatcttctcttataatttcccagttctcggaagactcttggttgtcaacactttctgtttcctcggatatctgccgcctggtggtaaatgcacgttgtgcttgcagttgaatgttgccattctcagcatctgttaggttgtcctgaggggttggtcttttccactgtgttcttctagattcatggtttacataataggtccttccaaggatatcctgcctctcttcccaccctggaggtagaggagaaggttcttgttgttgctgcaaatggcaagcagcatctggttggtccaaaacaacccagccaggctctaattcctcagcctgttctgcattatcatcttctgagccactggttttaggtaaataagtcatttttagtctcagataacctttaactcttgatttgtgacttcttggatgaagaacaaaatccttaaatgtatatggtctctccaatcttggattttctgtcggtaatggataaagtggaacatccacttgacctaggaaatcatctcttgtcaatcggttttcgtcaaacacttcaaaaagaagccggtgctgctgaggatgaactctgaataatatttcttcattccactttggattcaaactctttttaatggtttttgtttgcacacttgtaagaactccattcattgggtcatataacgtcactctcacgtaaggatcactagctcccaatatatccttcttggcaaggcctattccggctataactcttactctcacaattcgtgaattttcctcgtcctccaggagcccgaacacctccaccgcgcaagttgccatttccgaacgcttccagcaaaccggacgcgctcgcccccgcccagggcaggcaactgtggaggaggaggaggagaagcgggag

SEQ ID NO: 140464 - DNA, 1452 bp, Homo sapiens
atggctgaaaggggccaacttagagctcagcctgtagcttcagagtgtgcaagccccaagccttggcagcgtccatgtgccattgagtctgcgagtgcacagaagtcaagaactggggtttgggaacctctgcctagatttcagaagatgtatggaaatgcctggatgcccaggcagaagtttgctgcaggggtggggccctcgtggagaacctctactaaggcaatgtggaagggaaatgtggggtcagagccaccatgcagagtctctactgggccactgcctagtagggctgtgagaagcaggccaccatccgccagactccagaatggtagatccactgacagcttgcaccgtgaacctggaaaagccacagacactcagcgccagcctgtgaaagcagagcttgcccagctcctcaggcttatggctgcacagggaacacctctcagcagctgcctttaccagctgaccttgctcagattgggggtggaggtccccgtggaacctgcagttggaggaaacctgggccctgtgatgctgcagtcactcacacaaggtgtcccaggaagggacatggatgaagctagaaaccatcattctcagcaaactattgcaaggacagaaaaccaaacaccctatgttctcactcacaggtgggaattgaacaatgagaacacttggacacagggattcaacccaggaacacataattcatttagcagtcacatagctttatgtcagctccaatctgggacagttactcagtcttttctggtcttccatgattttgacagttttgaagagatcggaggtggcccaagtctatcccaacagctcagggagcaaggtgggaaccaatcctggacaggacaccatcccaacacagagcgcacacgcacgctcactcatcctggccaactgagacatgcctattcacctaaagagtacacctttgggatgtgggaggaaagcagagtatccaaagaaaacccacacttacctgggaggggctgttacccagcagtgacgttatccacaggtgcaggggccagagctcctacagcttttggccttctagcacctagacgccaaagtgaagagcaacaagaggaccactttatagtgcaaggcacaggcagggtctcagcttccatgaccttcagtagggaacaccttcagtattgtggggaccacctcagtactgggtgggcgactttcagcaaaattcctgcctctataggagctacagtggcacactcagaaagtggagtgacttaccaagtagacatgagaagtgaaagcattcaggtggcaccggagtctgcagtgattaggggctggaaggactctgatttggaggggaaccaagggcacctgagtgagaaacatatgatgtccttgctttatgaaaatgatcctactgactgtcccgcagtagaatgcatttga

SEQ ID NO: 140465 - DNA, 2325 bp, Homo sapiens
gagcccaggagctggcggagggcgttcgtcctgggactgcacttgctcccgtcgggtcgcccggcttcaccggacccgcaggctcccggggcagggccggggccagagctcgcgtgtcggcgggacatgcgctgcgtcgcctctaacctcgggctgtgctctttttccaggtggcccgccggtttctgagccttctgccctgcggggacacggtctgcaccctgcccgcggccacggaccatgaccatgaccctccacaccaaagcatccgggatggccctactgcatcagatccaagggaacgagctggagcccctgaaccgtccgcagctcaagatccccctggagcggcccctgggcgaggtgtacctggacagcagcaagcccgccgtgtacaactaccccgagggcgccgcctacgagttcaacgccgcggccgccgccaacgcgcaggtctacggtcagaccggcctcccctacggccccgggtctgaggctgcggcgttcggctccaacggcctggggggtttccccccactcaacagcgtgtctccgagcccgctgatgctactgcacccgccgccgcagctgtcgcctttcctgcagccccacggccagcaggtgccctactacctggagaacgagcccagcggctacacggtgcgcgaggccggcccgccggcattctacaggccaaattcagataatcgacgccagggtggcagagaaagattggccagtaccaatgacaagggaagtatggctatggaatctgccaaggagactcgctactgtgcagtgtgcaatgactatgcttcaggctaccattatggagtctggtcctgtgagggctgcaaggccttcttcaagagaagtattcaagaacttccaacactatgttgaataggatggtactggtaccaaaacagagatatagaccaatggaacagaacagagccctcagaaataataccacacatctacaaccatctgatctttgacaaacgtgacaaaaacaagaaatggggaaaggattccctatttaataaatagtgctgggaaaactggctagccatatgtagaaagctgaaactggatcacttccttacaccttatacaaaaattaattcaagatggattaaagacttaaatgttagaactaaaaccataaaaaccctagaagaaaacctaggcaataccattcaggacataggcatgggcaaggacttcatgtctaaaacaccaaaagcaatggcaacaaaagccaaaattgacaaatgggatctaattaaactaaagagcttctgttctttgctggggtatctgaagactgaaaacacagcaaaagaaactaccatcagactgaacaggcaacctacagaatgggagaaaatttttgcaatctactcatctgacaaagggctaatatccagaatctacaaagaactcaaacaaatttacaagaaaaaaggaaccccatcaacaagtgggtgaaggatatgaacagacacttctcaaaagaagacatttatgcagccaacagacacatgaaaaaatgctcatcatcattggccatcagagaaatgcaaatcaaaaccacaatgagataccatctcacaccagttagaatggtgatcattagaaagtcaggaaacgacaggtgctggagaggatgtggagaaataggaacacttttacactgttggtgggactgtaaactggttcaaccattgtggaagacagtgtggcgattcctcagggatctacaactagaaataccatttgacccagccacccccattactgggtatatacccaaaggattataaatcatgctgctataaagacacatgcacacgtatgtttattgcggcactattcacaatagcaaagacttggaacccaaccccaaaatgtccatccaatgatagactggattaagaaaatgtggcacatatacacccatggaatactatgcagccataaaaaaggatgagttcatgtcctttgtagggacatggatgaatctagaaaccatcattctcagcaaactattgcaaagacaaaaaaccaaacaccgcatgttctcactcataggtgggaattgaacaatgagaacacttggacacagtaaggggaacatcacacaccggggcctgtcatggggtggggggagcgtggagggatagcattaggagatatacctaatgctaaatgacaagttaatgggtgcagcacaacaacatggcacattttatacatatgtaacaaacctgcacattgtgcacatgtaccctagaacttaaagtataataaaaaatattt

SEQ ID NO: 140466 - DNA, 1086 bp, Homo sapiens
tttcgttgctcaagctattattattttaaatattttttctgtttctttctcttctctttgcttctcttctctttcttgcatccccattatgtgtatgttatttttttttcatagttgtcgcacagttcttgaatagtctgtttcactttttcagcctctttgttctttgcttttctggcctggaagtttctattgatatatcctcaagcgtagagattctttcttcagccatgtccattacactcatgggcctatcaaaggcatttctcatcacttagaacagcgtttcctcatcttctagcccttttctttttattcttttcttaggattttccattctctctgcttcacaggttcttgcatgctgtctactttattcattagagcccttagtatattagttataattgttttaaattcccggtctgataagtctaacactcctgccatatctgagtctgggtctgatgcttgctctttttcttcaaactttgtgttttgccttttagtatgacttgtaattttcttcttgacatcagacatgaggtactggggtaagaaggaactggcagttagtaggcccttgattgggatgggggagcagttgatgccttgccttgactgatcaggactcctcagtgcaccttctcgcaatgaggctccctgctcagctcctggggctgctaatgctctgggtcccaagagccaaatatgtttcttgcgaagaaccacagagttgaaggcactgctgcgtggcttcctgggcggagcctgtgccactgggagtctcacaggaaagtaatgtcgcgagtagggctttaggtctgtaatcaccaaagggttagtgaagtccctgactcgactctctgtggacacatcccctggcaccgcagcctctccttccacgctgagaggcggagcttccttgagagctttatgtttggggccatcacactgtgcagggtcccagtgagtgttaggaggatgtgcagcatctccaggctccaaagtagtgtttgtgatggtgaaatccctagaattttggttagatgtgagtccctgcttgtgaataccttctacagacat

SEQ ID NO: 140467 - DNA, 805 bp, Homo sapiens
tcagtcatacttacttgccaaactagagaatgcatctgtgttcaaattcctcagggcatccttaacaagctgtgttccactccactgaattggcttcccgtggattctctctgaagggcccctacatattgtttcctgaggaaacctgagtttacaccaacatatccttgtctgtaatgaccacttctgaagagtggttgcattagttttctcttgctgaggctgttggtcaaactgtacaggtttctggtcagacggaacaactccacattcaaccaggttgtgctgaagaggttgtttatgagtcgcaccaaccgaccacctctgtccctctcctggatgatccagaacataaagcttcctgaccgggaaaacagaaaggctgtggctgtggggaccataacggatgacgtacgggttcaggaggtgcccaaactgaaggtgtgtgcactgcgcatgaccagccaggcccgcagcggcatcctcggggccgggggcaagatcctcacttttgaccagctggcccctgatgccccgaaaggctgtggcaccgtcctgctctctggtcctcgcaagggctgagaggtgtaccggcattttggcaaggcaccgggaaccccgtacagccacaccaaaccatacatccgctccaagggccggaagttcgagcgcaccagaggccgactggccagccgaggctacaaaaactatagatcctatcctcttattaaagactgtctctagagccgtgctttccgatacagcaaacaagccacatgttgctcctgaatacttaagatctagt

SEQ ID NO: 140468 - DNA, 675 bp, Homo sapiens
tcacataatattccaaggcagacattccagattgttggagtaggcgcagggagaaagttcggctctatgcgttccctcaggaaacaggctgatagtggctttgccatattccaatattaactggcttccaaagttgctatcaccattgtcattatcagtatagctcatgggacatttcctctctaggtacaccaataggtgcaacgcgtacccacataagatgtatttcttattgtggtctgtttcctggagattgctgtcgagggtctgtgacaaatcaacacagggccactgcggcttggcatacttagtttcctcatcatccaaatcaactattgcaaacaccttgttatcgtcattgccatgatctctgagcacactcttaagcagcagggactgcccattagcgaccatttcgaaacagttgagggtattggctagggggtgtgtcgtcaacaactgtttctgcaagcacttgctgaacacttgttcattagctggcactgtgcctgggtgaggggctagttctggaagacagaagttcaaactactggcaaagttcaaagtgttggcaaggctgtgctcctcaggaggctctagaggagaacctttttcttgccttttcctgtttctaggggccaccggcatccttcggctcatggcctcttcctccat

SEQ ID NO: 140469 - DNA, 1089 bp, Homo sapiens
ctaagagacatagttgggaccagaactggcgcctgctgacttctgggtaatccatccccggttgtgaagggacggccgtgccgccacgacggctccgaaatacaccaagagtttattttcggggctgctcgtagtccagtcattcttgggtttcccatttcctatcagccccaagccacccacggatgctccccacctccagacatcgccctccactgcgtcctctgacctgagagcgaaggggaaagcggcgagatgactgaccgctacaccatccatagccagctggagcacctgcagtccaagtacatcggcacgggccacgccgacaccaccaagtgggagtggctggtgaaccaacaccgcgactcgtactgctcctacatgggccacttcgaccttctcaactacttcgccattgcggagaatgagagcaaagcgcgagtccgcttcaacttgatggaaaagatgcttcagccaccgcagtgcggggcacctctcccagcgtttctccggtttgccaatcctcttaagtattcctgtctccaaaggaccggctctccatggctcctgcgcctcgtgctttccgcgtacagaagtgcttgcccggggagtcccgcctgacctgccttcatgtggacccttagaacagcactgggcgtagcggcgtgcacctgtagccccagctgctggggaggaaagaaagaaatatttcttatagttatggaggctgagaagttcaaagccaaggggctgcatttggtaagaaccttcttgcttgtggggactctctgcagagtcgtgccgcgcggagtccgcgggccaggcgaggtagcctggccgaggctcctgcctgcgtcctgccggggatggcggtcggtgcttgggacaccggcggccacctttgtgcggcttggggcgcgcttcccttttctccgtcgtctgcagctcttcgcttctgcgattccactgctccagttccagtcttggttcaaagggccccaggtagagctccggctgtggctttggggagtgcaaggtgccataagccttagcagcttccagaagctgagcatatgtcagcaccat

SEQ ID NO: 140470 - DNA, 988 bp, Homo sapiens
  misc_feature (1)...(988): n = a,t,c or g
atcgagttcgctaccccatgnggnggaattccgccattcttctgcgacggcgcggacctggagcttccgcgcggtggcttcactctcctgtaaaacgctagagcggcgagttgttacctgcgtcctctgacctgagagcgaaggggaaagcggcgagatgactgaccgctacaccatccatagccagttggagcacctgcagtccaaagtacatccgcactggccaacgccggacacaaccaaagttggagtgcttggtgaaaccaaaacccgagctcttactgcttcctacatggggccacttccgacctttctcaaactactttcgccatttgggaagaaatgagaagcaaagcgcagacgtccgctttcaactttgatggaaaaaagatgctttcagcccttgtggacccgcccaagccgaaaaaagccccgagggagaacctggagacctcctgcccttaaccccacccgaattgcggggccaccctctcccccagcggtttctcccgggtttggcccaatccctccttaaagtatttcctgttttccaaagggacccgggttttccatggggttcctgcggcttcgttgtttttccgcggtacagaaagtgcttgccccggggagtcccgcctgaccctgcctttcatgtggaccctttagaacagcactgggagacctagcgaggactcctgagaaactgtgctggttggagaggtcctagagccggcgagcgtttgagaaagagggcatggcgcgtacagaagtgcttgcccggggagtcccgcctgacctgccttcatgtggacccttagaacagcactgggagaccagcaggactcctgagaactgtgctggtggagaggtcctagagccggcgagcgtttgagaagagggcatggcgctggagtgagatgggatttggcgtctcgtttttggctaattgattgtcattggctttttccataaagtttagaaatcgttc

SEQ ID NO: 140471 - DNA, 708 bp, Homo sapiens
tcagtgctgcagatgctgtaaaccccagtagcatcctttgagaaccacccctctaagttcagtgttgatataacatttttctttcttgctaccattgcggttcccagggcttgtggttgcggaagagatgagggaagttgcagctcctgcagcagcagttagcgtgtgggagcggtcaaacccaggggcaacacgatattttagctcgatgatcgtttcaccttctctggttaattctgttacttcacaagtgtagtttcctgtgtgtgagacagcatcactcttatccatcttcaaagaggcatctccttttagtaattgtgagacttcaatttttgcactactaaagtcagtggggacagtggacttgtttagagctccatcaaaggtgtaaatatctcttcctttaaatttccactttacgtatacttcagtagtgttttgtgcctccatattagtaacaaagcatggaatgacgacagtgtcattacaaaacgtgaattctacagattttgttttattaaatagtagctgagctgatccagcaccaccagcttccatgtagccatccactttcagggggaaaaataaaagatcaacaggtggttttcctctcattgagtccctagagctctcataataaaactctgtactaggctcccaagaccaaccaaaggccacaggactaccctgaaggatgcaatgcat

SEQ ID NO: 140472 - DNA, 1050 bp, Homo sapiens
atgactgctgctctggccgtcgtcacgacgtcgggtttggaagatggggtgcctaggtcccgtggcgaagggaccggggaagtggtcttggagcgggggcccggcgcggcctaccacatgttcgtggtgatggaggacttggtggagaagctgaagctgctccgctacgaggaggagttcctccggaagagcaacctgaaggccccgtccagacactattttgcactgcctaccaaccctggcgaacagttctacatgttttgtactcttgctgcttggttgattaataaagcgggacgtccctttgagcagcctcaagaatatgatgaccctaatgcaacaatatctaacatactatccgagcttcggtcatttggaagaactgcagattttcctccttcaaaattaaagtcaggttatggagaacatgtatgctatgttcttgattgcttcgctgaagaagcattgaaatatattggtttcacctggaaaaggccaatatacccagtagaagaattagaagaagaaagcgttgcagaagatgatgcagaattaacattaaataaagtggatgaagaatttgtgattaggattagctcggcatccacctatactaccctttttaatagatttaagtaccatggaccaaccagtactggtaaccattattttatcaagcttgaacataccagagatgagatgtcaaaaatatgtatcaatgtgattggtcagagaaattctgtaggtcagaagtccagtaggcgcagctggtttctctgtttcaagtctcacaagactgaaatcaaggcattcgctgagctgctttcccttccggaggctctaggggagagtccatttccagcccctgggtttgaccgctcccacacgctaactgctgctgcagaagctgcaacttccctcatctcttccgcaaccacaagccctgggaaccgcaatggtagcaagaaagaaaaatgttatatcaacactgaacttagaggggtggttctcaaaggatgctactggggtttacagcatctgcagcactga

SEQ ID NO: 140473 - DNA, 2077 bp, Homo sapiens
tttatcatcattcatttatccttttatttagtggcttagatcctagaagatagattccctataaaatcattttagccacgaaaatattccataagaaaacccaccttcaaatgttaatgaggaatactgaaagttttttttaaaccctaaaaaaagtgggccaattttaaggttaaccccataaaagctgaaggccaaaggccagtttggggttccttggaaaagaatccctgccctacccatcctccagtggccctctgggccacaaagccaccttatgatcactgccagaggtggagccaaggtaaaaggactgtgtccagccagttccatgttgtggacagcagcagcatcctgcagaaaaccgcaggtccatatacccttgggctttacacagggaattgcttatggaaaaatgagccaccagggtgggagcttttaacataggtaatgattagtgaaagcctcctagaaagtgagaatttgtaattatctgtattaaacattacattcagtgtaaaaggctttagaccatcataatcaccatgatataatatgtgagtatgtatatgtaaaaaaatacccattgaacataaaattatgttttgaaatctatgcaacatgaaatatagtttgatataaaaaaacccaactaatcagaaacatgaaaaccagtatgttttaataaaagcctgttagctggttctggaataactgtggcatgcatgttcctagtcatgttggacttctccttcaggctttgattgggagtagtgtgtgttccacaatgccaattctaatgtccatctctacagtttccttgcttcagttttgttaaggctctgtttaatcttcaccaaaggagcaccatcagccatgctggcggcccttttcttccatttccttgttttaccttttctaattcttccataacctcagagaggagtctgggtcctttcggtaattcttcattttccctggttgggatcgggtcctttgcctaactcagctggggattgagctgcaagatattcttggaaccaaattctcaagcctgattgttgatggaaattatcttcggctgctggaatctctttccaaaggtcctaggttaatttccattatggggagttttgtccaaaaatcccttcaggaatgtatgaatcaaaacttggatctcatactgataaaactccccacttcctcccagctcaaaaaactcgcagcacgccgagcccagcaacagcgccgctaccaggggccacatctccgcgcccgccgcggggtcgccgccgccgccgcaggtgtccggagcagcagccgccgccgccgttacaggcaggaccgaccgccgccgcgcgtcacaggcaggacccactgcccaggttttctcctctttgctttcactcccaccctcgcgcttcaggggccgggtcccgtcccgccccagcccgcgtctctccctggacccgacgtccggcagcgcccgtttcctccggacgcggccgtctagcgccgaagcggtccctgagcccgaggccgccacgcccagggcagggcggtggtcgggtacctgcccgcagggagcttccactcgcccctcgcgggctctgcgttcggctcgtctactcgctctgctcttccctatgcggttctcttccctctttctcacttggttctttagtgttttcatcctctgatcagggttaatcaaacaagttccattcacggtggtaaacattgttacagttctgtaggtcagaagtccagtaggcgcagctggtttctctgtttcaagtctcacaagactgaaatcaaggcattcgctgagctgctttcccttccggaggcttattctgagggccacgctctctccgaaggctcctaagaatccttccttcctagcctggcagcctttggcattccttaacttgagctgcatcacttcaggctctgccgctgtcttcacagggtcttctctgtttctgtgtgctctccttaatccatcttgaacagcccctgggtttgaccgctcccacacgctaactgctgctgcaggagctgcaacttccctcat

SEQ ID NO: 140474 - DNA, 750 bp, Homo sapiens
ctattcctcggaaaaagcctctgttttttcatgtagcttgtgataacccacattgtgcccttgggcttgcggcattggaagttgagagtaagtgaatgtcacatcgtttggatcaagacccatttgcagcacaagccctgttttgttcagcggcttgtaaggcccggttaaagagtttgatacataaccaagcatgtaaatatcgtttgagttaataccatcgatcgtcatttttgaaccgcgtgaatcagtgaacaagtaccatttgccgttcattttgaaaacattcgcgcgctcgatttcatcagttaccgtgtttgaagtgatcagcggcttcattacttttttcaatgtgtaatcattatttaactctatgataccgagggcgccgttcgctaactcagcatcgcgttttttagcgctctgctgaagcttctggctttctttacggaagaagttcgtgccgccgccgtagtacgctttgttaaataaagattcttcgccttggtatccgccctctgttcccgtgttggcttcgaatacaaggtatttatggcctttgtcttcaacgtagtgagggtctctcagcgtatggttgtcgccggatgtataattgccttcatcgataaactgctgcacgctctggttacccaggccgtgccggcacgttaaccgggctgcatccgatgcaagtgtgtcgctgtcgacggtgaccctatagtcgagggacctaataacttcgtatagcat

SEQ ID NO: 140475 - DNA, 344 bp, Homo sapiens
  misc_feature (1)...(344): n = a,t,c or g
gtgatgcacttcaaaaagcctttacagataaagaggaattacttaagcagcaggcatctaaccttcatgagcagaaaaaagctggggtgatatttgaagctgaagaagttatcactcttttaacttctgtgcttaaaacgtcatctgcatcaagaactagtttaagctcacgacatcagtttgctcctggagcgacagtattgtataagggcgataaaantgtctgggaccacggtcccactcgtatcgtcggtctgattattagtctgggaccacggtcccactcgtatcgtcggtctgataatcagactgggaccacggtcccactcgtatcgtcggtctga

SEQ ID NO: 140476 - DNA, 384 bp, Homo sapiens
acaccggcgttcggtcgaagagtatctggtgtcatagaaattgccgatgggagtcgccgtcgtaaagctgctgcacttaccgaaagtgattatcgtgttctggttggcgagctggatgatgagcagatggctgcattatccagattgggtaacgattatcgcccaacaagtgcttatgaacgtggtcagcgttatgcaagccgattgcagaatgaatttgctggaaatatttctgcgctggctgatgcggaaaatatttcactctgggaccacggtcccactcgtatcgtcggtctgattattagtctgggaccacggtcccactcgtatcgtcggtctgataatcagactgggaccacggtcccactcgtatcgtcggtctga

SEQ ID NO: 140477 - DNA, 1397 bp, Homo sapiens
tcagaccgacgatacgagtgggaccgtggtcccagtctgattatcagaccgacgatacgagtgggaccgtggtcccagactaataatcagaccgacgatacgagtgggaccgtggtcccagaccttgggtaaaaatttgtacccgaacaagtaccatttgccgttcattttgaaaacattcgcgcgctcgatttcatcagttaccgtgtttgaagtgatcagcggcttcattacttttttcaatgtgtaatcattatttaactctatgataccgagggcgccgttcgctaactcagcatcgcgttttttagcgctctgctgaagcttctggctttctttacggaagaagttcgtgccgccgccgtagtacgctttgttaaataaagattcttcgccttggtatccgttttctgttccccgtgtgggctttcgaataccaaggtatttatggcctttgtcttcaacgtagtgagggtctctcagcgtatggttgtcgccggatgtataattgccttcatcgataaactgctgaacgttctgatatgtttttccgtctccgtcaaaaatcgttttgtgatcttccactccgttgattttgagtgtgtcatcagattttgacacatttacctgcgctgttgtcaggctttgtttgccgtaatgtttaccggaatagtcagtgtagaataaacggatttttccgtcagatgtaaaggttgcagaaccggaccattcttgcgtctgatctttcaggatcggatcgttggcgtcgaacttatcgctgtctttacagacacggcccgcgtttttccagctgtcgattgagttgtcgccgaccttttgataaaacatgtagattgatgtgtcatcagcgtctttcgggcttcccgcaagagcaaacacaacgtgatagccgttgtattcagctactgttccgtcagcgtggggcagcggccagctgtcccacacatcaagtccttttgcagactcaggggatttctggttacccaggccgtgccggcacgttaaccgggctgcatccgatgcaagtgtgtcgctgtcgacggtgaccctatagtcgagggacctaataactgaaccttcatagctgagagaaggaggttctgctccaccaaaaagtgtctgctggcctgtgggggcttgcatcaagagattgtctagtatgtctagttctttttcttcctttcctttcatcaaacatgcacatgcctgttgcagggttttatcctgactgagcagcaaaaatgcttgaacgcatggtatttcatcccatgtttcatcccactggttacccaggccgtgccggcacgttaaccgggctgcatccgatgcaagtgtgtcgctgtcgacggtgaccctatagtcgagggacctaataa

SEQ ID NO: 140478 - DNA, 901 bp, Homo sapiens
atgaaactcatggaaacacttaaccagtgcataaacgctggtcatgaaatgacgaaggctatcgccgttgcacagtttaatgatgacagcccggaagcgaggaaaataacccggcgctggagaataggtgaagcagcggatttagttggggtttcttctcaggctatcagagatgccgagaaagcagggcgactacccgcccccggatatggaaattcgaggacgggttgagcaacgtgttggttatacaattgaacaaattaatcatatgcgtgatgtgtttggtacgcgattgcgacgtgctgaagacgtatttccaccggtgatcggggttgctgcccataaaggtggcgtttacaaaacctcagtttctgttcatcttgctcaagatctggctctgaaagggctacgtgttttgctcgtggaagtctgggaccacggtcccactcgtatcgtcggtctgattattagtctgggaccacggtcccactcgtatcgtcggtctgataatcagactgggaccacggtcccactcgtatcgtcggtctgaccgggcagatagttcaccggggtgagaaaaaagagcaacaactgatttaggcaatttggcggtgttgatacagcgggtaataatcttacgtgaaatattttccgcatcagccagcgcagaaatatttccagcaaattcattctgcaatcggcttgcataacgctgaccacgttcataagcacttgttgggcgataatcgttacccaatctggataatgcagccatctgctcatcatccagctcgccaaccagaacacgataatcactttcggtaagtgcagcagctttacgacggcgactcccatcggcaatttctatgacaccagatactcttcgaccgaacgccggtgt

SEQ ID NO: 140479 - DNA, 697 bp, Homo sapiens
ggtcactccaggtgtggaattttagaaagtgagtccttggagtaaatggcaccgtggctctggcagcagatagaaaggaatgatgctctggagaggaggtagggacactctgcggtcggccagtggatacatgaggggcccggctggaagtgggatctttaattcttcggtttatcttccactgctcatgcctctgtcttcataaatggtaatttcaatctaaacagaactcgcagtcctcgctcaaatagggtctgttcaaggaggaggcccttgtggaagcataagatcttcctcaattctgctcttgaaatgtatttggagactttcttcaagaaccttctcaataatgagtttcccatgccataggaaagatggtaatatgctgttaaacaagccaaaacaaccttcgaagatatgactggccgccgagcttctctgcttctgcataaaggttatttagagttcgaactgtttcttcaaactgctgcctatcaatccggttctccagctccgcagggaacttggtctggaactggcagcgtgtgccactgctgtagtctcgctgaatgaacaccttttcggacaaccggcgcctgctgcggcctcatggcgaggacaggacacgcccgcgccgcctcaatttgccctccagatgctgtcgcaccgctttcgccgtcaccgaacgcgtggttcg

SEQ ID NO: 140480 - DNA, 1286 bp, Homo sapiens
gtccctggagtatagggtcaccgtcgacagcgacacacttgcatcggatgcagcccggttaacgtgccggcacggcctgggtaaccagcgttatgcaagccgattgcacaatgaatttgctggaaatatttctgcgctggctgatgcggaaaatatttcacgtaagattattacccgctgtatcaacaccgccaaattgcctaaatcagttgttgctcttttttctcaccccggtgaactatctgcccggtcaggtgatgcacttcaaaaagcctttacagataaagaggaattacttaagcagcaggcatctaaccttcatgagcagaaaaaagctggggtgatatttgaagctgaagaagttatcactcttttaacttctgtgcttaaaacgtcatctgcatcaagaactagtttaagctcacgacatcagtttgctcctggagcgacagtattgtataagggcgataaaatggtgcttaacctggacaggtctcgtgttccaactgagtgtatagagaaaattgaggccattcttaaggaacttgaaaagccagcaccctgatgcgaccacgttttagtctacgtttatctgtctttacttaaagtccgtgggtaacagccagaaaagcataactggcctgaatattctctctgggcccactgttccacttgtatcgccggtctgataatcagactgggaccacggtcccactcgtatcgtcggtctgattattagtctgggaccacggtcccactcgtatcgtcggtctgattattagtctgggaccacggtcccactcgtatcgtcggtctgattattagtctggggaccacggtcccactcgtatcgtcggtctgattatgtagtctgggaccatggtcccactcgtatcgtcggtctgattattagtgacattaatcgtgccgatacccaggttaggcgcgctgtcaataactatgacatcatagtcatgagcaacagtttcaatggccaggcggagcatcaggtgtggatcggtgggcagtttaccttcatcaaatttgcccattaactcagtttcaatacggtgcagagccagacaggaaggaataatgtcaagccccggccagcaagtgggctttattgcataagtgacatcgtccttttccccaagatagaaaggcaggagagtgtcttctgcatgaatatgaagatctggtacccatccgtgatacattgaggctgttccctgggggtcgttaccttccacgagcaaaacacgtagccccttcagagccagatc

SEQ ID NO: 140481 - DNA, 4080 bp, Homo sapiens
ttttttagatctgacataaaacctcaagtatttttgctctaagattatgctctttacataagttagaatatatttaaacataagggggagctaaaagcaaatgggggtaaacaaaccagaaaaatcaaaatacaaatatacacagagccaaaatagtatttccgtcagcagcaaaacagaaacaattccaaaattaatgtgcaaatgaaaataaagtaggttaacagtcattcatttaataagcttgtgtatttgataatgaaaacgcttagctttccttttctgacctcggaaaagtaatcaccatctttagtaaggtattacttttaaaaggtatggactttaacaagtgaataaagcatgtttagagtatgtttatgtttagaaacaataccttgaacactacagaaaacaacaatattctgaaaatccagtttattttccatgtcggggacagatccagtcagggggatcagtttttctgccgtgtgtaaataatttatcaaaaataagttttctccacaagactcttttcccatcaactctgaaaaccctggtctgacaacataccccaataaagcttttgaaaatcacctcttgaaatttggaagaaaatgtgccaagtcttttcctgtaacatttactgcactacaaatggctaaagagcaatttatggtttaaaaggtgaatagtacaacaggtgagttcaggaaattgttttagtgcactttgctccagttttagccaacatgctacattttcctttttggtttttgttttgttgttgttgtttttttgggggaaggagagggagaccgcacaaagtggacttgaggatttccattgtacgaaaaagatatgactctgcaagcaaaacagtgtaagctgccttttttcttaagacctggacattttaagacagaagctttgcaaaacattacacaatttttttattattaaatgagaaaatctcatttgttacatcgtcacattgctagtcagagaaatgttgcagtgatggaaggaaagtcaatgttggaccaaccccaagtcctccattcctacaacattcatttacaaagaaataatcgttcaacacagcccaacaaaacattcttgggttttcttcatattgaaggtcccccaaaaaatcctcttctaatgggggtatttcacctacataaattataggttcttcatttttacaattcaccccaaactgtatggggaggtggtatcacacctaagatttctaaaggctgttaggggaatcccttcacacatcgtcggtcatctgatggtattcactggcttacttgtctctgtggtccattcattctcagttgtgggggttttgaaagtgctggttcttccacgggtccaaacttggaagtcacagatcaagcccattttccaaaatacccattttttcctcagaccattccttctgtaactgttcactaataacttggaattctctcatttcatcctcagttaagggagcacatgtttccaccatttcaactgtcctccctgcccagccccatttccctttaaacaacctgtgttctgccctcaagtgaacttgaaagaacatcagtttgtgggaaggttgaagaccgaatgatctgctgggaaatcactgaggcattgccattctcttgaggaatttcattttcatcgaagtttcggtttatatccctttcttggtgagtactattgctgttatgtaaattaaatgagtcgtcatccttctctgagccagcacggctttcatcttcatgttcctcttctactctgtctcttttcaatgctttcaaaaattccactcttcttatcagtgcgcattcgtgtccagtttggttagacgaggctgctgattaagtttgtcaacaggagaagaggaatttgagcgattacactctttccactgaaatttgtaagatggaacctaaaagttccttggccagttgatttaaaaagccattaaaagttgcccaacgcccaaatgtggactcatgagggaaagaagttcccaactttattttcttttgtttggcttttcccattgtgtaggttttgtaggtggagcagcaggtttagggactaaacctttataaacacttggaccagttccattcttaactggctgtgacggaagatttcctactactgggaatccagatagctgtaagtcttttgtattacctttcttaatgaccagcatccttggagctctagatttaggattcggaggatattcccacacacctgcagctaaagacttattgtgatttggttctctctcatactcaggatttaaagacggaaaatcctcagcttcaaactgtttgcgttctctcttgtcttctttcctcccggtttcattgtcaggtatgttgttttcatgtagtccttggctttttcctgcatggaaaatactgctacgagaacgggaacttccaccatggtatccacctcgatgatttatgttttctgtaccatttcttccatgtgtacgccatccatttttttctttccttccaaagttacctccattaggaccgtccaatagcagaatcaaagccatcatgaagagttgtgtccgtcgacggttcacatcataacgattcctctgtccatgcaaagttttcaagaatgcgtctcaaaattcaatgacgatttcaaactgctggtcaggacctttgttgatgatggtggagtagggaaattaagccaggctggagcaaagtcatgctgcgccatttaggtccagtctctccaactcagtgaaacaaggcttcaacacctcatggcaagtccaaattccaacaggactgcacaggaaggtgttggttttttctctgtaatctttattttccagtttgtatttttattttgtatcctctgaaataatatcgaagttctttgaagatacttaacctacgactatttgacatagagttacttcaagtcagctacccatacttctgttttaaagttttcatatggctatctcccgaattagccaagttctttagatttaagatcaaagtcttctttattattccatgtacttgccactgttgtacttgtccactccagatgaaatatccaatttacgagccaaaaagcaaaaacaaaaagaaaatttcacatctgaagagcattcctaaacatcgggcatatacagagacacacatagctatctcaatactaccatgctgccggaaaactgcaacatcttaaatttccacgtaaataaaagataaaaggaaaaaaactctgtattctttcaatctcttcattcagaaaaagtgtcccattgtgacatgaaagagctgaagtcaaaaatccctaaaactttcaataagggtaaaaataaaactgcccatgaaaccttcaggcaaatactcagtcatttggaaactggctgaaactactcagtacacaaatcaacgtctctcaagtttcggctgaagaaccccaacaacgggggtgggggaaaggggaggcaaaaattaccaccagctggaaatactgtaaccagttatataatccgtttgaaccaaaatactgaagaaatgctgcctggggtctctttataagtagcttgctgaattgttcactactatcaattcacttcacagacgattcttgccaattttaataaacttctggggcaaaattatccaaaaacactgtaaatccaaaatggccacttaaaatatccagggccttttacacaaaacctagatgatgatcttcatatctgagtaattcaatcacctagaggggcctatgtgcgcctctcccccctctcactccttgcttctcgccgcccctccgtcggcgggcagcctcacacctcgcgccaccaacgccgcttccgacccctcaaaccccaacacggacacgggcactcccctcctcccccgggctcgggcgtggagcctagaggacggtgttaccttctgccccaccagaggtgcccctcgcctgggggtgccgccgcgcctgatcccggaagaaggttttcggtactttgaataatccccttttgccgcttttcccacgaaa

SEQ ID NO: 140482 - DNA, 648 bp, Homo sapiens
ctaggggaccactgtcaggatgcggtcactggagtcactggggaccactgtcaggatgcggtcactggagtcaccggggaccactgtcaggatgcggtcactggagtcaccggggaccactgtcaggatgcggtcactggagtcactggggaccactgtcaggatgtggtcactggagtcactggagtcaccgatgaccacggggaccactgtcagatcactggggaccactgtcaggatgtggtcactggagtcactggagtcaccggggaccactgtcaggatgcggtcactggagtcaccggggaccactgtcaggatgcggtcactggagtcaccggggaccactgtcaggatgcggtcactggagtcaccggggaccactgtcaggatgcggtcactggagtcactggggaccactgtcaggatgtggtcactggagtcactggggaccactgtcaggatgtggtcactggagtcactggagtcaccggggaccactgtcaggatgtggtcactggagtcaccggggaccactgtcaggatgtggtcactggagtcactggggaccactgtcaggatgtggtcactggagtcactagagtcatttctgtgctgtggcattttaatgtcgttactttgagtcat

SEQ ID NO: 140483 - DNA, 957 bp, Homo sapiens
tcacagaagcattcggatggcctgcaaatctggatttttactgacttctcgctccaaactggctgatataactggttgacgaatactcgcacctgtagagtgagatacacgctggttggttgtggccgcttctatggactgcctagtctgcgtcagtgtactgcacagcgtggtatctgctgagatcccgcagtcgacctgtgtgacctgtcttctaggagactgttgttctcgtgaagatatgttctcgtcatgttgtttagtataagtctggtttccttcgttttcatctcggtccatgtcatatgcaactacccttttgcattgttttttgtttgtgcttctttttgtgggggggccggcggtcttgtagaatttgtgctgatgattgttggagatgccagtgctgcgttgctgtgcatgccacgctgtgagtgctagttgatggccatgcacgggctgcactggcagccctcgctgtgccctgggggtgcccggcaatgccttcccatatgttcgggatcctctagagtcgagccttaagcatgcggctgccgttagtgtgtcacgaggtggacctcggggagtccgcttagttgcttgtattgctatttcgtttcgtttggtaccgtcaatgagcacgtgtggtacggtccctgcactcttctttctccttgtctctgtcttgctttttgtcgcaccgggaaaactgtcgcaccggttgttggtacaccagggatctagtaggttgcctaacggggcttgcaaatgatcaagtcttcccacgcagtcccctccaacctctgccacgggtttgcatagttgaattcttagtcgccatctaaacctgatgctgcgaaactgccctgacctgcaggtagatgcccagccatggccctgcagccgtgcccataagatgctgtggatcatcaggacatgagccaccatcccggccat

SEQ ID NO: 140484 - DNA, 2063 bp, Homo sapiens
cgggagcggaccgtaagcccggcagcccgagaggaagatgaacagccccaggccagagcctctgcgagagtggaccccgagccgcccccaggtagccaggagcggcctcagcggcagccgcaaactccagtagccgcccgtgctgcccgtggctggggcggagggcagcccagagctggggaccaaggctccgcgccacctgcgggacagcctcacacctgaacgctgtcctcccgcagacgagaccggcgggcactgcaaagctgggactcgtctttgaaggaaaaaaaatagcgagtaagaaatccagcaccattcttcactgacccatcccgctgcacctcttgtttcccaagtttttgaaagctggcaactctgacctcggtgtccaaaaatcgacagccactgagaccggctttgagaagccgaagatttggcagtttccagactgagcaggaacaaggtgaaagcaggttggaggcgggtccaggacatctgagggctgagggctggggggtcgtgaggctgccaccgctcgtgccgctacagacccagccttgcactccaaggctgcgcaccgccagccactatcatgtccactcccggggtcaattcgtccgcctccttgagccccgaccggctgaacagcccagtgaccatcccggcggtgatgttcatcttcggggtggtgggcaacctggtggccatcgtggtgctgtgcaagtcgcgcaaggagcagaaggagacgaccttctacacgctggtatgtgggctggctgtcaccgacctgttgggcactttgttggtgagcccggtgaccatcgccacgtacatgaagggccaatggcccgggggccagccgctgtgcgagtacagcaccttcattctgctcttcttcagcctgtctggcctcagcatcatctgcgccatgagtgtcgagcgctacctggccatcaaccatgcctatttctacagccactacgtggacaagcgattggcgggcctcacgctctttgcagtctatgcgtccaacgtgctcttttgcgcgctgcccaacatgggtctcggtagctcgcggctgcagtacccagacacctggtgcttcatcgactggaccaccaacgtgacggcgcacgccgcctactcctacatgtacgcgggcttcagctccttcctcattctcgccaccgtcctctgcaacgtgcttgtgtgcggcgcgctgctccgcatgcaccgccagttcatgcgccgcacctcgctgggcaccgagcagcaccacgcggccgcggccgcctcggttgcctcccggggccaccccgctgcctccccagccttgccgcgcctcagcgactttcggcgccgccggagcttccgccgcatcgcgggcgccgagatccagatggtcatcttactcattgccacctccctggtggtgctcatctgctccatcccgctcgtggtgcgagtgttcgtcaaccagttatatcagccaagtttggagcgagaagtcagtaaaaatccagatttgcaggccatccgaattgcttctgtgaaccccatcctagacccctggatatatatcctcctgagaaagacagtgctcagtaaagcaatagagaagatcaaatgcctcttctgccgcattggcgggtcccgcagggagcgctccggacagcactgctcagacagtcaaaggacatcttctgccatgtcaggccactctcgctccttcatctcccgggagctgaaggagatcagcagtacatctcagaccctcctgccagacctctcactgccagacctcagtgaaaatggccttggaggcaggaatttgcttccaggtgtgcctggcatgggcctggcccaggaagacaccacctcactgaggactttgcgaatatcagagacctcagactcttcacagggtcaggactcagagagtgtcttactggtggatgaggctggtgggagcggcagggcttgggcctgcccctaaggggagctccctgcaagtcacatttcccagtgaaacactgaacttatcagaaaaatgtatataatag

SEQ ID NO: 140485 - DNA, 1196 bp, Homo sapiens
ttgctttctttcctcatattttgcgggaatccctccagccctttgctgcagctttacagcagctggttcccagtgaactggagttttaaatgtgtccctctggtcaatctgttcattaaataggtggactttagaaaggagttcccgattgctcttactgtgaatgcaagggatggagcagagaaccctgaggctgcactggggatctgtctaatctcactgtgctcagtcttcctgtgtattaaatggggagcctgcctgcctcccccagggtggtttcccagccaagtggccacatgctttctgcagaagggctgataagtgggctgccccgtggagtaggcaggctttggctcccagctagatttgaggtggaattttggacaatggaagaattttcattgtcttcttcccctgacccctggtcctaggaaagccaggccaccctgtgctaacccccctcctatggctcccttttaggttgaaccatgattccggtgacagagctccgctactttgcggacacgcagccagcataccggatcctgaagccgtggtgggatgtgttcacagactacatctctatcgtcatgctgatgattgccgtcttcggggggacgctgcaggtcacccaagacaagatgatctgcctgccttgtaagtgggtcaccaaggactcctgcaatgattcgttccggggctgggcagcccctggcccgtagcccacctaccccaactccaccattctgccgacccctgacacgggccccacaggcatcaagtatgacctggaccggcaccagtacaactacgtggacgctgtgtgctatgagaaccgactgcactggtttgccaagtacttcccctacctggtgcttctgcacacgctcatcttcctggcctgcagcaacttctggttcaaattcccgcgcaccagctcgaagctggagcactttgtgtctatcctgctgaagtgcttcgactcgccctggaccacgagggccctgtcggagacagtggtggaggagagcgaccccaagccggccttcagcaagatgaatgggtccatggacaaaaagtcatcgaccgtcagtgaggacgtggaggccaccgtgcccatgctgcagcggaccaagtcacggatcgagcagggtatcgtggaccgctcagagacgggcgtgctggacaagaagtag

SEQ ID NO: 140486 - DNA, 371 bp, Homo sapiens; identical to SEQ ID NO: 130532

SEQ ID NO: 140487 - DNA, 391 bp, Homo sapiens
ggctgaggaaggccagcactggggtgtgcagggttcgagaaagctcccagggcctgccttccttccctgagctcatatatttgtatccccttttcagactcctgaggaagaagagattttaaacaaaaaacgatctaaaaaaattcagaagaaatatgatgaaaggaaaaagaatgccaaaatcagcagtctcctggaggagcagttccagcagggcaagcttcttgcgtgcatcgcttcaaggccgggacagtgtggccgagcagatggctatgtgctagagggcaaagagttggagttctatcttaggaaaatcaaggcccgcaaaggcaaataaatccttgttttgtcttcacccatgtaataaaggtgtttattgttttgttcccac

SEQ ID NO: 140488 - DNA, 416 bp, Homo sapiens
ccgagcgatgggcatctctcgggacaactggcacaagcgccgcaaaaccgggggcaagagaaagccctaccacaagaagcggaagtatgagttggggcgcccagctgccaacaccaagattggcccccgccgcatccacacagtccgtgtgcggggaggttgtactcgtaaaacaaggatcatcgatgttgtctacaatgcatctaataacgagctggttcgtaccaagaccctggtgaagaattgcatcgtgctcatcgacagcacaccgtaccgacagtggtacgagtcccactatgcgctgcccctgggccgcaagaagggagccaagctgactcctgaggaagaagagattttaaacaaaaaacgatctaaaaaaattcagaagaaatatgatgaaaggaaaaagaatgccc

SEQ ID NO: 140489 - DNA, 437 bp, Homo sapiens
gtggaggaattctgcatactcccgagtgcgcggtggggaagccaaccttggagagctgagcgtgcgaccggcccggcgcgggggtctccgggagctggcgagtcgctagcaccgagtcacagtggctcaagcttccttccccgcttccacatgcaggcatctctcgggacaactggcacaagcgccgcaaaaccgggggcaagagaaagccctaccacaagaagcggaagtatgagttggggcgcccagctgccaacaccaagattggcccccgccgcatccacacagtccgtgtgcggggaggtaacaagaaataccgtgccctgaggttggacgtggggaatttctcctggggctcagagtgtgagtgaggccctttgggagtgggtgggaaaacgcacctaaacggtcttaagattcaccaagtgggcctggcg

SEQ ID NO: 140490 - DNA, 2027 bp, Homo sapiens
ggcctcgtgccactttccgtgggacagatgcgcgttctttcttgggctctgatttatctgaagaagggcctgggggtcctgtccccctttaactgtgggataagtaagtaccaaagagggaatgctccctcaggcccccaaacctggagcttatgatttcagagagaaggatactgtgtggggacttgagcttctggagagggtggcgcctcgcgtcatagtcagaagcctagtcttgttttttttacagaggcttaattttcagcatttggggtcaggctttcctcttggaggcaagtagggtgatgaaaaagaatccttaagcgtggttgtggccgtcttggtcacctgtgtgccacttgccaatgcaaggacttgtcatagttacactgactgttgcctcctcccggcccaggttcctctccctcacttgccttgctctccttggtaacctagttcctgtaaccttgtgttttccagattggcccccgccgcatccacacagtccgtgtgcggggaggtaacaagaaataccgtgccctgaggttggacgtggggaatttctcctggggctcagagtgtgagtgaggccctttgggagtgggtgggaaaacgcacctaaacggttttaagattcaccgtgcccgacctgctctgatctttctgaactctgcagcctgagagattggggctggtaaagactgcgggttgccaaacataactagaaacgtgggttagggggttgtggaagacgaactgatgccccatggcttgtaaaggctgagagttccctttatttctccctaagggcctcatggggctgaagaacctggaggagtgtgccagggccatttgtcctccagtttacttgatgccaaatttctcctgtgagcaggttgtactcgtaaaacaaggatcatcgatgttgtctacaatgcatctaataacgagctggttcgtaccaagaccctggtgaagaattgcatcgtgctcatcgacagcacaccgtaccgacagtggtacgagtcccactatgcgcttgccctgggccgcaagaagggagccaagctggtgcgtgttacttccctgtaggggttgtggggagggcagcctgactccagccttctcgtgatgaaaactctgtccagttctgctactgaagggagagagatgagagccttttaggctgaggaaggccagcactggggtgtgcagggttcgagaaagctcccagggcctgccttccttccctgagctcatatatttgtatccccttttcagactcctgaggaagaagagattttaaacaaaaaacgatctaaaaaaattcagaagaaatatgatgaaaggaaaaagaatgccaaaatcagcagtctcctggaggagcagttccagcagggcaagcttcttggtgagaaggctgatgagttggaggtggggagtcgcagagattgagtgtgccgaggcacttttcccttgactcagttcctttgactgccagccatgcagtctaaagggttcactgataacaggctgcgagcacaaaggggaacgtttggtcaccctattcgtatgaagctgaaatgggaagcattgggtagaagagtctgcataggcccgtgcttggagtctttgtatttggggaagtctctgcccaggctggagggggctgtctcagtgatgaaaactttgtccagttctgctactgacagtaagtgaagataaagtgtgtctgaggagacagctggcttcatgcttgcccccagggtacctgaacccacagagattcttaagcgggtggagaggtttgggtagggccaccttgtcgttgtgctaaggatcacctactctcttgcagcgtgcatcgcttcaaggccgggacagtgtggccgagcagatggctatgtgctagagggcaaagagttggagttctatcttaggaaaatcaaggcccgcaaaggcaaataaatccttgttttgtcttcacccatgtaataaaggtgtttattgttttgttcccacattaa

SEQ ID NO: 140491 - DNA, 843 bp, Homo sapiens
gtcacagtggctcaagcttccttccccgcttccacatgcaggcatctctcggtatcaactgggaccaggcgccgtaaaaaaccggggggccaagagaaagcccctaccacaagaagcgggaagtaatgaagttggggcgccccagctgcccaaacacccaaagattgggccccccgccggcatccaacacagtcccgtgtgccggggaggttaccaagaaatacccgtgcccctgaggttggaccgtggggaatttcttcctgggggctcagagtgttgtacctcgtaaaacaagggatcatcgattgttgtcttacaatgccatctaaataacggagctggtttcgtacccaagacccctgggtggaaagaattttgcatcgtggcttcatccgaccagcaacaaccgtaccgaccagtggttacgagttcccacttatgcgcctgccccctgggcccgcaaagaaagggagcccaagctggactccttgaggaaagaagagatttttaaacaaaaaaacgatcttaaaaaattgcggaaggaaatatgattgaaaaggaaaaagaattgccaaaattcagcagttcttcctgggagggagcagtttccagccaggggcaagctttcttgccgtgcattcggtttcaaggcccgggacagttgtgggccgagcaagatggcttttgtgcctaggaggggcaaaagagtttggagtttctatctttaggaaaatcaaaggcccgcaaagggcaaattaaatcctttgttttgtcttcacccatgtaattaaagggtggtttattgttttgttcccacaaaaaaaaaaaaaaagggcggccgct

SEQ ID NO: 140492 - DNA, 1522 bp, Homo sapiens
tcatgcctgctgtgggcactgcccataaaccccattgtcctctggctttgcgtgtgcatgagcaaactggacagagccggatgacaccaagacgatgtggagactgagtgttcccttagacagaagcccccagacacagaactgcactggagagccactgatgcccacagggagacaggagctaccccagaggggtccagagcccatggaagccccagccccagccaggccccagtcacgccgtgtgccagcagcaggtcctgtggccagacaaccccacatgcggcccccacactcaaagcagggggagaagcagaagatgccaggcagcaggtggccagggcagcgtggccgtgggaggtggggttccccgctagagtctgcgtaatagacacggaaaatctttaccggcatacccatcttgcccctcttgccaggaacgccaggcaggcctgctcctgaggaaggaatgcagtctgcagacaaaaacagggtgaagaggagagggggtacacagaggaactcagccctagcgctggagttctgcgaactgctgttcgtctcttcaaagtggttttgtgctttgccttctactctccgactgaaagcgctttctgctgcggttgccttgctcgccggagatcccgaatttggagtgcggaacgtctgggtttgggtggctggaggggtgcggtgtaagagggtggcacatcggaccacggaggccggagcttttttccccgactggttcgtctgggtcttcgctgccacgaagcgtggagatggggagacctctggatgtgaacactcagagcccgtgtctggatcatccggtggctccccaccccgggggcagtacctgccaggtatgtgaccttgaccaagggcctcagttttcccatttgccgaaagggtttctcctaagagacactgcaaatagcgttgccagactgctgccccaggcatcaatgtacttacaatgaggccggggactccaggggggcctggcaggcccagttctccccatttggtggtggggagaaggtgtccacatctgtctgcctcatagaactctaagctctctgaaggcaggggcaagataatctgataaaccgaataggttttctgggcatgtctgtgaaactgaacaacaacagcagcagctggaactgaattttcctgggagcccaggataggaactagactcccgccatagagccagatcttgtgtggagagagaggatgcaggattccactgggtaggcaccgactgtccagttgacccacttgtggtgctgatgcctaggcagcagggctgtggtcgggcttgaacaccatggcctgcgcccctctggagatccagctttccataagcaggtacagggcagccatgtttgttctccagtgaagcagcaactgccctgctccctggtgcccaggctggatgctacccagaatgcactttcagtgaggtgttagctacaaggccagactataaccttgagttcagcctttggagact

SEQ ID NO: 140493 - DNA, 606 bp, Homo sapiens
atgacgaaagaggaaacggccgcgcggggcgcgcagaccgcaggccagcggcacacccacacacgcgagacgcgaggagagcactacaggcagcacggagagaagcggcgacaagagcagcggcggccgcaaccgccagaggagcgcagacgaccaacgccgaggagacccgggaggagcaaacggaagcacgaggaagacgagcactcccaccgctgtggaacggaacacatcctggcgcattataacgaccctctgctcatgcgcgacagcccaggcacctgcgaacctagcaaagtcgagcatgaccacagcgccggatggacgtactttctatctctagacaaccgccgttacctaccgggaatggaagacatcctacgctgcttcatcaaagaaggcaatgctgaaatgatccgccagatagaattcatcatcaagcagctaaattccggtcagccaccgcgcgacccgtactaccccgccctgcccctcgtgacgggagccggcgctgatcgacgcgaccgcacgcgtcaactgagcgcgcagacgagcacgaggcggctgccatggatcgtcacctcacgctgtgcgccgtcaagatag

SEQ ID NO: 140494 - DNA, 1230 bp, Homo sapiens
agcggccgccctttttttttttttttttttcaaaatgaatgctttattttgaattttaaaaatacatacatcttacactgtaatcaaaacaaagcttaagaaagtcaattcccgcttcctttagccctgacttacactgggtacccgtttctgtggccgccgggggtgacgggcctttgcaggggctcatccccgctccactgcacattagccagccccttccgccttgtcttccccgtgttggtcatgaatccccaggttactctgtggtcaagaagcttctctcctgaagagttctcccaaagctggggcctggaatcagttcgtcctttgtccaagatcggctttcccatgatggtcatggtcctctttcatcatcttcatctttcatcatcatcagattcaagaacaccatctggtagctcttcggaatttagctgcttgatgatgaattctatctggcggatcatttcagcattgccttctttgatgaagcagcgtaggatgtcttccattcccattgctcttgcttcctcacgaatggatggaacagaaaggatgctgtacagagctccattcacatacggctgtatctcatggttttcatggccaagaagatccgaaaggactttgagcacgaggcctgccaccttggcacacatgttcttccctgtgctgcggaggcagaggttcatgagcaaagcctccgagtactccagcgtgtagtcagacaggcagtcagggtccttcagaacatcaaccagccagaagatgaggccgtcttgaatcatcgctgtctgcagcgggcgcctgagactgaacttctgcagggccccaagaacattctcccttttgattatatccttgtcctcctccttcagccttccctccagcatctgcagcacctttgtgttctgggcaaggtagaggcgaccttctgccagtgacgcaaaagcattgatgagcctggccatgtactgccgcaccacgtcgctcgtggagtgcagcacctgaagcacactcctctggttgtggctataacagctcaagaggtcattgctgatgtaggcttgcagaacggtctccctctgctctccaggatgggatgtggtcaagcgcccgcgcatagcctgcaactacaaggctttaagcgggccctcccccaacatcaagtcttcttcgtttctcataatccaggggtggagcaccgggaaattcttcgatttcggg

SEQ ID NO: 140495 - DNA, 332 bp, Homo sapiens
ttttgacagtggtgagtatatttcctggatgacccacagggaattaatgagaggccaagagcaattaacaaacatctaaaaattaagcagaaacactggagtcttcctggtggtttacaaagtagcccccgatccaggcaatgggcgagcagaaaatctgaagaacaaacccaggacttgctaaggtggctgaactccgaagacgggtgaacgctcagccaaggcaggtctgtcatgccaatgacaccagcccttatcactggctgccaggtagggtgaccaacagtcccagtttgctgagtgaattgcagtgctaaaagccggcgagtccc

SEQ ID NO: 140496 - DNA, 1288 bp, Homo sapiens
  misc_feature (1)...(1288): n = a,t,c or g
ccggagttagcggcaacgaccttgcagcctggacactagccaggcgctccctcttctcacagcggcccacgtctccttgcttgggagcccatcgtcctggctccggtggcctcgctgggtctcggggaagcagaggactgttcattcctgtggcgaaaagccggagtcggccctagacacccacgactcgcagggtccatggttccggaggccgtgagacctgccggggctgacaggtaaagaagctaagtggaagagtgtttcctcctctggccgtaaagcaggtactctctgcagcaccagctgtccccgccctactccggaccgccccaaagactccatgggatggacctgagtcagccgaatcccagccccttcccttgggcctgctgtggtgctggacatcagtgacagacggaagcaggagaccatcaaggctacgggaggcccggggcgcttgcgaagatgaagtttggctgcctctccttccggcagccttatgctggctttgtcttaaatggaatcaagactgtggagacgcgctggcgtcccctgctgagcagccagcggaactgtaccatcgccgtccacattgctcacagggactgggaaggcgatgcctggcgggagctgctggtggagagactcgggatgactcctgctcagattcaggccttgctcaggaaaggggaaaagtttggtcgaggagtgatagcgggactcgttgacattggggaaactttncaatgccccgaagacttaactcccgatgaggttgtggaactagaaaatcaagctgtactgaccaacctgaagcagaagtacctgactgtgatttcaaaccccaggtggttactggagcccatacctaggaaaggaggcaaggatgtattccaggtagacatcccagagcacctgatccctttggggcatgaagtgtgacaagtgtgggctcctgaaaggaatgttccagagaaaccagctaaatcatgacaccttcaatttgccatcatgacgcagacctgtatacattaggttaaatctgaatttccactgctttggagagtcccacccactaagcactgtgcatgtaaacaggttcctttgctcagatgaaggaagtagggggtggggctttccttgtgtgatgcctccttaggcacacaggcaatgtctcaagtactttgaccttagggtagaaggcaaagctgccagtaaatgtctcagcattgctgctaattttggtcctgctagtttctggattgtacaaataaatgtgttgtagatg

SEQ ID NO: 140497 - DNA, 3287 bp, Homo sapiens
  misc_feature (1)...(3287): n = a,t,c or g
acttgccacaaggagacgctgttcagtttaccggatcctgtcccgcgccagccaaccaggacaaggccggggagctcgagacaggcagcctagaccaagaaccggaaggaggaaaaggaaccggagggaggaagaggaggggcgggacgagaccaccaggcaagagtccaaactttcccgcggcgacctaactgcacctccagtgtcttcccccagagggcacagaagcagcaagaagggcgggaacacttgactggggtccatgcagctctaggctgagtcttgcagggctgagccccccaggcctgctctcctgtgtcctggccgctccgtcagtgcctgccagtggggtccagagggaccgtttttttaacgcctcttttgcagtctcccgcattgacttcataaccaagttctgggtccctgcctctggagtgcctgatgagacaaaacggctcctcgtcctgcatccccgctgctacttccagaattcaggcctcgtggtctggagcctgcactgttccatgagcctcctgagcaacctggagtcctctgtctttcttccctcagtgagatgcgcctacttctccctggagaagcttgaggaagcagaaatgctggagatgagacggagttttgctcttgttgcccaggctggtgcaatctcggctcaccactacctctgccttctgggctcaagcgattctccttcctcagcctcctgagtgctgggattacagagacctcgtccgcacaggggcttgttcttctgtgtctttgcagggctgttttggactcagtattcacctaagcactccaaattacccagcacaccctgcctgcatggcgctgcgctgcaccttcactctggtcacgggtctggcagtcagctcaccaattcctcctgcttccctgggacttgccggcttttagcactgcaattcactcagcaaactgggactgttggtcaccctacctggcagccagtgataaggtgagggccactcctgggagggaggacacctgtggggaaaattcttgtgttatttatttctccttcgggatagggtgcctgcagcgcttcatgggagggggtgggctgatgctgcgggctcagaagtttcaagggcatctggggagaccagatattcagagaccttctagatgtgcctgttccatgtatcagggacgcaggttttcccaacagggctggtgtcattggcatgacagacctgccttggctgagcgttcacctgtctttggagttcagccaccttagcaagtcctgggtttgttcttcagactttgctgctcgcccattgcctggatcgggggctactttgtaaaccaccaggaagactccagtgtttctggttaatttttagatgtttgttaattgctcttggtctctcattaatcccctgtgggtcatccaggaaacatactcaccactgtctgttctctgagttttcatttccaggcatccgccctgcctggatctcctcacctgccaggaacttcctctccacaagccggccatcccagcaaaagttctaacaccaaaggtctggcaactagcctgccatcttgtgcctggagccgcctgcgtgccacctactcccgaagatgggaaccttgttgccagttgggcagatgcggggcaatcctgtaccaagaccccattttaccacctgctttctcagaccactctggaacccactgtctcagattgtgtcctccaggaagcagaccatgagagggagttggcagggccaaagatttactggggctaactaacactcaggaaagggataggaaggaaacagggctggagagcaggttgagcccgacctgacagtctcgagcagcccaacagggaggtgtggagcaagggttgcccactagaggggcctgcattgggtacgggtgatggggtccacatggtacctggcatatagcaggctgtgcaatccatattaactgactggataaattaatgcccagaaaaggtgccctggagaatgggtgtgtgctgaacacaatagggaagggcccagcatctgccttggcataggcagaactgtgctgtgccctgcaacaggccacctgagagctgctttgatcttgtgtgtacattagatgactgccaggggcatgaaggggatgtgcttccagggcatttgctggcagggcgtctcgtgatctcttggtattggtgtgagcacagcctggcaggagagggcagatctccatgcaaagtatgtcagaaagcagatggaagccaggccccctcctgaaagaggctccttgaagagacagagaagagtccatgagaatcaacattttctgaggactccaactgtgtgccaagagagttcccctgctggtgcctcctctgtagtaaaggaaaggctcctgggaccacattatcattctcttcactcgagagatgaggacactgaaattcagagaggggaagtgatttgcctcagcttgtactaaagaaacatttcaacagagaacccagtggaaattatgacatgttatcttctcagagtcctgaactcccatccctacctcagaagagactcctctgttcacagaagctaaaggcagttccttcccaatggcaactatgtttggatgttggatctacactttctcaagcactgtgatcttcaaattttttcaggaagaaagagagaatcagcaacatggcattgaaggtacccgttgacagtgacgtgcatcacagcattaacaggagaaatgcttgtgtgtgcaaatgggagacaaaggaaagggaccaccacatccatggagtgcaccgcgtgagagaaatgctcaggaagggaattgaccagattggctgtggagagaaaagagaaggaacatgggaggcagagctgagcaaccaggctttcactgctgaatgtctgagccagctccatcgtacaacaggagtgagggaagtacctgcttcacaaggttgtcatagccatcaaatgggatcacactctaaaggcagttctggaggccagaaatcagaaatcaaggtgtcagcagttccaagctccctgcgaaggctctaggggataatccttccttgcttcttccagcttctggtggatccaggtgttcctttggcttgtggccgtatcactccaacctctggctccatcttcacccttacctacttccctgtgtatcttgaatctcctgccactctcttataatgacacgtcattggatttagtgcctatttggnnnnnnnnnnnnnnnnnnnn

SEQ ID NO: 140498 - DNA, 808 bp, Homo sapiens
tcgtcctgcttccctgggactcgccggcttttagcactgcaattcactcagcaaactgggactgttggtcaccctacctggcagccagtgataaggtgagggccactcctgggagggaggacacctgtggggaaaattcttgtgttatttatttctccttcgggatagggtgcctgcagcgcttcatgggagggggtgggctgatgctgcgggctcagaagtttcaagggcatctggggagaccagatattcagagaccttctcctagatgtgcctgttccatgtatcagggacacaggttttcccaacagggctggtgtcattggcatgacagacctgccttggctgagcgttcacccgtcttcggagttcagccaccttagcaagtcctgggtttgttcttcagattttgctgctcgcccattgcctggatcgggggctactttgtaaaccaccaggaagactccagtgtttctgcttaatttttagatgtttgttaattgctcttggcctctcattaatcccctgtgggtcatccaggaaatatactcaccactgtctgttctctgagttttcatttccaggcatccgccctgcctggatctcctcacctgccaggaacttcctctccacaagccggccatcccagcaaaagttctaacaccaaaggtctggcaactagcctgccatcttgtgcctggagccgcctgcgtgccacctactcccgaagatgggaaccttgttgccagttgggcagatgcggggcaatcctgtaccaagaccccattttaccacctgctttctcaaa

SEQ ID NO: 140499 - DNA, 411 bp, Homo sapiens
tggggtggagctgtgggcggtgctgtaagaggagaagttggggacggacttgcaggaggaaaagctaggggtggagctgtgggtggagttgggggagggagctgaggcccttctgtgatgcacccttaggcaagagtccaaactttcccgcggcgatctaactgcacctccagtgtcttcccccagagggcacagaagcagcaagaagggcgggaacacttgactggggtccatgcagctctaggctgagtcttgcagggctgagccccccaggcctgctctcctgtgtcctggccgctccgtcagtgcctgccagtggggtccagagggaccgtttttttaacgcctcttttgcagtctcccgcattgacttcataaccaagttctgggtccctgcctctggagtgcctg

SEQ ID NO: 140500 - DNA, 383 bp, Homo sapiens
aatacaggtctgggaagggggaaagcgatgacaccctctatgagctgcaggatcagcatgctcctgcagcggccagggggggtccttgtgggatgggacccggatgcagctcacccagtggggacttgaaggcactctgttgctcaacacaactgaatgccctggtagggagccgaagggatggggcaaccctgttgatggcatgggatgggcaccagtgatggtccaggcttgagtgacagtgaaaggcccgaattgtcacagcagacagtgaaggaagggtttcaaaggctaagcaaagtgagcttgctggacctggacagaagaggtgaggccagaagccacccaaaggatacaggtttcaggagaggacccagaggaca

SEQ ID NO: 140501 - DNA, 587 bp, Homo sapiens
cgacgatttcgtgcgggaggcacgtactcagccatgcatatagacagcaaacattatgaatctcgcattctcgaagacacgcactgacgacatcacgcacgtacgcacgccctggctgctaggagacgctattctctttacctggccctgatgcgcgccagccaaccaggccaaggccaggggacctcgagaccggcagcctcgacgaagaaccggaaggaggaaaaggaacgggagggaggaagatctcccgcattgacttcataaccaagttctgggtccctgcctctggagtgcctgatgagacaaaacggctcctcgtcctgcatccccgctgctacttccagaattcaggcctcgtggtctggagcctgcactgttccatgagcctcctgagcaacctggagtcctctgtctttcttccctcagagagatgcgcctacttctccctggagaagctcgaggaagcaggaatgctggagatgagctgctcctcactctcactcctgggtgtgctgggcagtggggtgcaatgtgcacgtaggtgcacactctccctgggcggcagcgagaagcagaggtctgat

SEQ ID NO: 140502 - DNA, 617 bp, Homo sapiens
tttcgtgacgggagctgtatgaaagcggaagagttatagaccgctaacacctgtcactggccactggtttcccggagttagcggcaacgaccttgcagcctggacactagccaggcgctccctcttctcacagcggcccacgtctccttgcttgggagcccatcgtcctggctccggtggcctcgctgggtctcggggaagcagaggactgttcattcctggggcgaaaagccggagtcggccctagacacccacgactcgcagggtccatggttccggaagccgtgagacctgccggggctgacaggagccaaggcccatgctgcgagagcctgtgtgctcagccttcttgcggacggtaaagaagctaagtggaagagtgtttcctcctctggccgtaaagcaggtactctctgcagcaccagctgtccccgccctactccggaccgccccaaagactccatgggatggacctgagtcagccgaatcccaacccccttcccttgggcctgctgtggtgctggacatcagtgacagacggaagcaggagaccatcaaggctacgggaggcccggggcgcttgcgaagataaagttggctgcctttccttccggagc

SEQ ID NO: 140503 - DNA, 3328 bp, Homo sapiens
acggcctccggaaccatggaccctgcgagtcgtgggtgtctagggccgactccggcttttcgccacaggaatgaacagtcctctgcttccccgagacccagcgaggccaccggagccaggacgatgggctcccaagcaagcgccctggctgctaggagacgctattctctttacctggccctgatgcgcgccagccaaccaggccaaggccaggggacctcgagaccggcagcctcgacgaagaaccggaaggaggaaaaggaatgtctacccccatagggcacggaagcagcaagaagggcgggaacacttgactggggtctatgcagctctaggctgagtcttgcagggctgagccccccaggcctgctctcctgtgtcctagccgctctgtcagtgcctgccagtggggtccggaggaaccgtctctttacctccccttatctagtctcccgcattgacttcataaccaagttctgggtccctgcctctggagtgcctgatgagacaaaacggctcctcgtcctgcatccccgctgctacttccagaattcaggcctcgtggtctggagcctgcactgttccatgagcctcctgagcaacctggagtcctctgtcttgttttttctagtgagatgcgcctacttctccctggagaagctcgaggaagcaggtcctatgcatgctagcatcccctcctgggttccttccccacaagaatggttgccagcttctgccgaacaccccagaacctgcttagagtggtttcaaatcatgaatggggtgtgctgggcagtggggtgcaatgtgcacgtaggtgcacactctccctgggcggcagcgagaagcagaggtctgatctgtggtcggatgaggagaggaagtgcaagtctttttgtatttcagagacctcgtctgctcaggggcttgttcttacatcttttgcagggctgttttgaagtcagtattcactttgtccgccttttagctttacttttctgccctggactcacacagggtcatgtgaacgtgtggtgtagcaggaggagagaggtaaagtggaggaataggagctggaagggaggaggagggaagaaaaaaggagggggagggggaggagagggagtgggttggaggagggaaggaggaggagaaggagaggaggaggagatgagaccaaggacaagaggtgaaggaagagaggaggacacagaaaagagaagaaagaggagaggaggagacggagaagaggaggaggagcagcaaagaaggaagaagaggaagatcggctccctaccagggcattcagttgtgttgagcagcagagtgcctccaagtccccactggttgagctgcatccgggtcccatcccacagggaccccccctggccgctgcaggtgcatgctgatcctgcagctcctcgagggtgtcatcgctttcccccttcccagacccagcacaccctgcctgcatggcgctgcgctgcaccttcactctggtcacgggtctggcagtcggctcaccaattcgtcctgcttccctgggactcgccggcttttagcactgcaattcactcagcaaactgggactgttggtcaccctacctgctcctcacctgccaggaacttcctctccacaagccggccatcccagcaaaagttctaacaccaaaggtctggcaactagcctgccatcttgtgcctggagccgcctgcgtgccacctactttcgaagatgtttaaccttgttgccagttgggcagaggcggggcagtcctgtaccaagaccccattttaccacctgctttctcagaccactctggaacccactgtctcagattgtgtcctccaggaagcagaccatgagagggagttggcagggccaaagatttactggggctaactaacactcaggaaagggataggaaggaaacagggctggagagcaggttgagcccgacctgacagtctcgagcagcccaacagggaggtgtggagcaagggttgcccactataggggcctgcattgtgtactgctgatggggtccacatggtacctggcatatagcaggctgcgcaatccatattaactgactggataaattaatgctcagaaaaggtgccctggagaatgggtgcgtgctgaacacaatatggaagggcccagcatctgccttgtcataggcagaactgtgctgtgccctgcaacatgccacctgagagctgctttgatcttgtgtgtacattacatgactgccaggggcatgaaggggatgtgcttccagggcatttgctggcagggcgtctcgtgatctcttggtattggtgtgagcacagcctggcaggagagggcagatctccatgcaaagtatgtcagaaagcagatggaagccaggccccctcctgaaagaggctccttgaagataattctaacatctttgtcatcagtgttgacatctcttgattgtatcctgtcattccatttgagatcttcctgggttctggctggcatcctctgacatcactccagcagaagaaagggaaggaacacgctgcattactgcgtggctgggaacccctgaatgcctgtagtgtcacccactgcccctgtccctgtacccaccctatcttttcacctcatttccctcccaagcctcaggttttcagtttggggtatgtgccaccctaacaagtgagctgtggaactgcagcacaatcatcaaattcaaaaaaggcaaggacatcttgctcagtttttaagatacgcccatagatgggagtaaaccaaaacctttgattccagatcctttaaccctggatttaaaaacaacacaacccttcatgttgatttaaaacatcccttgcaaaagatggtttgaatattccaagttggaaatacccagtcttttaaagttacagcaccctttttgatacaaaaaatgtgcatgacagaaattgtacagtgagtagtgttataaaaataaccaaacacaccaaaagctgccacgggtaaatttgagaaagtgttgaaatgtaccgcacagcatgagaccttgctggctccgtctaatagatgacgctggggctgcaaatgatgtcccagccttccagggcctgtggtctccagaacagggctgaaacctgttctgagttgacagtgctttcccaaggagaccccaagttgagaggaccctcttacccactcatcaataatcaaagcagacttgatgcccatcagagatgcccaatgattctggtgagccgttcctccctctggctgtcagtactggggagtatggtggggactttcagatagctcagtggagct

SEQ ID NO: 140504 - DNA, 1208 bp, Homo sapiens
atggagagaggacgactgctggccagcggacccctgtttgtgcccgcgccaggtgccaaggatgaggatgacggaatttatttttcttttgaatattacagtttggtctgcttcatgtctgaggccttccgattctggcacagtcccattgatctgatgcaaagttcagacccattctctcctgagctgtggttcttggggatcggccggccaccttctccctgtgacttcctccagtcccgtcaccaaacccctgaggccgtcctggcatcagaccgcaggcctaaaagcgtccagcagagggcgccccaaacccacgagggccgcggcgaaaagaaggcaggtccggtgcgaagggatcgctggacactggcgatggtggagaggcatggtgggccgggtccccgcacccttcatggccctgactcggggctgcccgtgaccttcagcgcagagctcggtctggtccatgcctgccttggggaagctgcgccgcctctcacccacccagccacaacaaatccaaagaaggaaggaatcaaaggctcaggacagtcattagcaggtaacgatgtttcagtccgtgatggacagtatatacaacagtgtccccctttggcaaccagtaacctgctgttcgtcttaggaatgtgccagttctggacacatataaatgaagccacgcacctgactccgggtggaacctgcgtgcctgaggttcctctcaggatcagcgtctccaccgtcgacattcttatgagaatacgggtgggtcagcgccgggtaaaggtgctgacccagcagattgtggcacaggctgaaagcaaaccagttcagggtaccaattacgactacgtgcgtgagtttaaaagaagcacaggaacctggcaccacgctaaaccactccttccatccgaccttcgccgtacaggatgtgcagccttacgcattgcgaattgcaagcttttccgcctgcagcttcagcaaggcttattccgtattcgtgttcattccccttgaggaggaagcagagcagagtgcgagatcctgacccaagagcaccataacatagctccgaaagggagagcagagatggcagctgaaactcactctgtgctgggctttggtatggtaactctttggtggttttatgatgcttacaaacttgagctttagctccttgtttgggagaacacgtaactgttgaa

SEQ ID NO: 140505 - DNA, 784 bp, Homo sapiens
tgttgaggggcaggtggcactgtttgcaggaggctttatgggatgaggtctctgaggtttgaggactgaattggagcctcttaaagctccactccgccaaatgcagttgactacctttagccctgtccaaccccaagcaggaggtggtgtctgggagaggcggccaggttgacagccaggcagggctaaccatgacaggaagggcggtgtgctgcctgcagctctgcctgaatgctagcggggccggggatgctgaggccatgtctgcaggaccacctgggcctgggcccgctagagcagacaccgagcagctgccctccccatctctcccccaggtgtcctgacactggcgggggtcagcatctacatcagctactcgcacctggcctttgcggagacggtgcagcagtatggcccgcagcacatgcagggcgtccgcgtcagcttcggctggtccatggccctggcctggggctcctgtgccttggaggcattcagcggaaccctcctgctctcagctgcctggaccctcagcctgagccccccaatctgtggtcatctgagtccccagcagaccttggatgttgaaagtgaatacagtgcactgtcctcacaacggggaaaaggaggagaacggtatgcgggatcccctgtactagccttacaacttcctgtgaattttcatttcaaaataaaaggttacaatgtacagagaggatctatgaaagccttggggaggcaggtgtcagctccatatgacagcctttctgacaaagctgtctga

SEQ ID NO: 140506 - DNA, 612 bp, Homo sapiens
cttcatcattatggtgtggtattggaggaggatcatcatgatgtcctgacccccagtgcttctggaaaaagtcatctttgcccttgggatttccatgacctttatcaatatcccagtggaatggttttccatcgggtttgactggacctggatgctgctgtttggtgacatccgacagggcatcttctatgcgatgcttctgtccttctggatcatcttctgtggcgagcacatgatggatcagcacgagcggaaccacatcgcagggtattggaagcaagtcggacccattgccgttggctccttctgcctcttcatatttgacatgtgtgagagaggggtacaactcacgaatcccttctacagtatctggactacagacattggaacagagctggccatggccttcatcatcgtggctggaatctgcctctgcctctacttcctgtttctatgcttcatggtatttcaggtgtttcggaacatcagtgggaagcagtccagcctgccagctatgagcaaagtccggcggctacactatgaggggctaatttttaggttcaagttcctcatgcttatcaccttggcctgcgctgccatgactgtcatctt

SEQ ID NO: 140507 - DNA, 1579 bp, Homo sapiens
tcaaatatgaagaggcagaaggagccaacggcaatgggtccgacttgcttccaataccctgcgatgtggttccgctcgtgctgatccttcaatccctcttgaaatatgatttggtgtctgtgcaaactgaggagaccgggaaggtctgtatttcagagtaataggggttactaggccacctggacacattgccagctggaaagagccaggcccacattctctgatggttaacctgtattccatcatgtgctcgccacagaagatgatccagaaggacagaagcatcgcatagaagatgccctgtcggatgtcaccaaacagcagcatccaggtccagtcaaacccgatggaaaaccattccactgggatattgataaaggtcatggaaatcccaagggcaaagatgactttttccagaagcactgggggtcgggacatcatggtgatcctcctccaataccacaccataatgatgaagatgctgggcgtaaggaaggtcttcatggcaaaccacaccttggtgaagcctccattttggtggatccccaccaacccggatatccttatcctccccaaattccccacattgaattttcttcttctcattcacaggcagccggatgtttaaaaggtaaaacttatggccaacagacccaaatttccatgaaaggaaggacatcacattcatagtaaccggccctccatgctctggagtcttgggagatgtgaaggtgcatttgagtttccgtggtactctttcatgggccatttcagtccactcagcaaacgcgtcatcacggtaagccagggaaacgtcccatggagacttcctgcattttcccctgatttggttgtttagcttgaaaggcaatgtcccagctgccaggataaacatcatgaattggaaccaaggactcatctcccatgtgggggaggggaatgtgaacagaaaacacgatgtcattggcttcaatttcccttggaattgcctcttcaatgtctcggatcttgtcacaatgattgggtccccaaggcaacggaaccattttggtcttgtgatggttcttacgggcatccacacatttcaccgacatgtaggacactgccgttgtgggccctggagcaatcaagcctcccaccagaaaggcgatgatttggaacacgagcagaatcccaccaacaatgcacagcttcttggtgctcatgttttctataattgccccaggccatttttgcgccccccctttttcttttctccttgaaataaatgttttaggggtgagctttttgctccctcctctcaccacagcccctccttcctcgcctcctttttgggcgctgcaaaacttcagaggtgctggagcgcggcgaggatgggaccgggacggaaggcgcccgcacggattcccccggcgcagccggctcgggttcccccaatgcccggagctgtgattgtggccgctccgccgcctgtggacgctcctattgtaaggatttgtgtacacgtttgtctccaccactgagctgtaaactcctggggaatagggaccaagttttttttgttctttgtaccccccat

SEQ ID NO: 140508 - DNA, 330 bp, Homo sapiens
ttcatgcagcaggtcagggacagctctcggagtaccggtgctggctgggcccgtacgatcagcgcttacgtatctgcctgctcactcagcggggcagaggcaccagcacgatgccggcccgactcggggtctgggggctatctaagatctccctccagttgtcactccaggagagcagccgtctccttgtcgggggcaggaccaggtgccgattgtggcagcaggtgaacaagatgtgctcccagcttggggtctcctcctggcctcgaactgtgtccttgtcatcaatgagcagtcccccaagaccaccgtcttgtcccttgtcaggat

SEQ ID NO: 140509 - DNA, 969 bp, Homo sapiens; identical to SEQ ID NO: 129377

SEQ ID NO: 140510 - DNA, 751 bp, Homo sapiens
tttttttttttttttttttagaaagccaaagtcttttattaaaggtcccgactggttttcccactgtatttccatgccagccagggtccagggacagcctctcgggaggtaccgggtggctgggcctggggcccggtagcacagcgcattaacggtatctgcctgctccactccacggggccagaggcaccaagcacgatgccgcccccgactcggctctgcggtggcccctgtgggcctgcccttccttttagctcccagcttgctgcccgcgggmatccccgctcattacccgctgcgcagctccgcgctttgctatctaagatctcccctccagttgtcactcccagagagcagccgtctccttgtcgggggcaggaccagggtgccgattgtggcaagcaggtgaacaagatgtgctcccaagcttgggggtctcctcctggcctcgaactgtgtccttgtcatcaatgagcaggtcccccaagaccaccgtcttgtcccttgtcaggataattcgttctacgaactggggccccaggtgctgctccacccagcggtactgtgtagaaagactcagtctgtgagtagggcctgatggaagccggaattcagggatagggagttggctctaagcccttgagagccccccacccccaccttctgggtttctggtggtttctttttaaaatcaggatttaggcagctccacgtgcggagtaggggcggggcagccacaccttctcaccca

SEQ ID NO: 140511 - DNA, 578 bp, Homo sapiens
  misc_feature (1)...(578): n = a,t,c or g
cacgaggatgcagcatccagctttcaagcagatgtgtccctaggcaatgatgcagcagtgcccctatcaggaagagggggtatcaacacttacattcctttaatcattcctggcttcccttaccctactgcagccaccacggcagccgctttcagaggagcccatttgaggggcagagggcggacagtatatggtgcagtccgagcggtacctccaacagccatccccgcctatccnaggggtggatatgcagcctacagatatgcacagcctgntactgcaaccgcagccaccgctgctgcagccgctgcagccgcttacagtgacggttatggcagggtgtacacagccgacccctaccatgcccttgcccctgccgctagctatggagttggcgctgtggcgagtttataccgaggtggctacagccgatttgccccctactgaagtgacgtgagacccctgcaaatgggacagccccccagttcatgaggcctggctattgcaatatttactagtagaggaactctatagcaagatgaagaggaaaaacaaacaaacaaacaaaaaaaaaaaaa

SEQ ID NO: 140512 - DNA, 1857 bp, Homo sapiens; identical to SEQ ID NO: 138204

SEQ ID NO: 140513 - DNA, 396 bp, Homo sapiens
atggacgatatcccgcaagaggcccggcagtaccggcataaccaagcctatgcctacagcatccagggtgacggtgccgaggatgacgatgagcgcattgttagatttcatacacgcggccggcaacgcagcaatctgtcggcggtggtcgcggcccccgggccctctcacggcaaccagctgcgggcctcccggggcaaaagcccatgggccaccaccatggccctcaagatggtgaagggcatcatcgactgcatgttcgacaagaacctgcaggacttggtccgcggctttctaaaccacacggaggatgagattgaagaagatggggatagtgaccaccaagcatctgtcttcattgatgctcatgcagcccttcggcagtggaagccttag

SEQ ID NO: 140514 - DNA, 2158 bp, Homo sapiens
gtcgccacctctgtcacggtcctcaaaccctgccaccgccctggcctaggagcctgccccaccgcagcggccggcaacgcagcaatctgccggcggtggtcgcggcccccgggccctctcacggcaaccagctgcgggcctcccggggcaaaagcccatgggccacgaccatctttatggcccggaaggtcattattcaggtgttcacttctgattccggatgttctctgcagctgctggagtttcctgattggagaacagcaaatgactgttcaatgaccattctagtggtggggataactttaattattttaaagtaattgtgtatatttttcattctttatttctttgcttagcagacagaaggtggagcacagacagacggccagcagtcacagacacaaagtagtgaaaattcagagagtaaatctaccccagaagataacaaaatatgtggataaaaacctgaccataagtaaacgtttttattttaccaagagatcagtatttcaatataacgatgtgcatgttttccccccttctcccgctgcatgcagggattcgggttcgtaactttcgagaagtgcaactttatgttccctaatgtggtccacttcttccctgcccttttttctccttgttatgacatgcactgatcatccctttcctcaaacagtcttaaatgcttaccttccattgttgtgactgtgcaccttctattgaatgcaagttgaaatttctgtcatattttgggtctccctttagttcctggcttcccttaccctactgcagccaccacggcagccgctttcagaggagcccatttgagggtttttgtatgattgttttccttccacagctgtgttttttgaacggtgtgtgtttttctgtacacctggggggagaggtatctgtaaagtcagttctcttctctcctgtagggtggatatgcagcctacagattaatccctttaatttttttagatcatacacttttctttatctgtctgattgtgtttcttctttccagttatggagtccaaatctttgcaaggctcaaaatgccacagaacctctcctcttctccccactccccatggcacacgtccttgcccggcctcgtcttatctcctaaactggtctccttgcctccaccttttctccgacagctctccatcgccgaagtttgttctctcgacagcctgttcaatcggattgtgacgtgcttttgtgcaaacttctttggctcaaggccctgtacaatgtgctcccctggtagtttatttggtgtctgtctttctgtactaaaatgcaggcacctggaggtcaaagactttgttctgttggctgctgtatctccatttgcctggtgcattgtaagcattcagtacctatttgttgaattactgctttccattttggatgtaaatgatgcacttttcagccctgccttcctccacattgccacccctagtaacaacagtggaaaaatacaaaaattagctgggcatggtggaatgctttctgagcctggatccgcgggtctcgcacagtttcacacaggtggaatgctttctgagcctggatccgcgggtctcgcacagtttcacacaggtggaatgctttctgagcctggatccgcgggtctcgcacagtttcagacaggtggaatgctttctgagcctggatccgtgggtctcgcacagtttcagacaggtggaatgctttctgagcctggatccgtgggtctcgcacagtttcacacaggtggaatgctttctgagcctggatccgtgggtcttgcacagtttcacacaggtggaatgttttctgagcctggatccacgggtcttgcacagtttcacacaggtggcaagttttctgagcctggatccgtgggtcttgcacagtttcacacaggtggaatgttttctgagcctggatccacgggtcttgcacagtttcacacaggtggcaagttttctgagcctggatccgtgggtcttgcacagtttcacacaggtggaatgttttctgagcctggatctcttgaatgctttggaccaggggtcaacccgctgtttctgaatgtcaccagatggtaaatattttaggttgcacaggcctttcggtctctgtcacagcttctcaacttggc

SEQ ID NO: 140515 - DNA, 1252 bp, Homo sapiens
gcggccgcgcacatggggaggcggcggccgacggtggcggcgggatgcagaacgagcctctgactccaggttatcatggattcccagcgcgggacagccagggtaaccaggagccgacaacaactcctgacgcaatggttcagccttttactaccatcccatttccaccacctccgtagaatggaattcccacagagtatggggtgccacacactcaagactatgccggccagaccggtcgagcataacctgacactctacggaagtacgcaagcccacggggagcagagcaggcaactcacccagcacacaaaatggatctcttacgcagacagaaggtggagcacagacatgacggccagcagtcacagacacaaagtagtgaaaattcagagagtaaatcttacccccgaaacggcttgcatgtctcttattatttcctttccggtttccgggacccttgacttccggcagatgtttggggcagtttggcaaaatcctcgatgtgggaataatctttaattaacgtggctctaaggtgaataatgctacagcacgtgtaatgaccaataagaagatggtcacaccatatgcaaatggttggaaattaagcccagtagttggagctgtatatggtccggagttatatgcagcatccagcttatcaagcagatgtgtccctaggcaatgatgcagcagtgcccctatcaggaagagggggtatcaacacttacattcctttaatcattcctggcttcccttaccctactgcagccaccacggcagccgctttcagaggagcccatttgaggggcagagggcggacagtatatggtgcagtccgagcggtacctccaacagccatccccgcctatccaggtgtggtttaccagggacggattttacggtgctgacctctatggtggatatgcagcctacagatatgcacagcctgctactgcaaccgcagccaccgctgctgcagccgctgcagccgcttacagtgacggttatggcagggtgtacacagccgacccctaccatgcccttgcccctgccgctagctatggagttggcgctgtggcgagtttataccgaggtggctacagccgatttgccccctactgaagtgacagtgaaacccctgcaaatgggacagccccccagttcatgaggcctggttattgcaatatttactagtagaggaactctatagcaagatgaagaggaaaaacaaacaaacaaacaaaaa

SEQ ID NO: 140516 - DNA, 1635 bp, Homo sapiens
atggtgcaaatgaaggatgtgggcctccggagcccgtcgtggccacgagctcttgggccgtgcaatgctgtggtccaggatgggaaggctgtgcgtcgtgatgcgcctgtccccctgagacctcgccttctgtgccaacaacatcaccatcctcaggcatcctgccgggattcgagtcctaccttggacaggcgccgtatctgtaggccgcttccctgtctgtgcaatggcgagagtacagtgtatgagatgccatggcaccgcactaagtcagtgtgtcttcgtgtgtctgagtcagctcaggctgaccacaacgccccacagactgggcggcttacacgggacgttggtcatccccaccagtgtgtcagtgtcctcatctccttaaaggacaccagtcctactaggagggctctgcaccacatcttcacctgcagcttccgtgtctgtacccccagcctctcctttcctcgtctgcatcccagcacctgtgacaacaaagggcttgtaagaagtgctgagggacagcagcacgctggtcacattcttctcgccttgcctttcccacgtaacaacaccccctggagacggtgccacggcagctcccagagacgctccctgcacctgactgcagccacatgtcctcgctgcaaggctgttacgcggcacacactgcaggctcctactgtgccacgaggtctccggcagaggggcttgcgggtgcaaggaaacccacaggcccacacctgcaatgctggtgtgggtgtggaggggcagctgcttgtttcctgctcctccccgagcatcaaagcacgcgggtggcacagcagggagagtaaccaagagcagtcccaccccctggggggcagtgcagctgtgaatgccaccatcggagatgggaaagcaccaggggcagctgtgtcgctcacatccacgctcgccttaccagcgtggatgcacagagtcccagggagcctggagaaagcccggcagctgcagcgacacttacagtacccatggcaaacagggacgcgtgtggaggctctggccagcaccagcaacagaatcccagtgcaggcctcgaggacttgggagcgcatccaggcccttctccgcagaatactggaagtcagaggttacccagaatataaaacctgccccaaaatggcaaatctatttgcataccagaggttaaaagcaatgtcagaggaggtgcttagaaacagaagtgtggaaactctcaaagctccaaatttccacaaaggcttcaaaccgacaggacaggtccaccttctcagccccacccaggaaaagtcaattgatgtggtaaacttcattgttgtcttattttcagaaattgccacagtcaccccagccttcggcaaccaccgctctcatcagtcagcagccatcaacattgaatcctcagccgtggcctggttcctgtcctgggggctgaccagccttctggggcctgggacctggggcatcgctgctgcctgccgtctggcctcagggcacctgcaaggccggaacctgctggacgtccgtgtgtcccactccatcaggcctggagacccgggaggccagcagcagagccacactctattctgtgtcctcatcaccaagcactag

SEQ ID NO: 140517 - DNA, 3252 bp, Homo sapiens
tcatgctgttcctgaagcagcttgcatgctgcttgcaagaaccagggtaggcaataagaaaccagtcctccaagtatcagggatctctgtactgatagctgattgctgcttctgatcaaggtcaaaacagatgaccacagttcttggagcatggagctgttttgcttcctctatcaccacaatcttacaccaggaatagaggctgccatcttcaaggctgccactatgtacaaagtaataaaggtgcgcagatatattggagggatattgaagattgacccataaagacgtcacacccttgttttgaggaaggccaaatccttttttgaatccttcagtcactgtgccctgattgtcttgcccatcttcatcatcatcttcgtcatctgcttctcctttctgaacaaactcatttcttgttcgaaggtacaaatcccagagtttgcaagcggctttatattcaggagaaatctggcacgctgcttcgttagaaccccttttgcctgcctcacctgctgtagtctcctcagacagtgcctcccctgtctcttctgcagcaaacatgcctgagctgttttcatcaacttcttcatcaacagtttcatggtcactgtctttgtcatcctccctctcctcctgcttcctttctttccgttttggcaattcttcatgtatgtccttttcttctattattccatttgtcagaccggaagactggaaaaggatgctattggccaaatgagggcccttgatggctgggaaagaaagcaagcccatgtaaacaggtaagagctccactggcctgtcagctgatgaagacagcagcgacacacaattctcacctcttatgctctgtgcattgttcttttccagttcttccagattgaagccgcttttcatgtctaccacaatactctcattaaaatatggaggaggagtccaagatgtagggggatggcaatagtaagctaatgaggcacctgtccactcagaccacagcagtttggcagcaccttcaacatttgggattccacctttttggtgcatacctcttctctgagcaagcacagtaaaaaattccagagaattcctgtagcctgggacagtatatttcagtactacctgtcgagcatcagcctgggaaaggatggcactggcagcctccatcggttttactacttcaatacttgctggacttcgcagagcaagcgcagaggaggaattaagtggagatacgatgaagctcggactatctatgattgtgatctgtttgtccaaggggacaacttgcatgctccttgtaagccccatggatacaccaacattacacatctgttcttgttttaagctattgataatgctgcttttccccacatttgggaaaccactaataaaggataccttggttatcttccctttatcctttggttttgttgaggctctgaacaccactgttggcaattctttcttcaaataatttagccagctctccaaattctcctttggtaccagatctgatttatttaatataagtaccagctttttctgtccactctggacaatggcctcttctacctgaggacatctgcaaccaagaggatctctggcatccaacacctcaaggtggcggacattccacataggatcgatggtagagtgctgttgataaaatacgataagcagaggaggtgttgtgatgctaccagccagggttctgctatacagtccctcttctacattgagtttcatccatttttccagttggttagttatattctgtcgtttccattccgtcaggtttgcaacaaaaactccaggattaaatgagcaagtgctggctttcatggaaagcttacgaattctttcctttttatagtcaagatagccaatgtaattgtactgggttcctgctccacggatgacaactttagtagaggctgaatcacaatcttctgaaaatgcagctgcatgtcctggcttcagtgctgtattgtaaagggcaagaatatcaccttgcacaattacatcatcatccatgtatatggcaggtttcatggattccccctggtcaggatcctcctttacttttccttccaaaagtttagggtcaaaattgacaattttgtatctgatgcttttcagggaatcactgttgagccaggaccggagatggtctgctgtattgttgagagtaacaatgtagaaaatcacattggagcgagtgttgtgctgaatgctgtttatagctgcaatggcccccccaagcctgtcttcagatgcagcgatgaccacaggaatctcctcttgtctcccatctactgcatgtcggagagcatttgggacaaagtctataggttgaggccctacaattcctgaatcatcgcgctggcagcagaagggaggtgtgagcggtgatggcaggagcagctgcagaagagcagtggcaccactggaacctgtgccccgcgcccctgaagcagctgaccaggccacgcccaccttcgcatggtcgggacccgcccccaggcccggaccctccaccactccggacacctgcttcagccatggacaaatcagcaggtacttcctgccgtttaagtcccctaaaagccctgggctcagccagagcagaacagacaatgggacggccagctgcagagaggagctaccctctgctgagagctcaatactcatcaagatgagcggggctaaatactccacgagacaccctgtcttttccaagttaaaattgtcttcagctcgactgtcctctgagttgtctgtattcttctcatcatcacctttatctgcatttgcaaatacagaggccacgcgaaccacaggcagaggcacatcccgagggacaaacctgactgagctgatgggcatggtccacagtttaattttcttaaaagatttggttttggcagaataccgtgattcacagacaaaaacatcctcatctcggaagttttctgggcataacttaaagtattccttgacaaacatgaccacacacttgcctagaattttactaactggaactttgttgtaatagtcactcttaaaaacttctttttctagaaattttcgtgtagccaggtggaatgtttcatttggtcggtaaaaccaacagccatacaaccatttttcaccagctgaatcctcccacagtctttcaatacagacgatatgtggttgtaggttggcctctgcaggttccacatagacgtaatctccaacatggtacat

SEQ ID NO: 140518 - DNA, 398 bp, Homo sapiens
cggagatggtctgctgtattgttgagagtaacaatgtagaaaatcacattggagcgagtgttgtgctgaatgctgtttatagctgcaatggcccccccaagcctgtcttcagatgcagcgatgaccacaggaatctcctcttgtctcccatctactgcatgtcggagagcatttgggacaaagtctataggttgaggccctacaattcctgaatcatcgcgctggcagcagaagggaggtgtgagcggtgatggcaggagcagctgcagaagagcagtggcaccactggaacctgtgccccgcgcccctgaagcagctgaccaggccacgcccaccttcgcatggtcgggacccgcccccaggcccggaccctccaccactccggacacctgcttcag

SEQ ID NO: 140519 - DNA, 483 bp, Homo sapiens
  misc_feature (1)...(483): n = a,t,c or g
gggcccccgcgtctcccatggcgacggcctttttccctgcgaggaccccggcggcagggctgccccgcgggcctgcttggcgcgacgctcgtagcggttaccgctgcgggctggctgggcgtagtgggntgcgcggctgccacggagctagaggatccagcgtctgtgtgcaatttcgttttgagaattccttctaaccagatcaggaaagctctcttaccaggaatagccccaggaaagacaatatggattagacgtactccatgataactggcgttttgcatggttaaaaactaatatttatatgacagaagaaaaagatgtcattccgtaaagtaaacatcatcatcttggtcctggctgttgctctcttcttactggttttgcaccataacttcctcagcttgagcagtttgttaaggaatgaggttacagattcaggaattgtagggcctcaacctatagactttgtcccaaatgctc

SEQ ID NO: 140520 - DNA, 611 bp, Homo sapiens
  misc_feature (1)...(611): n = a,t,c or g
gcgccgcgggacctttgaggggaacgacttgtcggagccctaaccaggggtgtctctgagcctggtgggatccccggagcgtcacatcactttccgatcacttcaaagtacagcagaccgaggacacggttgttaccaagaccaggctgttgccttggaagagcccagagcgtgtcaagggagacagccacatcacgccagaaatacatgacagctggattagccctggggagagggaggcccagatgtgggagctcaggggaggtgcagctcaacgtgggagtttgggaggaggctaccttgacctttgaatgccaagtggggagccagccagatgaaaggggttaaaaactaatatttatatgacagaaggaaaaagatgttcattccgtaaagtaaacatcatcatcttggtcctggggtnttgctctcttcttactggttttgcaccataacttcctcagcttgagcagtttgttaaggaatgaggttacagattcaggaattgtagggcctcaacctatagactntgtcccaaatgctctccgacatgcagtagatgggagacaagaggagattcctgtggtcatcgctgcatctgaagacaggct

SEQ ID NO: 140521 - DNA, 1333 bp, Homo sapiens
  misc_feature (1)...(1333): n = a,t,c or g
gctctaggaagctgctcagtaaatctgttccttagttgaatccgtaatctcgattaggtgattgcctgtggtctgaataaccattttcccnaacacagtatatgagcagtcttcccatgggctcnaatgtcattccaatgaagtacnttgcagccttacnnaactgaggtgaatatcgttttccagcactggacccttcatttgagacaaaaatagccacatcgttgcgccatgtgaatttgtgcagaanacttacttaaaggaaacaaagnatataccccatcccctggaggatagtcctttaggataccaattctttactagcttatgccactggttaattctacttaccaaggtggcggacattccacataggatcgatggtagagtgctgttgataaaatacgataagcagaggaggtgttgtgatgctaccagccagggttctgctatacagtccctctcttggtgggacagaaaacaaatgtttgttagtggaaaagtactgactaactccctgttagtcaagactcctaggaattggaaatacaacagtttttccacagctaggcccagttacatacttactcctacattgagtttcatcccatttttcccagttggttagttatattctgtcgtttccattccgtcaggtttgcaacaaaaactcccaggattaaaatgagcaaagtgctggctttcatggaaagcttacgaattctttccctttttatagtcaagatagccaatgtaattgtactaaaaacacaaataggatatatgtacttactgcttcaaacaaaatagatacaattttatagccagtagagagaagagctgttaaataaactgacttcttcagattagaaaataaatatttgaaattccaagttagaataggaacctagatgttgacataataaaccagatgttcaagaacaattaggctgtcaagtccatgaagaagtctacagaaaagcaggcttgagttttgggatgaaatgattggggagtgtaaattgcagcaaaagagttccctgaatttgcaacctcttcccattaaacaatattgtaggaagaggggtgtttggtaagcaatttacctggtttcctgctccacggatgacaactttagtagaggctgaatcacaatcttctgaaaatgcagctgcatgtcctggcttcagtgctgtattgtaaagggcaagaatatcacctgaaymagacaagatgttaygytttacatttccgttgccttgagagttccctgttactcccacttcrccctatggtgaccttttatagaagaccataaataayccactacagc

SEQ ID NO: 140522 - DNA, 2031 bp, Homo sapiens
  misc_feature (1)...(2031): n = a,t,c or g
ccaattcaatctcctttgtgattgaagtaggttatcctggaataaaaaaagaagataccctattgaaaaatgtaagttttatttacagatcaggccaccaggtttaccaaaattaaaacccaacagcagttttgaattatctgtaccagctagctgaactagccatatcagtttcttctttccagtcattcaggcattgtaagtaagaaaacacttcggtaaggcagatggagacatatttatagtctatagtctgtctgggaaggctgactgcccagacagggccagtttgtcatctttacctaggctgacacatctttttccatgggcttgctacccgatagggcattggaagcctaggcaactgttacttcccacggcatgctatcttccagggacttccctgagggaaatggcttggctttacagtttcaaatttctggttttcacttttatggtttgaggatctcgggtatattcttcgggatttagggttgaaatttgccctgttggggtctgggaatataccatttttccccaaacatcagtatatgaaagcagtccttccccatgggcttcaaatgtcccattccaagggagtaacttggccaccctttaacaaactgaggtgaaatatccgttttccccanccactggaaacccaaggtggcgggacattccccacataggatcgatggtagagtgcctggtggaataaaatacgaataagccagaggaggtgttgtgaaggctacccagcccagggttcctgcctatacagtcccctccttcctacattgagtttcatcccatttttcccagttggttagttatattctgtcgtttccattccgtcaggtttgcaacaaaaactcccaggattaaatgagcaagtgctggctttcatggaaagcttacgaaatcctttccctttttaataagtcaagattagcccaatgtaattgtactggtttccctgctcccacggatgacaactttagtagaggctgaatcacaatcttctgaaatatgcagctgcatgtccctggcttcagtgctgtattgtaaagggcaagaatatcaccttgcacaattacatcatcatccatgtatatggccttaatttgcgctgggaacccagaattggcaaagtagaaccttgcaaaaggttaaaaggtttccatggaattcccccctggtcaggatcctcctttacttttcccttcccaaaagtttacgggtcaaaattgacaattttgtatctgatgctttttcagggaatccgctgttgcagcccaggaccggagatggtctgcctgtgattgttgagagtaacaatgtagaaaaaaatccttggagccaggtgttggtgcctgaatgcctgtttatagctgcaatggccccccccaagcctgtcttcagatgcagcgatgaccaacggaatctcctcttgtctcccatctactgcatgtcggagagcatttgggacaaagtctataggttgaggccctacaattcctgaatctgtaacctcattccttaacaaactgctcaagctgaggaagttatggtgcaaaaccagtaagaataagagcaacagccaggaccaagatgatgatgtttactttacggaatgacatcttttttcttctgtactataaatattagttttttaaccacttttgaagtgatcggtaaatgtgatgtgacgctccgggggatccacagccaggactcagagacatctcctggttagggactaccgaccgaagtgcttcccctcaaaggctcgccgcggccgcccttactgcaggcaatggtaggagatgcagtagcggcccgcgccgacgcccgccgccctagccgctagcgcgcccgcgccagcggcggcagccaccggagcgccagcccgttgtctggccgcccgcgttccctgcacgctgggccgagcacacttgccctctagctccgtggcagccgcgcagccccactacgcccagccagcccgcagcggtaaccgctagagcgtcg

SEQ ID NO: 140523 - DNA, 423 bp, Homo sapiens
atggcgggccctgacggggccgccccccttgagcctggcgcagtggctgcgcccatgggcccgaaaagcagccgcgggagcccaggccgcgcggggaaagccgcagaaactcctttcagacaccaaaggaattctggggaagacaatttcactggaatgagtatgtttggggagcagaatttcagaagagtgatgcggggaaaccagtttgcaggaggagaggagggcatagtgggtgcagcccccgtggctgtggaacccggggcagaagtgcgctcacttctctcacccggcctcctgccccacctgctgcccgcgctggggttcaaaaacaagactgtccttaagaagcgctgcaaggactgttacctggtgaagaggcggggtcagtgtgcccagtcccatcgaccacccaagggctga

SEQ ID NO: 140524 - DNA, 668 bp, Homo sapiens
gcggccgccccaagggtaaggaactggggaggcggagtagcgccacgttagccgctttccctagagagattgtgaagcacgttgcgcacggggccctttctggtcatggcttagcccaaggaggaaggggaaaaggcagaaatcacaactcataagccagcgtcttgagcgacacttcctcagcgggaagaaccggcaaaaaaggccttccaagatggcgggccctgacggggccgccccccttgagcctggcgcagtggctgcgcccatgggcccgaaaagcagccgcgggagcccaggccgcgcggggaaagccgcagaaacgtcctgaagccctggccggcagcccctgaacaaacgaggcctccacaggcgtacactattgtttctaatgtcggaaaagggtgccgcggtggaaacgacacaagggcaggaggtggggtttctgtggctttaaccgaaagaaacttgcgaaacgcaaacaaagcattatgtaaatggacgccattctttttaggaccacgtttctagcacgccccacaaacagcagagccgcgattcggcaggcggccgtgagtgggtttcggtctttctgcccaccggccgccgccggggagcaggagctggggtgggggatccatgcagggcgcccggacgccggggacgaa

SEQ ID NO: 140525 - DNA, 1075 bp, Homo sapiens
tggtggaattcgtgtgcctcaggtcacacagcacgcagagacatgctctattgaaagcttaatctcagtctgagctgctgtaaccaggcttagatccgggtactctgagaggatatggttcccccaaccctggggggatatggaggtagataccttgcttttatctcttaacttatcagaggtgtggtccagaaactcattcaaactgggaggcctactttaagaatacaaagttaccaaaaaaaccccacttacttagaatgagaaaagtcacacagatcactagagccttggacattcaggcctcttctgtctgagttccttaggcatcgtaccagaaattcttccagttgctgcctgactgcaacctggctccctctccccacccacaagtgccagcaactcccagcaccagctggggccatttaagcaagcccccgggagctttcagaaagcggcattcatcctcaagatgtccaaaagcgggccatcaatggggaggcgggcagagaaacacgcctacagcagcccatttcaggagactgagtgctgggtcactgcagctgtgtcctcagctcagggtgtctcccctcaccacaggctcattgccgcccagatccagggaacccccacggacacccgctccccccagtccttaccccaactgtcgacccctgcccaagtccacacggacgccttctgtgggctggagcggtcccccctcctgcggcacacggcttcaaagccatcctcaggaagccccagctggatagggcagtgtgcgccggcctttcctggggccataacgaatgccaagttaggcccttctgtagaagcacactggagggctctgaggccccccacacccaccgatgcccacaatgtgtcaaccaaaacaagcctcaaagctgcagcttttgaactgtccccagccaagccccagccagggtgctggtgccacaatgggaaatgtcggctagtgactggggcaacaaagggcctagtatcagcctacagcccaggagaaaaagatagtctaagtttacatgtggtgttcagatgcccccagaattga

SEQ ID NO: 140526 - DNA, 1395 bp, Homo sapiens
tgaaagatgggagccaccataatggctaaaatgaaagaagcaacttcctattgaaaacttgcagagagatgaaagtagggccacgtttaggtgcatccaatgagccaccatcttctgaagtcctgccaggcctaagtcggtacataatcattgaagcggactttgttttattggatatttatttagcagatttaaagttcattccacagatctagccatgaggtggcagcagtgagcaaatagaccaacactgccatctttgtcaaattttattctagtgggaggagacaaacagtctgtctccatttggggggaatacatatttagtactttaacttaaaaatatattcctctccttacccaggtccattaatataagatttgccactctcttggatactcctggtgtggaaaatcttgtcattgcctgcttacaaaaacattcatagccatatttttaagggtcttaaaatatatgcttatcttttcaggatggaacactttatcacaaaatgcatgccgtttgtttaaaatgcttgtagaaaccatcccttctgtctcttctgtaggacattgagtacatacggtcccattacaacattgaagatttcatctacttcagtcaccaccagcgcgaagaacacgggcacatgcatcactttgccctcaaccccattttccggcactacaccaagttctttctgaaggtgtatttgtaaagctgtacgcagacatctgtgctgagcctctctgacattctctcccctaaaatatagattgctgtctttcagttccagaacccctacgcccactccctgacatctgcccttcattacttggttcccgtgcgaccacgactcctgcctggtttggacgatcagtgtcccggccacaacaccttccccgtcgtttctattaattgacagcctaccccgcagcaggtcataaaaaagagcctagaaaacataaatgattttcatcatttgaaagcagagatttttctaaaataaaacctctgttagctttcctgcttcaccctctctaactcagcagcctcttgtggtcctgtgtggacatctaagagagctcaggtagcaaacaagatgcccatccaaatgcaggaggaaaatgggggactttctgtttttttaaagccaccagcaggttctttgtttgacccacctttagtaatattattgctgttaaaaagagctgccactgcttccaacagaaaagaaaaaattctaaggatttcctggatgctgatcgggttcttgccacaacccagtagggggaaaaaaaatgcattctcctccctgcagagccagggtaatgaatgccacagaggtccagaagtgcctccggacgcatcagctgcctgctgcagagctctgg

SEQ ID NO: 140527 - DNA, 574 bp, Homo sapiens
aaggctgataattttatagggttccgttgcatggatagaccacatttattcattcatttatttatttatttatttatttatttatttatttattgagacaatctcactctgttgcccaggctggagtgcggtggcatgatcatggctcactgcagtctgaatctcacattctcaagcgatcctgccgcctcagcctcctgagtagctgggactacaggcacatgacaccatgcctggatattcgtctttctgtgtaactggttgagaaacaggggagtaacagtgaagaaacggtcttagaataaatctggtgacagcagaagagaatatgagacagattgtgctcacacagccttgaagagtgtgacagtatttgagggccacgctgttgtcttagagtgaagtgaggagaacctgcactggtttggtagtcatgggaatggaaggaggaaagaaaatgtgaagctcatcggtggcagagtcaaaatggcttggtctttgtagtcaacgattaagtgagaaggaggaattactggctgacttagaagaagtaaaaaacgtgaaataccgataa

SEQ ID NO: 140528 - DNA, 3520 bp, Homo sapiens
  misc_feature (1)...(3520): n = a,t,c or g
ggcacgaggcggagatctcgccggctttaccttcaccctcggggtctgcagcccccttccgcttcctctcctaggcgacgagacccagtggctagaagttcaccatgtctattctcaagatccatgccagggagatctttgactctcgcgggaatcccacatgttgaggttgatctcttcacctcaaaaggtctcttcagagctgctgtgcccagtggtgcttcaactggtatctatgtaggccctagagctccgggacaatgataagactcgctatatgggggaaagggtgtctcaaaggctgttgaagcacatcaataaaactattgcgcctgccctggttagcaagaaacttgaacgtcacagatacaggagaagattgacaaacctttggggggaaaaatttggggggggaaaatttctggatggatggaacagaaaataaatctaagtttgggtgcgaacgccattctggggggtgtcccttgccgtcttgcaaagctgggtgccgttaagaagggggtccccctgtaccgccacatcgctgactttgctggcaaactctgaagtcatcctgccagtcccggcgttcaagtgtcatcatcaatggcggttctcatgctggcaacaagctggccatgcaggagttcatgatcctcccagtcggtgcagcaaacttcagggaagccatgccgcattggagcagaggtttaccacaacctgaagaatgtcatcaaggagaaatatgggaaagatgccaccaatgtgggggatgaaggcggggtttgctcccaacatcctggagaataaagaaggcctggagctgcttgaagactgctattggaaagcctggcctacactgataaggtggtcatcggcatggacgtagcggcctccgagttcttcaggtctgggaagtatgacctggacttcaagtctcccgatgacccccagcaggtacatctcgcctgacccatgctggctgaacctgtacaagtcctttcatcaatggactaccccagtggtgtctatcgaagatccctttgaccaggatgactggggagcttggccagaaagttcacagccagtgcaggaatccaggtaagttgggggatgatctcaccagtgaccaacccaaagaaggatcgccaaggccgtgaacgagaaagtccttgcaacttgcctcctgctcaaagtcaaaccagattgggctccgtgaaccgagtctcttcagggcgtgcaaacttggcccaggcccaatggtttggggcgttcatggtgtctcaatcgttcggggggagactgaaagatactttaatcgctgaccttggttgtgggggcttttgcaactgggcaagattcaagactggtgccccctttgccgaatctgaagcgcttggccaaagtacaacccagctcctcaagaattgaagaggaggtggggcctcaaggctaagtttgcccggcaggaacttcagaaaccccttggccaaagtaaagctgtgggcaaggcaaagcccttcggtcaacctgttggctatacancaccacctcccactcgtgtcaagatcaggcagctcgaggcccccgaccaacaacttgcaggggtccctgctagttagcgcccccacccccggtggagttcgtaccagcttccttatgaacttctacagaagccaagctccctggaagccctgtttggcagctctagcttttgcagtcgtgtaattggcccaagtcattgtttttctcgccccaatttccaccaagtgtcttgagtcatgtgagcctcgtgtcatctccgggagtgccacaggcttagatcccggagtggttttgtgctcaaaataaaaagcctcagtgacccatgagacggagatctcgccggctttacgttcacctcggtgtctgcagcaccctccgcttcctctcctaggcgacgagacccagtggctagaagttcaccatgtctattctcaagatccatgccagggagctctttgactctcgtgggaatcccactgttgaggttgatctcttcacctcagaaggtctcttcagagctgctgtgcccagtggtgcttcaactggtatctatgaggtcctagagctccaggacaatgataagactcgctatatggggaagggtgtctcaaagcctgttgagcccatcaataaaactattgcacctgtcctggttagcaagaaactgaacgtcacagaacaagagaagattgacaaacttatgatagagatggatggaacagaaaataaatctaaatttggtgcaaatgccattctgggagtgtccctcgctgcctgcaaagctagtgctgttgagaagggggttcccctgtaccaccacatcgccgacttgtctggcaactccaaagtcatcttgccagtcccggtgttcaatgtcatcaatggcagttctcatgctgtcaccaagctggccatgcaggagttcatggtcctcccagtcggtgcagcaaacttcagggaagccatgcccattggagcggaggtttaccacagcctgaagaatgtcatcaaggagaaatatgggaaagatgccaccggtgtgggggatggaggcgcgtttgctcccaacatcctggagaataaagaaggcctggagctgctgaagactgcgattgggaaagctggctacactgataaggtgatcgtcagcatggacgtagaggcctccgagttcttcaggtctggaaagtatgacctggaattcaagtttctcgacgaccccaccaggtacatctcacctgactgtctggctgacctgtacaagtccttcatcaaaaactacccagtggtgtctactgaagatccctttgaccaggatgactggggagcttggcagaagttcacggccagtgcaggaatccaggtagtggaggatgatctcagagtgaccaacccaaagaggacagcctcggccgtgaatgagaagaagtgcaactgcctcctgctcaaagtgaaccagattcgctccgtgactgagtcccttcaggcgtgcaagctggcccaggcgaatggttggtgtgtcatggtgcctcatcattctggggagactgaaaataccttcatcactgacctggtggtggggctgtgacctgggcagctcaagactggtgccccttgctgatctgagcgcttggccaagtacaaccagctcctcagaattgaagaggagctgggcagcaaggctaagtttgctggcaggaacttcagaaaccccccagccaagtaagctgtgggcaggcaagcccttcagtcacctggtggctaattagacccctccccttgtgtcaactccggcagctcaagacccccgagcaacatttgtaggggccgctgctagttagctacccttgcccaccgccgtggagttcgcacctcttccttagaacttctacagaagcaggttgcagtgagccgagattgcgccactgcacaccagtctggagacagagtgagagtccgtcccagaaaaaaaaaa

SEQ ID NO: 140529 - DNA, 1160 bp, Homo sapiens
tcactcaggtagcagtttattacattttccgatccttctaattaacaggaagggtttttcccccactgggatgatatcattgatgtgcaatagaattgtactttcaacacacgcaaaactacaaagctgcactccatcaaatcttccatcccagttgccaatagggttatccatgtccacaccaacaaaatatcgtaagctttcttttcctggcaaaacatcacagaatataactgttccagattctattgtttctccaaccttcaaagaaactctggagtttatttccaaaggaggaagttcgacctgcattgtgtccccaggacctgcgtaatcactttccaatgcagtgtcatcatcttctatgagttctagcttgtccaatgcaacaaacacgccacaatcttcatcacactgaaaaagctgtttcccttggtacaccccgtcagtgaaaccttgaccacgaccttcttccagcaattcaactccaaagaatattccggagactgtcctctctgctaacaggggtcctctgaagcgtacaactccaggaaatttttcttccccagatctcagctgtactttcacaggacagcccccgtctatttggaggcctttacttaaactggtttctggttttaaacaggctgaacctctcctcacaattggtaattgccaaaagtaactctgtgaacttatcatttatctctacaacatccttttcatcaacaaagagaactgcatgaggttgctctagaatttttaatccaatctgatttttcttgccttttgcagaaggaatccttgaatgccccacagaacgatcttgaatatactgtcctatacttcccttcggtactttaaggagcttttgtgtttgtttgtctgtaacgctgcattcttgaagaagcaagtaaaaaatccgctcttcccagtagggtgaagtgactttttcttggctccataagcctgaactcattgtgatattaacttcaaaatactaattcaaaaaagggaaactactaataactttgtcataaacccgcaaaagataaattcagtggcagtcccaaagcatgttttcagcaacgtggtgtccatgctgtcacagcagggcgcacctttcaaataaggaactccgggtggctgagtagaaccat

SEQ ID NO: 140530 - DNA, 2772 bp, Homo sapiens
ctacgtgcagagctgtcgcggagccggaacagcagcggtgaagcccctcggctcggccgagaccgccgtgcccattgctcgcctcggttgccgccgctttagccgcagccgctgctgccgccgccgggggagaggcagcctattgtctttctccgcggcgaaggtgaggagctgtctcggctcggcccgcgggggagccccgggagccgcacggtgagagcgcaacttagttggcggagttgggggaagttttgtgatttgaggaggggtcggggtgcggacgcggcccgtcccctgcggccgctcggtggggcgggcccagtaggagggtcgggggctgcgcggggcttcaggggcgggcggcacggatgggtagccgggcggcgcggggacctcagctttgcggacccctcctccctgcgcatcacccttctcccgcattgtctgcttggggctcggcgcgcctcccactccgcagcccaacttgggggccgtcgccgctttccggatggggggcgcgcccggcggcggatggccccgaacccttgccccgggtccccgggttggcgccgctggggcggactcactcctcccctggggcgggcggccgcggtgtggagtccgcgccgcgaacaagtgcttgattttatccttggttgaaggaagaacagcggtttcgttgagagagagtgtagaaggaggtggaggaggtgagaaagtaatgaaatgcatttcaaaggattctataagatgtgtccctgctattttggctcctatgccgtataagcgacttaaagtaggtttagggttggcagaagtggggataagaatagaaatttgcactttgatgagaatgtggtcactgtccgggctggtggtggtgaactggaaattcaaggggtggtgtatgtgccaagaggcctttagtcctcttgtcttcaggtggcatttttcaactccgctggagccagtgcccaggaggaacaaagtcccagaagaagccagaggtagcggccccagccccagagagtgggggtgagtctgtgtttggggagacccaccgggcccggccggcacgtgccgcatggatctggggcgtgcagccactcggcacactggggaccccggctggggcacaagagcaccaggggggtagggcccaaagggatcaggggaagcctctggcctgtgtgcgtcagggatgctctgcacctgcaaccaggtgtcgtccacgggcgggggcatggtaacagtggtcctgttgatgtcaccgatgatgctgagcgcctccttcagcgcgtggtgcatgtgcagcatctcgtcgtgctgctgtgcctgctctgccaactcctccatcagtgtgttctggttcccacatgagtacatattggccagcggctccgagatgatgaactccggggtcgagtacagcagcctctccctctccagcagcgtctcgagctcctcgtgccgcctctcctgttctaacagcttctccacctcttccagcagcctctccctctccagcagcatctcatgctcctcctgctgcctctcctgttctaacagcttctccacctcttccagcagcctctccctctccagcagcctctcctgctcctcctgccgcctctcctgttctaacagcttctccacctcttccagcagcctctcctgccctggcagcttctcctgttcacacagcctctcctcctgttcacgtagcctctcctcctgttcacacagcctctcctcctgttcacgtagcctctcctcctgttcacacagcctctcctcatgttcacgtagcctctcctcctgttcacacagcctctcctcatgttcacgtagcctctcctcctgttcacacagcctctcctcctgttcacgtagcctctcctcctgttcatgtagcctctcctcctgttcacatagcctctcctcctgttcacacagcctctcctcatgttcacgtagcctctcctcctgttcacacagcctctcctcctgttcacgtagcctctcctcctgttcacacagcctctcctcatgttcacgtagcctctcctcctgttcacacagcctctcctcctgttcacacagcctctcctcctgttcacgtagcctctcctcctgttcatgtagcctatcctcctgttcacgttgcctctcctcctgttcacgtagcctctcctcctgttcacgtagcctctcctcctgtctcctgttcaggagactcaacatctgattgttttccacctcagcctggagctgtcttcccacactctctagctccttccttaggtggttggtctcatcttgtagctgctctaccttagatggccctgctgggggctctggggccaggggttcagccgtctggtttttgagtttgaacaagctcctcccaagcttctgtaccagatgtatctcatgcttcttctcctccttagatgtgcgaaccagtgaattgatgttttcagtgagttgactgattattgcggagcttgaatccagggccactgctagttcttggtactggctctccagatcctccagggtagtagaggatgcacggccctccccgtagatacctgttgctgaatccccaggtgagtggtaaccaccagaagtggctgtgtcagggctactgccattgattttctttttcctgttagctcctgctggaatgccagggctcttcctctgccaatatgcttttaactttttcttggctgcggccaatttcccctgttgtgttttttctgacat

SEQ ID NO: 140531 - DNA, 822 bp, Homo sapiens
atgactggaaacctctgtctgcctcccagagcttcgattcctgcactggggtctttcaaactcaggttctatggatcccgagagcctacactgacaggtgcggatcccggaccttcttcgccgagcctgaaccggcagacccctccccaggcccctgaagacccaggagatcccctcaggctgcggcgtgatgggccgagctacgccggggacctcggggctcggagattcggttcgacgggtccggggtgcgatccccgctccgcggagctcgctcggccgtggctttacctgcgtgtgattgactacaggtgctcagctcgcccccagtctggttcctgcagctccccggctgccagcggcgctcatggatatacagccggaacccctggccagtgcagctcccgccgctaccggccccgcccaagtaactgccgccacgcccctgacgaccgcttctgccacgcccctaaccacggaaaccgcttgttcattgggcagttcagccgcttctccacttgccccgcgcgctcattgcgtctaggaggggatccattgatcagcgaagctgttcctcagagtggaggcgggattcttaggggagagctcctcagcaattggttacatttgacggctttagtccagggacccagacgctactggataaggccagcccggagtgggcggggaaaggggaggagggctagaaggtgggtcgtgtttgatgtcgatgggggcggggtgaagagacgggtaattgtgaccgcaaactgctttagagggctgggtaaggtcagctgtcgactgggctcagaggaatga

SEQ ID NO: 140532 - DNA, 1992 bp, Homo sapiens
cggattcggcacgaggcggggagctgactggccggggttccggctgtatatccatgagcgccgctggcagccgggtagctgcaggaaccagactgggggcgagctgagcacctgtagtcaatcacacgcaggcacagatgaatccttcatatttatctggatttagctggtagcatttgtctcctaagacttggtcacagaggaatccatgtgaccttcaggccttctgctctaaactggcaggagatcctgtttctactcacagcgtccgagcttttatgtttgtttgaataagagatctgacctgaccggcccaactgtacaactcttcaaggaaaattcgtatttgcagtgggaagaataagtaacattgatcaagatgaatgccatgctggagactcccgaactcccagccgtgtttgatggagtgaagctggctgcagtggctgctgtgctgtacgtgatcgtccggtgtttgaacctgaagagccccacagccccacctgacctctacttccaggactcggggctctcacgctttctgctcaagtcctgtcctcttctgaccaaagaatacattccaccgttgatctgggggaaaagtggacacatccagacagccttgtatgggaagatgggaagggtgaggtcgccacatccttatgggcaccggaagttcatcactatgtctgatggagccacttctacattcgacctcttcgagcccttggctgagcactgtgttggagatgatatcaccatggtcatctgccctggaattgccaatcacagcgagaagcaatacatccgcactttcgttgactacgcccagaaaaatggctatcggtgcgccgtgctgaaccacctgggtgccctgcccaacattgaattgacctcgccacgcatgttcacctatggctgcacgtgggaatttggagccatggtgaactacatcaagaagacatatcccctgacccagctggtcgtcgtgggcttcagcctgggtggtaacattgtgtgcaaatacttgggggagactcaggcaaaccaagagaaggtcctgtgctgcgtcagcgtgtgccaggggtacagtgcactgagggcccaggaaaccttcatgcaatgggatcagtgccggcggttctacaacttcctcatggctgacaacatgaagaagatcatcctctcgcacaggcaagctctttttggagaccatgttaagaaaccccagagcctggaagacacggacttgagccggctctacacagcaacatccctgatgcagattgatgacaatgtgatgaggaagtttcacggctataactccctgaaggaatactatgaggaagaaagttgcatgcggtacctgcacaggatttatgttcctctcatgctggttaatgcagctgacgatccgttggtgcatgaaagtcttctaaccattccaaaatctctttcagagaaacgagagaacgtcatgtttgtgctgcctctgcatgggggccacttgggcttctttgagggctctgtgctgttccccgagcccctgacatggatggataagctggtggtggagtacgccaacgccatttgccaatgggagcgtaacaagttgcagtgctctgacacggagcaggtggaggccgacctggagtgaggcctccggactctggcacgctccagcagccctcctctggaagctgcgtcccctcaccccctgtttcaggtctcccatctccctcagtgacctggatctgacctcacaccatcagcagggggcacccaccatgcacacctgtctcggagtaggcagctcttcctgggagctccaggctatttttgtgcttagttactggttttctccattgcattgttaggcatggtgacaagtgacagagttcttgccctctgtccagtttcagcatctggttgcttttaagccaagtacatctagtttccctattaaaaatgtgtctgaatccccccgaattc

SEQ ID NO: 140533 - DNA, 474 bp, Homo sapiens
aatacagtgcttgggcatgaatctgctcacatcaggaaacctgatgggaaagtaaataacttggcacttgggtctgatgatgctttccagatccttgggtctgtgatcaggaatcagcttcataaattttcccatggaagtgagaaatgattccatattaaaaactgagttgaatacaaccacatcagccaccaggcatgaaagaatttggttgtatccatattggaaatccctctcctgacatttcttgacaggatatatcaactggttctcgtgaaaatacagaatctttttcagtttcccaaggtcaggccgaagggcagccagttcggtcaggttaagcactgaacttgcaaagagggtcctaggaaacaagaaaattggggtttactgtcccaagtatgtttgaagggatcatgctttgctcttctctcctctttcctcttcccaccccaagaaaaacacatcccctat

SEQ ID NO: 140534 - DNA, 909 bp, Homo sapiens; identical to SEQ ID NO: 119785

SEQ ID NO: 140535 - DNA, 726 bp, Homo sapiens
atgtggaaacgactttggaattgggtaacaagcagaggttggaacagtttggagggctcagaagaagacaggaaaatgtgggaaagtttggaacttcctagagacttgttgaatgtctttggccaaaatgctgatagcgatacagacaatgaagtccaggttgagcctcaagaattggcggcctgtgtcccagctgctccagccatggctaaaaggggccaatgcacagctcaggctgttgcttcacagggtgcaagccccagccttggtagcttccacgtaatgttggtcccatgggtgcacaaaagtcaagaattaacgtttgaggccagcctggtggctgatgtggttgtattcaactcagtttttaatatggaatcatttctcacttccatgggaaaatttatgaagctgattcctgatcacagacccaaggatctggaaagcatcatcagacccaagtgccaagttatttactttcccatcaggtttcctgatgtgagcagggacatggatgaagctggaaactatcgttctcagcaaactaacacaggaacagaaaaccaaacactgcatgttctcactcataagtggaagttgaacaatgaaaacacatggacacaggaaggggaacatcacatactggggcctgccgggggaacccagaaggtgagggagtttagagtaaagggtaatacagatattggggcagttggacttgagtga

SEQ ID NO: 140536 - DNA, 626 bp, Homo sapiens
agcacccaagtggtgaaccaggtcacctctggaatgctttgctgcttagaaatttcttctgccagatacccaaaattatctctctcgagttcaaagttccacaaagctctaggatgggggcaaaatgcccaggggcaaaatgctgctaaacataacaagagttgcctttgctctggttcccaacaagctcttcatctccatctgagacctcctcagcctggactttattgtccatatcgctatcagcatttttgccaaagccattcaacaagtctctaggaagttctaaactttcccacattttcctgccttcttctgagccttccaaactgttccaacctctgcctgttacccagttccaaagtcgcttccacattttcaggtatcttttcagcaaagccccactctactggtgccaatttactgtattagtccatcttcatgctgctgataaagacatacctgagactgagcaatttacaaaagaaagagatttaattggactcacaattccatgtggctggggaggcctcacaatcatggaagaaggcaaggaggagcaagtcacaacttacgtggatggtagcaggcaaaaagagcttgtgcaaggaaattaccccttatag

SEQ ID NO: 140537 - DNA, 474 bp, Homo sapiens
atgcaaagccttctggaaatccacaagctgaagatgcttgcacaatggagaacaattgaaggagtgagtctgggcagtgagcagattggaggctatttcattattagcaatgtgctggaagagaactctagaacagaagttgataaaaattcaggagcttttattgaattaaagccacatttgcctgaagaagtcagcaaagtcactgactggaacatggatgaagctggaaaccatcattctcagcaaactaacacaggaacagaaaaccaaacactgcatgttctcactgataagtgggagttgaacaatgagaacacatggacacagggaggggaacatcacacactggggcctgtcgggggtgggaggcctagcaattcattagaattacctgtgaagcttttaaaatgtaaggtttggatggaatgctcagaccctaccttagacccaattaagcccacagctttgagg

SEQ ID NO: 140538 - DNA, 2048 bp, Homo sapiens
ggcacgaggcgggactcggcgggtcctcctgggagtctcggaggggaccggctgtgcagagaacttcagccaaagcatctgagacgggaagcagaaaaaggagggacagtttggagaagaaaaacgcagctgtgtgtttgggccttgacgtggctgtggatgcagtcgttctgacccctggtggccgagaggtgaagtgcagtggcggctgcttgctcaaggccggaggaagacgccatggagttggtgctggtcttcctctgcagcctgctggcccccatggtcctggccagtgcagctgaaaaggagaaggaaatggacccttttcattatgattaccagaccctgaggattgggggactggtgttcgctgtggtcctcttctcggttgggatcctccttatcctaagtcgcaggtgcaagtgcagtttcaatcagaaaccctcgggccccaggagatgaggaagcccaggtgggagaacctcatcaccgccaatgcaacagaagccccagaaagcagagaactgaagttgcagccattcaggtgggaagcctctgggaacctgaggggcgggtgcttgaacctttgggatgcaaaatgtccgatgcttaagaaaaaccggtcacttcatcaacagccctttccccaggtataagccaagaaacttgtgtgtcccccaccctatcccctctaacaccattcctccacctgatgatgcaactaacacttgcctccccactgcagcctgcggtcctgcccacctcccgtgatgtgtgtgtgtgtgtgtgtgtgtgtgactgtgtgtgtttgctaactgtggtctttgtgggctacttgtttgtgggatggtattgtgttttgttaagtgaactgtggactcgctttcccagggcaggggctgagccacatgggccattctggctcctccctgccccccgtgggccctccatcaccttctgctcctagggaaggctgctttgttggcccgagaaccagccccctcccctgatttagggatgcgtaggggtaagagcacgggcaagtggtcttcaagtcgtcttgggacctgggaaggtttgcaagcactttgtcaatcattcttcaatggactcctttcaatcctttaacaaaaaacttggtttccttaatcccaactgattccaatctgaaaggtctcttaagcaaatggaagaatacaaagcaaggaagctgggtgaagcccagcgttgaaggtaaggaagggcaatgcctttccgtggttaatttcttcccaggggcttccacgaggagtccccatctgccccgccccttcacagagcgcccggggattccagggcccagggctttctactctgcccctggggaactgtgtcccctgcatatcttcttcagcaataaactccatggggctctggggacccctaaccccttccaaaccttcccctgctttttgaggactttcaatctacaagcccagctcatcccagatgcaagactaacagtccctgacaaattgggtcctcctggccaggccaaatagttgaaaggaactccctgttcccgttggggcccagcacacccgggaatggaatggaagggaagaagcagaggccctttgccttcctcctgccctacgtcccccttagatgggccagcagaggcaactccccgcatccctttgctcctgccctgttgggtggtcaaaaccggtaagcaaggtgggttggagactcagcaggctccgtgcagcccttgggaacagtgagaggttgaaggtcataacgacgagtgggaacctcaacccagatcccgcccctcctgtcctcctgtgttccccgcggaaaccaaccaaacccgtgcgctgtgagcccattgctgttctctgtatcgtgatctatcctcaactttcaacagaaaaaaggaataaaatatcctttgtttcctagtgactgatccgcagtcagtcgcttatcgcgagtcttaactatccattattgggggggtctgtttatatgtgacattttttcgggtgcttgctttccgtcct

SEQ ID NO: 140539 - DNA, 1494 bp, Homo sapiens
atgaatgaagcttatttccagcgttattcacagtggcatatcaagggcaggggggaagacagtggtctgctccaggtgtatgggcttcttctaaagcaggcagctcacatgacacttttcaacactctgtcctgtaccagcttggcatccggcgtctatcaaaaggggaatctttcatatgcaattatggcagaaaataaagaattgagttgtgatcaggctaggtttgttacgcgcggcgctaacacggtgcgaggacgcgactcaactggatccaaatgtctcaagtgtaaagcaccccatgagaggcgagcggcaacctcggggggtgagcgaggatctgagctgcactcgactataacaagagcgaaagaggaaatcaaccgccatgcgcagagaggtgttgtggtgacgttgtcccaaccgggttctgtgtatgcagctgatttcagttttctgaacagaaatgtaccattcaggaggaaattgggaagtactgacgatgagtcaaacatctcaaagccaactgagatcctggggaaaagcacaaacaaagcaattgatgaagcagtcctctgggaggatggactgaatgacccagtgagaatgagctcaaggctttgggttacacatcatcagcctggaagaggttttctgaacagcagtgggggctctcgctggggtcttcagcaccatcttggaggttgccatggtgaggggattgggagctgccaggggaacctggaggagactcttctcacaggccctttccaggccccatacccagggccccttgagcaggcagcttggacaggagtcagtggctgtggatgcccagatgtcctcaccttagagtcaggggcctgcactggggttgaaggaataaaaagaacatcaggcagccccccatttccaatctggagatgctttgttctgtacaagctgcccaacttgaaatttctggatgcccagaaagtaaccagacaagaacgagaggaggcgttggtcagaggagtcttcatgaaggtggtgaagcccaagcagtctgtgagagatgacaccctggttggccagtcagtttctgtgcctgcctggagcctaggtggagttggctccacagaactcagagatggagggagagtcctagcccaagcagtgtggactactggccactcaagctatcagggggaatccacgcaaccgccacaactccacaatggtctcgtgtatgggaactctggggacccagagaatgtgagtaacccaactggcattaccctgcaaggcaatgcggggtccaaggatggtcaaccatatcacccactaggcaccccagaagtgagagggaatgaaatcaaatggaacacaagttttggtgggaaggaagaatccggaccacaattgccaactctgatggttgccccactagccaaatggaatccgcaaagttactcatgccttaattgtccaacattaagtaaaagttcagaatag

SEQ ID NO: 140540 - DNA, 593 bp, Homo sapiens
aatggagagtctggctccagggaagctgctggagcctgagtctgtcgggttcctctgcctgccccacctcttctacgggtgcctcttgctgcttctgtgtccccggccatctgaactcagtgggcttcgctgtacttggttccaaggtgctctggactccaggagagagtccgttttgccagtagactccgggcagccgccagcaagggctggaaagcagtcccaaatcacagctgtccagtgagtactctcctagtactggatacaaaggaagaggccacggcccacgatcttctgaactcacaataggtggaggctggggctctggcgccacctctgcggaatcccaagcccgcttcacacagccaagaaaatgttgctccatccctcaagcctcagaccaacgtttgcgctgatcaaggagggagagtctctgcactaccatcagcctgagtatttatgctctgcagagcccgtgggcggaggccagtcagatattaagaaactcagtagtaacaaatgcacgaaaattagtagacaaatgaaaaacgataacattttagagagtacatagaaccaaaacgaaccgtaat

SEQ ID NO: 140541 - DNA, 1367 bp, Homo sapiens
tttttttttttttttttaacagatacgaatgaaatatttaatgaaataaatacaaatatttaaaatacaaggaaactgaaagtaataagcgacgcgaaacaagaaagaaacataagggaaaaagagaatttaaaaactgacaaccagcaatgaaagcacatcttaatgtatttttattttctaggtggagacgtttcggtaactgagaatcttttcaaggaggagaatccaaaaagccttctgcttgctatctaaggctgcgtagctccacagatccgtgaacagcacgctcagagtacagagaacgcggcaaaaccaacgcgaagaatccactccaggcagtctgagaaacccgggaggtggcgccacggctggagggcaggaggatggcggcgttccaaaagggcccccgctcgtcacagacctcggtgtcctgctgtctgtcccagggatggagaggactgctccagggaagctgctggagcctgaggtctgtctggttcctctgcctgccccacctcttctacgggtgcctcttgctgcttctgtgtccccggccaactgaactcagtgggcttcgctgtacttggttccaaggtgctctggactccaggagagagtccgttttgccagtagactccgggcagccgccagcaagggctggaaagcagtcccaaatcacagctgtccatctctggataagacacactacttctgccctgcaatcagcaaacctaggcgacccagagtcccgtgccagtcctggcaccagcaaccagccgccccgctcctatgccccgtccttaccttcatcagcaggaacccagagtcgatggtttcttggtgacggcgccattggctgcgtcaaaacgaatgttgtccttgacaaccccgccggctggcgtcactcgcaggctcccggcaccaccatttcgccagccgagctatggctgggcctagtcaagcctttccaggaagaggctatgaagttccaaccatcaaccttggaagagctgtcttggaggcaggcaggtccagagccccacacgccatgggacctgaaccaagagcaagcctgggcctgggcgctggataacttccctgtgcagagccgccactcctgccaatgccatcagctctacgggagctctgctccgggctggctgctgcactgcgattccaccgggcacgcagccctgcccggagatgagaggggccaaaaacagcctcgagactctcatgtcgatgagtcaatggctgaaaccacagacgggctccagtcccctcaagaagacacagatgctaccgacggtgagatccaaagcggcctgaagctgtctggagatgccagcgcctgtggaggttga

SEQ ID NO: 140542 - DNA, 378 bp, Homo sapiens
cagtctgtgctgacccggccatactcggtgtctggggcccccaggcagagggtcaccatctcctgttctggaaccagctccaacatcgggaataatgttgttaactggtaccagcacttcccaggaaaggctcccaaactcctcatctattatgatgatgaactggcctcaggggtctctgaccgattctctggctccaagtctgacacctcagcctccctggccatcagtgggctccagtctgaagatgaggctgattactactgttcaacatgggatcacaacctgaatgtcgtggtgttcggcggagggaccaaggtgaccgtcctaggtcagcccaaggctgccccctcggtcactctgttcccgccctcctct

SEQ ID NO: 140543 - DNA, 571 bp, Homo sapiens
aagacaggactcaggacaatctccagcatggcctggtcccctctcttccttaccctcatcactcactgtgcagggtcctgggcccagtctgtgttgactcagccatcctcggtgtctggggcccccaggcagagggtcaccatctcctgttctggaggcacctccaatatcggaaacaaccctgtaaactggtaccagcagttgcccggaacggctcccaaactcctcatcttttatgatgatctgaagccctcaggggtatctgaccgattctctggttccaagtcaggcacctcagcctccctggccatcagtggcctccagtctgaggatgaggctgattattactgtgcagcatgggatgacagcctgaatggtgtggttttcggcggagggactaaggtcaccgtcctgggtcagcccaaggctgccccctcggtcactctgttcccaccctcctctgaggagcttcaagccaacaaggccacactggtgtgtctcataagtgacttctacccgggagccgcgacagtggcctggaaggcaaatagcagccccgtcaaggcgggag

SEQ ID NO: 140544 - DNA, 951 bp, Homo sapiens
ggaattcccgcttcgacgatttcgtcgcatggatggactctccccctctcagagtatgaagagagggagagatctgggggaagctcagcttcagctgtgggtagagaagacaggactcaggacaatctccagcatggccagctggggctctcctcctcaccctcctcactcactgtgcagttccagggtcctgggcccagtctgtgctaactcaggcaccctcagcgtctgggacccccgggcagagggtcaccatctcttgttctggaagcagctccaacatcggaaataatcctgtaaactggtaccagcagctcccaggaacggcccccaaactcctcatctataggaataatcagcggccctcaggggtccctgaccgattctctggctccaagtctggcacctcagcctccctggccatcagtggactccagtctgaggatgaggctcagtattattgtgcagcatgggatgacagcctgaatggttcttatgtcttcggaactggtaccaaggtcaccgtcctaggtcagcccaaggccaaccccactgtcactctgttcccgccctcctctgaggagctccaagccaacaaggccacactagtgtgtctgatcagtgacttctacccgggagctgtgacagtggcctggaaggcagatggcagccccgtcaaagcgggaagtggagaccaacaaaccctccaaacagagcaacaacaagtacgcggccagcagctacctgagcctgacgcccgagcagtggaagtcccacagaagctacagctgccaggtcacgcatgaagggagcaccgtggagaagacagtggcccctacagaatgttcataggttctcaaccctcaccccccaccacgggagactagagctgcaggatcccaggggaggggtctctcctcccaccccaaggcatcaagcccttctccctgc

SEQ ID NO: 140545 - DNA, 1279 bp, Homo sapiens
  misc_feature (1)...(1279): n = a,t,c or g
agtgtggtggaattcgctgtgggcacaagaggcagcactcaggacaatctccagcatggcctgggtctcctctcctcctcactctcctcgctcactgcacagggtcctggggcccagtctgtgcttgacgcagccgccctcagtgtctggggccccagggcagaagggtcaccatctcctgcactgggagcagctccgacatcggggcaggttatgatgttcactggtaccagcagcttccaggaacagcccccaaactcctcatctttcgtaacagcaatcggccctcaggggtccctgaccgattctctggctccaagtctggcacctcagcctccctgggccatcactggggctccagggttgaggatgaggctgattattacttgccagttcctattgacagcagcctgagtggttccacagtgctccaggcccggggggaactgagacaagaacccacttcctcctctgccaggaggagtatgaagaaagggagagatttgggggaagctcagcttcagctgcgggtagagaagacaggactcaggacaatctccagcatggcctggtcccctctcttcctcaccctcatcactcactgtgcagggtcctgggcccagtctgtgctgactcagccaccctcggtgtctgaagcccccaggcagagggtcaccatctcctgttctggaagcagctccaacatcggaaataatgctgtaaactggtaccagcagctcccaggaaaggctcccaaactcctcatctattatgatgatctgctgccctcaggggtctctgaccgattctctggctccaagtctggcacctcagcctccctggccatcagtgggctccagtctgaggatgaggctgattattactgtgcagcatgggatgacagcctgaatggttatgtcttcggagctgggaccaaggtcaccgtcctaggtcagcccaaggctgccccctcggccactttgttctggccctcctttgaggacgcttctgacgatgaggccgaactgtagtgtgccataagggactactacccgaaagccgtgatggtggcctgaaagacaaatatcacccccctaaagcagggaaaggataccccctcgccctctctgttaacgccctcctctgacgaggttaaaagctataagaacctactgcctggtttcccgnnnnnnnnnnnnannnnnnnnnnnnnagcgcgctggtaggcaacaatgttttataaagggggcgtggggacccccaccccccctcccccccc

SEQ ID NO: 140546 - DNA, 861 bp, Homo sapiens
tcactggctgttaggcagaggtctctgtttcttatcccatgggtcgctccatgggctgcttgagtatgctctcaatatggcagctgacattccataggacaagtgatccaggaacaatactttgcatctttcaatccaatcaagttgactctcaatattgaccgtcacaatcacattgtaatgaaaggtagaacatctgattaaaatatttgctttctctattataagaacttcactgggtcctatattgggcactgcctgtgtactcaactcttcttttagacattgcctgctggattcacggatgtcatcagcattcacaagacgggagagaatttctgtctcatctgtggcatcaatggtcgctttgctgtacattgtattacactggaggaggccaagtacaagttgtgcaaagtaagaaaaatctggttccacgatgctcacaccatccactaccttgactccttcgtcaaggtgaatgacactgtttagactggcaagatcactgatttcatcaagtttgacactggtaacctgggaagaattggtgtgatcaccaacagaaagaagcaccgtggatcttttgatgtggttcatgtgaaagatgccaatggcaacagatttgccccttggctttccaacatttttgttactggcaagtgcaacaaaccatggatttctcttccccgaggaaagggtatccgcctcaccattgcttttcactctgataagtggttctgcagtgacatctctgtacagaatctgtgcaagcgtttttctcagggagataccgggataaagaatagcgaggccagaaggtgttctaatcttcaggtttagtcggcattgccggatcat

SEQ ID NO: 140547 - DNA, 1042 bp, Homo sapiens
atggctcgtggtcccaagaagcatctgaagcgggtggcagctccaaagcattggatgctggataaattgaccggtgtgtttgctcctcgtccatccaccggtccccacaagtggagagagtgtctccccttcatcatttttcctgaggaacagacttaagtatgccctgacaggagatgaagtaaagaagatttgcatgcagcggttcattaaaatcgatggccaggtccggaactgatataacctaccctgctggattcatggatgtcatcagcattgacaagacgggagagaatttccgtctgatctaattgacacccaaggggtccgcttttgctgtaacatcgtattacacctgaggagggccaagtacaaagttgtgcaaagtgataaagatacattgtgggcaccaaaaggaatcccttcatctgagtgactcatgatgcccggcaccatccgcctacccccgaaaccccctcatccaaggtgaaatggataccccattccagattgaatttaagaagacctggccaagattaacctgatttccatccaaagttccgaacactgggtaaccctgtgtaatggtgacctggaggtgcctaaccctaggaagaatttggtgtgatcacccaacagagagaggcacccctggatcttttaacgtggttcacgtgaaagatgaccaatgtcaacaggtttgcccactcgactttccaacatttttgttattggcaagggcaacgaaaccatggatttctcttccccgaggaaagggtatccgcctcaccattgctgaagagagagacaaaagactggcggccaaacagagcagtgggtgaaatgggtccctgggtgacatgtcagatctttgtacgtaattaaaaaccattgtggcaggattaatagcaaacaaaaaaaaagggggcgccgtttaaaaaattacaactttaattacgccggtctgccgaggttaaagctttttaaagggggcccaatatatcatttacttgcccggggttataaagaccggagagggaag

SEQ ID NO: 140548 - DNA, 1332 bp, Homo sapiens
ttaatcatcaatatactcaaatggttctgggggttctggctcttgttcctcctcctcgatttttgggccatgtgctgccacaggttccaccagctcctcaatgtcttcactggtatccttcagaatgatgatgcctccaatagagagtggtttgaaaggctggtatctacaggtctccggcatggttaggaccttaagctgggcaggcataactcgggctgggttatccaataactggaagtttggctcaggttcttttttcttctctttttcctcctttttctctgcctcatcaacctttctcttctgattcagtgatttcttctcctgtgttccagaagacttccaggaacctgaggaggagctgccactaacagccatatttcccaatggagactgtgatgaccttggaagggggtcaaaagcctgtgatggagtcgtacacactccattacctcccttgtcttctttgcctgccttggagaaatccagagtcttcggaatggcaaaggcagctcctggatttccctttagcctctgcccccggttctggtctgacccagcacatggcagctccaaagagcggacaaaaccttgaagcaaagccaaagggccaggccagcctcgtgctgagtagccgtaaaatctgtggtgtattgagcggagcgtgcgctgcgtgtcccggcggccctgccaggtaggtggatccagccatccctttccctttggcgggagaggctgggctcgagggacgcccgcggccacagcgctgcgctgcgaagtggcagagcagagatttgattcccgggctcccaggctccacgggcctgccttttccaccttatctccgtgcagcccaagaggcagtcgagctcgagtcttgacgggagaacggagcccttcatcctggaggagaaagtcgtgctcctgttggttctgatcatgctcctggctggctgtgaagagtggactgaagccttctggggctgtaagcaggaagtcaaggctgtaggaggctgtcgtggtctcgaggaggtttagagaaaacaatggtgttctctgtgtacccttccgcgagggctggggagtataccgccgcgcagaagacgcaggccaggggagaattcgcgccgggcgcaggcggggtggcgggcagccctgggcgtgcggggtcctggcgagaagcgagccggcggcctgaggaggcgactgactgagcagcgcacccggggagcaaggaggcgcggtgaactgagcggcccctgagctgacagatacactgcgcagctggaacggcgagcgagccgacgggcgagtgaggggcgcagccat

SEQ ID NO: 140549 - DNA, 3255 bp, Homo sapiens
  misc_feature (1)...(3255): n = a,t,c or g
aagatatcaacgaggtacttcttgattttattagatatagagaattatcaattcaagtcagaagtgccacaaccactgccatattagaaagattagtacccgagagcccagactgtcacccggctggaggcctctcgccgatggctcccagggaccactgacctaatcaagggcctcctccttcacacgccaccctccaccccaacccctttatgccttcttaaagtccttcagggaggggaaccccacccatcaaggattgtccctttcctggcaccctaaactccttctgtctgctaggaaggacaggcaatgaggactgttccctacaacggatggatggcttatggggggggccacattttcaaaggaagctgaagagggatctcagcccccgtattgtccacttggggagggcagaaccccaaatcttagtaaatgaagactttctctcttgaaccattcacaggaatactgaaggtaatgaaaaaataatgtgtaaaccatcctttggagcagaggctacaaactcacatgcccgcctggaccagcaccgggcagacgtcttacatgagtgaagtgcagtgggggatgggaagggcgggggagggggtaaaggtggtgggggtgagccgcagcagacttgagatgacagcatgccccatcctccacccagaaaactaggtattttttatacgtaatctcccaagtttcaaatattggcaatacatacaaaaggttatgaagccttataacttctgccttaggcaaattccaaacttaaacaaagctccctctcccactaaaataagaaaactttaaataagatgattacaaagaaattaataaagaaatagaaaatggatagcagcttcaaaaataccagtctccctgttttaaaacaaaatcaataaaatcagtgaatccacaattcattgaaactcattcttcggctacaaggaagcagctgggatagatccactgggcaggcagccctgcagggattaaaatgagggcccactgccaaaaaggccccaaatgaggatgccgtcctcctcatcctcacaacatcctcatcagggcaggggaagggattaggggttaggactcccctaattatggggggaatagggttgagggcaccagaggcagggaaggggcccctttcttaaatatccataggaggcccctctgttgggggtcaggaccaggaactgggggggcagagggcttaaagggtgaggacccacttgctgttcccaggaaccaagggggctggggggtaggggggctacctgggggcaggccggggagttctgggagccagtgatcttaggagcccccccagcaaaacaggtttccccattgcaaccatttggcactatccctggagagagcttgaaattaacaaatcaaagttaggcagccaccttgcagggcaccgagcaaattagtaggcgccagtttgtgtgtctgctgcgtaaactgtgcatcattgaaatgaaagggagcctacttcccctcaagctagtgccctccccttcccagggaaaatcccaggagcttgcctttgcccattcccgaaagactctggatttctcccaaggcaggcaaaagaagacaagggaggtaaatggtgagttcccccccgtgaaataaacacactggatttccccagctcctaaggnaaccatcatcgattcctgtccagactcacggaacacagaggaagggattcccagaacctcacagaaaacaagagaagccggaggggctgtgtttgccattgaactttgggcttaggacctgagagctagagcaaagtccctaataaccccagtaagtcccaagccccttagctttccttctgtttggtgccctaataggaaaacccctaacaacccttaataccccaaagggacttggcaacagaaaatcggatgttcaacatgaagaaagaaaagaggctctttgttcctcaccggccatgtgtggctaatttctggtccctggccctgcagcacgccagaccgtccttggcccctggccccgaaaaagcccccaaggcaacagtgtaagtctttattttggcttgctctgggaacccaaggtcccagggaagcctgaccctctctgctctgggggactctgacagggagaaggcattggctcagccagaatgtctcaaaggtactacaattggcattgaatggaccaattctttgctgtcagagactgttctgcacattgtggggatgccccactagaatgccaggggggtgccccccacagtcactgtgaccccctcaacacacacacatttccaatgctgcctggagggacaacctgcccctggtttaaagccactgggctgtgtggccccctcatgcatttgtgaaacagaagccccagagactgagtgacatgttccaaggccatgcctcagctctgatgacttctggttcagagttcttcccagctgcactctcaacgatgggtgcccatgcatgtgcccagaacactgcagacacaccatggggtgccacagctctgcagagcctcaaagcggacagccatctgtctcagtggctcagagaaaccgagacagagagacaaaataacctccctgtgatcagacttagcaaatgctgggtggggagtaggttcccaggggagacactgttttaggtcctgcttgtcttagtaagccccactgtctagctggtaactgtgggtggggagtaggttcccaggggagacactgttttaggtccctgcttgtcttagtaagccccactgtctagctggtaactgtgagtgtggcaaggcctccaagcaaggcgggggtttctgcaaattctcccatggtagaccctgggggccaagttaagacggaacccaggcccccagtctgtaggttagagcccagggacagcgcaagggtccagccttcatcttgaagtctccggtgggctcagcaggagtgtgtacgactccatcacaggcttttgacccccttccaaggtcatcacagtctccattgggaaatatggctgttagtggcagctcctcctcaggttcctgggaaatcttcctgagcttgagcttctgcaggcagcaacatcctggttcttcctccggctccagggaccccagggaaaagcaggctagcagtccggggaggcctggcctctcccaggctccttccactggttgcccggctccggcgacatgcagggccctgcaggcggccgc

SEQ ID NO: 140550 - DNA, 682 bp, Homo sapiens
tcaaatgtcccctgtggtgctgaatgtctggaaattgtccccatagggcacagtggggaccatggccatagacctgtttgaggcagtataaatgccctctgacccctttagcagcttaactcctcttcttgcttcaggtctcagattcagcgcctctctgtttggaaaggcttgctgacctcccacgtccctgatcagagtctcttgcacttccaccagcacatccctgtgcacctcttggctctgctcttctttgagctggctgtattcttgggcaggccctttcttcagtggcaaaatgactgcgtcttgcaggggaagtggacagataaacagggagattgtgctgatgctgctgttgaggtcataggtgtttgtggtcatttctcctttggagggtggttcagaaacaagtccattcatggatctgtgaaaaaattcttctctggagaggtccagtaggaattggaaagtgagggaaagaggctggatgaacaaagggtcacaggtgtaggtttgggacacattgtggggcctgaaatttggaacctgcaactgcccgtgcccgaacacagatgcctcgatctccccataaccgggcaatggacccctgctcttgggagctactaggggcctgtgaccaacctcatcttgtgtcacaccaccagcatccagccagatc

SEQ ID NO: 140551 - DNA, 499 bp, Homo sapiens
ttttttactcttacttggttttaataatacagttaggatgggttgccaggtctggcattgggcctagatgcccaggcatcgtggagtgcctccgtggtcactgggcacaggccaccagctcctccagggcttgctctcggcggttgccatggaccagcagcacctccttgatccggtcctgctggaagcccatgtcactgaactgcttgccctcttgcaggaaggtcctagtgggtgactggaagtaggatagggatggggagttgggtgtggctggaaaaagcgatgacaccagctctgagccatgaagcatctttctaattccaagatggagctggatggggtggggtagggtggagcagagcaggggccttccggtccagtgcccctcacccttccttcttcccaggactgccggaagcccctgtcgattgaggcagatgacaatgggctgttccccctggacggttcactgctctgtcggaagtgccacactgct

SEQ ID NO: 140552 - DNA, 588 bp, Homo sapiens
tcactgggcacaggccaccagctcctccagggcttgctctcggcggttgccatggaccagcagcacctccttgatccggtcctgctggaagcccatgtcactgaactgctcccagaggcgcaggaactcccctgcctggctctcggagaactggaacatctccatggcctcatccaccaggccttcctcatatccctgacgtaacaggcggtcacaggcactgaggtagctgagaaactggctcactctctgcctccctgtcttctgcagagctatgatggcccttcgcaggggatatcccagggcgaccactggcccaatgaggtcttgctcctcctggctcagggcggacagcaggtcagccgcagtatcagggtgtgacttgtgggggttgagaggttggggtgcccccccaagaggtggcagacaggtgtacgggctgagggacttggtgacagatgagcaggggtaggtcttcccaaccaggccctccttcttgaatttggttgggctggggtttggcagggcatggagcaggggaggacctcggcacaccaattgaaacacaccttgtaaatctgtactcat

SEQ ID NO: 140553 - DNA, 1987 bp, Homo sapiens
ctttcaactctttcagcagattctgctgctgttaactgtcacccttgggtattatttgtgtttttacaataagtatgcatcactttgttactcttacttggttttaataatacagttaggatgggttgccaggtctggcattgggcctagatgcccaggcatcgtcggagtgcctccgtggtcactgggcacaggccaccagctcctccagggcttgctctcggcggttgccatggaccagcagcacctccttgatccggtcctgctggaagcccatgtcactgaactgctcccagaggcgcaggaactcccctgcctggctctcggagaactggaacatctccatggcctcatccaccaggccttcctcatatccctgacgtaacaggcggtcacaggcactgaggtagctcgagaaacttgggccggaagcgggcagagagggagggagggtaagaggagcagccgggggcagcagacagggcagagaggcactccaagggcctgagctgagggccaggcaacagggcaagccaccacctgcagcgtggccccagagagcccgtgaacccacagaagggggatagaggctttctctgagtgcctggcgataggcagacaatgggtcttcaccaactatgccaagctgggggctggactccaggaaaagggctgtcagggtgggctagggtgttcatagaacctaggtggggagcaggacaggcttcaaacacagacatcccacctaccacccaacgcaattcaacattcatgcaccacccacccctgtctgggagcacccattcgtgtgaaggtgcctcctcatccgtccacacctgtgcacccctactgtgcccccagatgcatctctctcatccaggactcctgagccactactatgcaactcctgcaccagtgctggagaaggggtgtggggtaggcaaagaggaggattccacaggcaggaaaaactgttcaggtcaccccacggttacgtcatcaggggcccaggataaaatgctggctccttaccaggcagggctcaaaggcctgctccctgtctatggccttggcccctccctcaccctccaggtctctgcagatgcagctccctcagccaaggctggcctccttccctggtccgtgggaagcttcctgccccctctatcttcctgggtgccgtcccttgtgcccccatagcaccctatgcttccctgttacagcacatataactttgtaattgcttcactcaatctttctcatccacgaagtttttgctccatgagggaggggctgtgtcagtctcattcaccacagtgtccccatcatccagcatggtggcagaaggagctcaataaatgtgtgctgtgtttataaaatgaatgaagacctgccttcaaggaactcacagcttagtgggggagataacaccagatacaggaccacatcagtgccaggcaaatcaaagcaggatttatggggtgtaggtgccaaatgaaggctccagactacaggaattatgagtatatgtggagaagggagagtggggtttccgtagaccttcagagctgggatgaaagtgcacatcatctagactaacagttgtcaaattgtttttggctcctgaagtgtttgtcttagcacaaggaggcttcagcaataacaggctaagattagagctgctctgggagaaccagggccaggggcatgggggcccggagtccagtgctcctggccgaggtactgcccagtacagctagacctgctctgagcacgttttgaaaaccaggcacccatgccctccttccacagttgaggaaactgaggttcaggcaaggcaggtgccttgtccggggtcccaggactaggtccccgattatgtaacctgtcatttaatgccttgtccatcagagggatcagctgctagaggacgggcttttagctgtcttggtggatgacagggtttccaaaggtgaaagcgaattcc

SEQ ID NO: 140554 - DNA, 507 bp, Homo sapiens
gtgtcccccaaactcctcccgtcttacgcctccaggccctacctggttcccaacgccctctcatcccccagcgtcccacctgcactttccgcctcttcagcgccgccgcgtccagccacacgccgcaggcctcctcctcggggcctgtccgcctcatggccgctgaggagacgaagccggcaggacgccggcgcaggctcccggcgcctcagggaacgccagaaccgcggccggcgacgttcggatctcgcgccaacgctgggggcggggctacgtcgcgaccgccccgggcgccagccccgccccggcaaggccctggccccgttcgctgtgccccgcccacgcactaactttcgcggccggtcccttgagtgcgtgcggcatatttccctgcgcggaggagtgcgtgttctttgtgatccgctctttcaagagcggattcggaagctgctgtgtgaacggttctcgacagcctcagaaatgtacattttctttttgctgtattga

SEQ ID NO: 140555 - DNA, 1347 bp, Homo sapiens
atggagtgggggtgggattctgatgacccgtggagcttgcagctttatgaggaagaggagccccggaaggtggagagacattggaaagacaaaggagacaattcttctagaactggatttcccacaaatacagcccagggttgggtacattgtctcatcatccatgaaggaccctcggtgtaccgcatctttaaacggtggcaggctgtcaaccagcagtggaaagtgctgaactatgacaagacaaaagacctggaggatcaaaaggcaggaggcaggaccaacccccggacctcctcatccacccaggccaatatcccctcctcggaagaggagaccgcaggcacccctgcccctgagcagggccctgcccaggctgccggccacccctcaggccctctgtcccatcaccactgtgcttataccatcctgcacatcctgagtcacttgagacctcatgaacagcgaagtcccccaggcagcagccgagagctggtcatgagagtcacgacagtaggcagtcaggctgatgctcagtgctttgtgctccctgctccttcccgcgtagccaggtgggcccaagggtgcctggcagggagcactacccctggacccctcctgctcgctctggggaccctgccagggaaggccactgggtgttcacctgcaaagtttctggttgtcactgcacagtggtcgcgtcatccatggaatagaatatggaaactaggcaatccttggggtgctgtggacagtagagtgaaactccggaatgactccaagtgtgaggaactggcctcgttcagggtctgggctgccttggctggtggtcagtgggctagctcagtacctactcatcccaccatgggcccccatcatgggtcctccctcctcccacatctactcctcacacagcccatcacagcgctgagaatccactggctttcttcctgcccaagccaaccagttgaggactgcagcattcaatatcctcctggctcccaaccacagttggtcgaggttagagttgggataccagctcttatgtcccaggcagtgatccttccaaagggtgacttgttgagaggggaaccctctgcaccctccaacacaggctgctatccctcttccaagaagaaatgcagaaatcgtagagctgccactgccctgagcatgctgagaggatacacctgtctgctgaattatggtgactttattccccccaacatgtgccaccttactgctactattattgtttttcctggattaaataagctaccatgggtgtctgactttaaaaatggggacctatggaagcagtcagaaccaggtcagaatcccttgtga

SEQ ID NO: 140556 - DNA, 1102 bp, Homo sapiens
tggtagggaaagaagttttattttcaagcttttaagagaatattacaaacaacaagagagttttaaaaaaccctaaaaactaagtttaaaaaagtacttgacaagtgtccttttaatacccatggatgacgcgaccactgtgcagtgacaaccagaaactttgcaggtgaacacccagtggccttccctggcagggtccccagagcgagcaggaggggtccaggggtagtgctccctgccaggcacccttgggcccacctggctacgcgggaaggagcagggagcacaaagcactgagcatcagcctgactgcctctttggggagggttccaaacagggagggttccaagcagcaaggaatacttagattgggctctactccactccttggggcacactggtcaagctcctcccaaccactgcagctgctctcttggaagcccgtaggtcaggggtgccctacccgtgaggggactgggtctgtgcatgtgccaagacaagaaagggctggcattgcacatgccctggccatggtggggttgggtagttgggaaagtttgctccgggattgacagcttccaaagctgaagccacagcagcagaactgtgcttgaaatatccactggaaatctgtacttttctctaggggtgtgtgtgtgtgtgtgtgtgtgtgtgtgtgtgtgtcctgtaaacatctttgaaccaaatcactataaaataaattaacaagggcacagaaggacacccttttccaaacctaagccctcttttagcccacctgaaatcgggagttccatttggaagttccttcaggaaggagacacactctccctctggctgctcacaccagcatatccctccctgagcatccctccctgaccatccaccccaccatccccacagccatttgtcagcgaatcttgcccatccaaatgagcccaggagccccaaaggcagtgtgtccctgccagctcacccgtgcctcctccttttctggctgcctgcagaacacagccccaggagaaacaaaaccaaacagggtgagagcagggcagaccacagatgcttttcctcttggcccccttggcctccggcactgcca

SEQ ID NO: 140557 - DNA, 491 bp, Homo sapiens
  misc_feature (1)...(491): n = a,t,c or g
gcgggggcaatgcgaacctagtncgtgtggtggaattcgaggattgctttaaggcactgatttggataaggaataactccatcaccacagaagggaatatcattgtctatgggaatacaattgatacttacaccaccgtggagacgctcttaaaccttggcgtgagcggcagccgcatccacctcgtgcagcccccgcccgcccccaccatcacctgcatcaacaactactcggtggagagcgccgtggcggacgcgctaggagccgccggagtcactatgtaccgggatgcgatcctggcccagtggaatgacggcctgcacccagaccccatctacagcgcctccttcaccacacccaccaagcctttcagactccagtgctctatgttcttcagcttctgtgagaagaatgtggattatgaaacgtttaaagccctcaatgatgcatgtcttgtgtatgacagtcgacttgtgattgataccaacttc

SEQ ID NO: 140558 - DNA, 2187 bp, Homo sapiens
atgggggagcggtctgtaggagccttggaggcccagctcccaccccagtgtgtccagaagcacagcaccatggctggaaccaaacccttgactgtacacccagtctttgtggaactccaagaatcaggcttcaattgtactttgagccagctacactgggccccttcaaccctcagccttctctccaggcaagtccataactgcagctgtgggcaagagcttaatgtgccacagagtaaagctgcaggggcagctgggcacacatgggcagatgcccgaggctctgggcagctggctgggtcttccactcagtttccaaagtacgcagtcgtggcagcagctggaacctggcaggcagaggctgatattagtcaacacctgacaaacagggaggttcccaacagcagtcagcggcggtacacggggaaagttccttgcaaccatttcactctcaacgaggaagaggattgctttaaggcactgatttggataaggaataactccatcaccacagaaggtgattttctccaggtctggtgcttaatgactcccccaggcacctctcagcatcactggatcacagtccaaatctcagagcagaggaggcctaggacagaaagcccgtccccacctgagccaagaaccaacaaccacagacagaattatacccacagaggctcccaggaaatgcagcaaagagtaggatccagtgtgagaggaggcctcgagccactgctagcttatttccaagtcagcgatgagatggtggtgttgcagggcttttccgtagttcagctaaagatggggtccttgtccgtcccgtggccacgaaaacgtagcctcgcagacggtttgaaggggaatatcattgtctatgggaatacaattgatacttacaccaccgtggagacgctcttaaaccttggcgtgagcggcagccgcatccacctcgtgcagcccccgcccgcctccaccatcacctgcatcaacaactactcggtggagagcgccgtggcggacgcgctaggagccgccggagtcactatgtaccgggatgcgatcctggcccagtggaatgacggcctgcacccagaccccatctacagcgcctccttcaccacacccaccaagcctttcagactccagtgctctatgttcttcagcttctgtgagaagaatgtggattatgaaacgtttaaagccctcaatgatgcatgtcttgtgtatgacagtcgacttgtgattgataccaacttccacaccaacgacatagccatcagagctgctggctccctcaccaaattctccaatagatactactcaaatgagtggactcacagcaacttcagttccaaagaaattggctttcagctggcagcagctatgctacatctctttgatccaacccttgagcctgtgaccgagccaccagctaatcttgaccggctcatccccatgtacaagggagccaagattcaaggcctagcaactactgatcttcatactgtctcagtcactttgccttttccagaatgtgatatagttgcagtcatacagcctatcgtcttttcagatcctgtgagtcaggaatttggacagggcacagtgggcacagattgtctctgctccacactattcacagccttagatgggaagactagagggttagatcaatggtccagatcatctgaaggcttgtttactaaatccgaaagcttgttactcagctgggctgggatgactcaaggaccggaagtgttcaccacagcctccccacctgggctgtcctcaagtgcctgggcttcctcacagtatggtggcctcagagtagccagactgctcacgcagtggctctgggctccaagtgcaagtgttgttactagcaagctggaagctgcgttgccttttatgacccaccctcaaaagtcccacagcatcacttctcccactctctctgttggagcagtcacagcaaccaccgagattcaaggggtggggaatagagaatccatctctcaaggcagagagtgtcagggtcatattgcgggacgcctgcagcctgcagggctcctcaaggacttgacaagtcaccaccaactaagtgactgtgaccctcgtcttgaggtgcacagcctcggccacgtacatggaatccaagtcagccctcctaaacacaaagaagtcctt

SEQ ID NO: 140559 - DNA, 1403 bp, Homo sapiens
taaagataaaataggtgatttattttgtaactgtgaaaactatgtttattttgaatacaaatcttgaattatctatggatgagtttgaaataaatcatagaagagaatcactttttggatttttaatccaggtccttgtgtgtgtatgaaatacacacatgatcttccttaattagccatggaagggcaaaagtggaccaaaaacaggtcagctaagacaggcatgtctggcttctgggctgtagctcagcatgttgtaggctagagtccagtgaccttcactggcaggctgcctacagtccatgagaccctaggcagtcaggccactgagcctctgtcctccagctgaaaataatgaagagccacacggccttctccccggtccatccgtcagggtgacctccaatccctgcctggaaaaccctgaggggccaacatgagagaaatgccttttccaagggagcccaaacttgatcctataagccttatcctcagggtatagtccaaataacacttatgactccaagcataggcagccatgcttactactctctaaagaagccagtacttctgatgaggaattgaaagtcaagatgggagctctgcttttgtatcccattccccaataaatagagttcagcttatatgttaaatgaattttcacataaatttgtccacttgaacttctgcttctttttgatagttgcctagagatggttctggagagtaggttcttttcccatcgtgatcagcaactgctcttcaaagtacaggagctggtccacttcaaaacagtcgctggcttgaggcaccactttttccaaacactcgcggatctctgcttcgctagcattctgatgccttgctctctttgaggtaattatagacctctttcaaatacttctgtccccagcttctgcatggctgattccctcatgcgtttcatcttggtcctggccaatcggcaactgttgaaaaattgggtgggtcctggggacatgtccttcagccatgggtggtgatggtctttgtgtctagagaagtgcaaacccaggacattttcccaaacacctggccaacgcttcgatatcaactgtcctgttggtttgttctgtaagcaggctgggatccctcattcctgatttctttctctggtctttctaacgctatttcttcttcctcctcatcactctcttcacaataggaatcaaatgcatcagcgtagtactcttcagccacaagtgggtcttctgggatctcatggtatccaaggtcagatgtggcatcctctacaattgattcaagttcgtggaggtccatggaaggaataggctgagactcaggcaggttctctaaagttggttcatcagattcctcttccctgccttgccacctctcttcat

SEQ ID NO: 140560 - DNA, 484 bp, Homo sapiens
  misc_feature (1)...(484): n = a,t,c or g
cattcattcagcacggggcaggggggccatgccaccagcctgggggctcaccaggcccctggatgcacacaactcaggcagggcacctggcttcaggctttggatgtctccaaaccaaaaacctcccactgaaaatccaggtgtgannnnnnnnnnnnnnnnnnnnnnnnnnnnnnnnnnnnnnnnnnnnnnnnnnnnnnnnnnnnnnnnnnnnnnnnnnnnnnnnnnnnnnnnnnnnnnnnnnnnnnnnnnnnnnnnnnnnnnnnnnnnnnnnnnnnnnnnnnnnnnnnnnnnnnnnnnnnnnnnnnnnnnnnnnnntccaggcatggccaagcgattcatggctgggcaggcccagtcccgtcccgctgcacgctgaccaccgtgccctgcgctcacgcctgcaagccactcagctggaacctcgcctcctcggatatgccganctgttccagggaattacgccgctctatcaggtaatctt

SEQ ID NO: 140561 - DNA, 1516 bp, Homo sapiens
  misc_feature (1)...(1516): n = a,t,c or g
atggggtctcgctatgttgcccaggctggagtgcagtggtgggatcatggctcactgcagcctcgacattccgagctcaagcgatcctctcgagtagctgggcctacagggaacccccggtccgcgtcggccgccgccctcaaccgcctctactcctcaccagagcccaaggccgcgttatctcctcctcgtttcgccacctccacgacttcgtttggcgaacggcgggcaaagaaagcacttccggggcaaatgagacgggccctctgcctgagcggggacggcggccgggagggcgcggcccgggttcccgttccccgcggagccatgcggtacaacgagaaggagctgcaggctctgtcccggcagccggccgagatggcggccgagctgggcatgatgtgccccatgaagggcagcgtgctgaagcggcggctggtgaagctggtggtgaatttcctcttctactttcggacagacgaggccgagcccgtcggagccctgctgctggagcgctgcagagtcgtccgggaagagcccggcaccttctccatcagcttcattgaggaccctgagaggaagtatcactttgagtgcagcagcgaggagcagtgtcaggagtggatggaggctctgcgtcgggccagctacgagttcatgcggagaaggctcatcttctacaggaacgaaatccggaaggttgacgggcaaaggaccccctgggaacagtttcggcattatccgaggaggccaggttccagctgagatggcttgcaggcgtgagcgcagggcacggtggtcagcgtgcagcgggacgggactggccctgcccagccatgaatcgcttggccatgcctggatctgttttgttttggtttttggtttttgggtcagggtttcactgtgttgcccaggctagagtgcagtggtgccacagctcactgtgaccttgaccttctggactcaagtgatcctccttgccctcagcttcccaaattagcggggattcaccaggcatgagccgccacacccggcccatcacaccctggatttttcagtgggaaggttttttggttttggaaaacatccaaagccttgaagccaaggttgggttttgggcaggggcctgcatttttattgaaaactgcccagcaagctgcngctccactggggcccccaggatcccacctaactggggctgggcacctggtgccacggtgctgctgccgccaggataaggcgcctttcccacagggtgccctgcctgagttgtgtgcatcccaggggcctggtgagcccccaggctggtggcatggcccccctggccccgtgctgaatgaatgtacagagccagacaaagctgtgaatggcctaggggctgagtcccacaccatctgtgaattctcctgcagacanggaagggccctggctgtgcacctggggaaagtggttgccctgggggccagggtgcttgttcttgttcaaataaaggtacctcttttccacaaaaaaaaaa

SEQ ID NO: 140562 - DNA, 466 bp, Homo sapiens; identical to SEQ ID NO: 133188
  misc_feature (1)...(466): n = a,t,c or g

SEQ ID NO: 140563 - DNA, 1719 bp, Homo sapiens
atggagaaaaaaatcactggatataccaccgttgatatatcccaatggcatcgtaaagaacattttgaggcatttcagtcagttgctcaatgtacctataaccagaccgttcagctggatattacggcctttttaaagaccgtaaagaaaaataagcacaagttttatccggcctttattcacattcttgcccgcctgatgaatgctcatccggagttccgtatggcaatgaaagacggtgagctggtgatatgggatagtgttcacccttgttacaccgttttccatgagcaaactgaaacgttttcatcgctctggagtgaataccacgacgatttccggcagtttctacacatatattcgcaagatgtggcgtgttacggtgaaaacctggcctatttccctaaagggtttattgagaatatgtttttcgtctcagccaatccctgggtgagtttcaccagttttgatttaaacgtggccaatatggacaacttcttcgcccccgttttcaccatgggcaaatattatacgcaaggcgacaaggtgctgatgccgctggcgattcagatttttgcactgagtggccagccgcactggacagtgacgagaaatgtgagaagcattttccaattgaaattgacagcactgattatgtttcatcatggaccatctgttcggaaccccagagcacgagtagtagtcttaagatggctccgaatcaccctgcatgaatctgctgcagtggagggtctggccgttttcccaccagcccggaggcacagagagccagaatacagcattccctctccatcacaggcattcacaccagcagtgctggctacacgtgtgacaggacagcttggcggtcacacccaaatccagaatccaacagtggcaccaacaatcctaggaaatacacccaccttccatttaacttgtttcagaatcttttcccttccaagacatctttttcccaaagataaatggcgaaccctgggagcgcccttcctccggacgttactacttgtaggaacagagtcatccgtccatttgtctggtatagatccggatttgctggtttttgaacaatctcccacatatctaaatactcgttcttcatccaatagatgggacagactaaggattctaaaagctatgaatttagataaacaaaccaccacgataaatggtatgctgccatccacagaggctccatcctcaaccacgcatcaagatttggttgtaaacacaaacagtaccagttattctaaggaattaaccacagatttttgggcaagatttacttccctgaatgagtccattaccacaaagataaataaggtgtcaccaagtactgatttcatcagcaatccagataataagactatttctcctttctttgaacccatagacacaaaactttctcatatgcctgttccacctggactcaacagtagcaaacaattactaaacaaaaccaaaggatacaatagcagaaaccacacatctgcaaatgaagatgaggtatctgtgacttcaaagacttggctggtttctgtggccctttgcacctctgtcatctttctcggctgttgtatagtcatcctggcatctggatgctgtggaaagcagcagggccagtataaaccaggacagagaaaatcaggatccttgcaaattaaaaaccgtaaccatatgaaggagaactcttcatag

SEQ ID NO: 140564 - DNA, 911 bp, Homo sapiens; identical to SEQ ID NO: 133189

SEQ ID NO: 140565 - DNA, 756 bp, Homo sapiens
ctgacactgaacgccgcttgtcccctccggcttgccgtcctcgcagccatggcggccgccgcgctccccagaatggctgtctctgcagtcgagggcaaggactctgcacgcgttctcctcgtgacgtctactaggtcattacgatcctgacacctatgctggcggatagaacacgcagaattgagaggccacccaagaagaaaggcactacctccttaggacagagaaaatggctgttgacccaggactggcctagtgtttacccagttgcagcacccatttaaaccctctgcagtaccttcttcctgttccgaatgggttatccagtaaaaaaagggcgtgcccatggcaataggagggaaatcgtagaacttttaaagatttcccaatttttctggattttgacttcctgtaggcaattaaaaaagcacttgtgaagcccttaaagattttttgcactgagtgggccagccgcactgggacagtggacgaggaaatgttgaggaaggctttttccatttgaatttgacagcactgattatggtttcatcaggaccatcctgttcggaaccccagagcacgagtaagtagtcttaagagtaaagctttctcagtttgaatttagcatgatcacgcaaagaagacactaattacacttgtaggagagcgatactgcaagacaccagatgtgcttaccatcaaacagaataggtggcctttaaggagccagatcaccataatgccagtgtatctatt

SEQ ID NO: 140566 - DNA, 3073 bp, Homo sapiens
tttgagaactaacatgtttatttagctgtatgtatatatgcttaactacacccgaggaagctgtagagttagaaaaacatgaaccattaacagatgtggcctccctgcagaacttttactttgaaaaagaagtacgtctgaaccagattcacatgtttgatatttggatgcagagaaaatggggcagaaagcatcgcaacagttggctctgaaggacagcaaagaggtgcccgtcgtctgtgaggtggtcagtgaagctatagtccatgcagctcagaaactgaaggagtaccttggatttgaatatcctccaagtaaactctgcccagctgcaaatactctgaatgagatcttcttaatccatttcatcactttctgccaagaaaagggagttgatgagtggctgaccaccaccaagatgaccaagcaccaagccttcctgtttggtgcagactggatttggaccttttggggatccaacaagcaaataaagcttcagctcgcagtacagactctgcagatgtcttcacctcctcctgtggaatctaagccttgtgacctttccaatccagaatcaagggtagaggagtcttcctggaagaaaagtagatttgataagctggaagaattctgtaacttaataggagaggattgcctgggtctgtttatcatctttggtatgccaggaaagcctaaagacatcaggggagttgtcctggacagtgtcaaaagtcagatggtgaggagccatctgccaggagggaaggctgtggctcagtttgtcctggaaactgaagattgtgtgttcatcaaagagctgctcagaaattgtctgagtaagaaagacgggctgagagagggcggtgccagcccagggagcctgcgcttagcggccccaggcccgcccctgacactgaacgccgcttgtcccctccggcttgccgtcctcgcagccatggcggccgccgcgctcccagcatggctgtctctgcagtcgagggcaaggactctgcgtgcattctccactgccgtctactcggccactccggtcccgacacctagcctgcgcgttgatgacctccatttaacagagattgtagggatgcttgatagcgtgcttaccccggaggactctagtggaaaatacagatttattagcggagaagtgctatgtaggatcactggctgctttactggggtaagagtggaagccaaagatctgtttggaggctgttgcagtaatccaaatgaggtgatggtgacttggattaaagtaatagtggagaaggaggtgtggttgtatttgcgatatattttgaaggcactacctcctaggacagagaaaatggctgttgaccaggactggcctagtgtttacccagttgcagcaccatttaaaccctctgcagtacctcttcctgttcgaatgggttatccagtaaaaaagggcgtgcccatggcaaaggagggaaatctagaacttttaaagattcccaattttctgcatttgactcctgtagcaattaaaaagcactgtgaagcccttaaagatttttgcactgagtggccagccgcactggacagtgacgagaaatgtgagaagcattttccaattgaaattgacagcactgattatgtttcatcaggaccatctgttcggaaccccagagcacgagtagtagtcttaagagtaaagctttccagtttgaatttagatgatcacgcaaagaagaaattaattaaacttgtaggagagcgatactgcaagaccacagatgtgcttaccatcaaaacagataggtgccctttaaggaggcagaattacgattatgcagtgtatctactaacagtgttataccatgagtcttgggaatactggaaggaatggggaaaaaagtaagactgaagcagacatgggaagagtatatatggggaaaatagctcatcagaaaggaaatatcctgggaaacgcttctccagatgaaagctgctgaggaaaaatatggggaattaattaaagaagagctccttgggtactaaagaaattgaagagtacaaaaagtctgttgttagtcttaaaaatgaggaggaaaatgaaaattccatttctcagtacaaagaatccgtgaagagactattaaatgtgacatgaattatgggagtagaaaaaatctgcttggatttattaattttatggatatatgtgatccagtatcctaatttggatataaaattgaaaatgttaaaaaatcatttttttttcctcagggtttaaaattattttccctccatactaatgcttaatggcaatgattactcccagagttttttaatttttacactggggcaatagactaggaggtctctgatttcttcttgggtctgaagtgttttgattttatttctacataatagctttggtattcatgtatatacatgccatttaattgtgatttgatcacctttcccatttctttcccccacaggctggcatttccagtagtggctttggaataatgggttttgggttacccctgggaaggcaggccccagaaccccatttcccttgacttggcaggttccgggctgtgttccacatgactgctgtctaggcggatgcattttttcacatttgtccaactcctggttaggaaaccagggtccctcagggggtattcctcctaaccctgatattttcctaaaaagatatgttggattccaactttgtttagccatccctactttcctagattgtggggccccatttttccccgggcccaagcctacccagaaaagtagaagtgggagattaccctggtatgtatctcctccgggtgccccagttaagagctgccacagctcacggaaaaagatgaggcataacggaccttgaatgtaattggagtaagtgacaaaataagaactaccctgggaaaccctgcattcaatgtagctgtcaattcagtatttttaaggtacccctgtcaggctgtttcttaccacttcgatggttgtgattaatttaaaatcaaaataaaggaattacctgagtttaaaaaaaaaaaaaaaaaaa

SEQ ID NO: 140567 - DNA, 1253 bp, Homo sapiens
ctcctgcttccaccatgtccatcagggtgacccagaagtcctacaaggtgtccacctctggcccctggttcttcagcagctgctcctacttgagtgggcccagtgcccacatcagctccttgagcttctcccgagcgggcagcagcagcttccagggtggcctgggcagaggctatggtggggccagcggcatggaagtcatcactgctgtaatggtcaaccagagcctgctgagccccttcattgacaaggtacagttcctggagcagcagaacaagatgctggagaacaagtggagcctcctgcagcagcagaagatggctcagagcaacctagacaacatgttcgagagctacatcaacaaccttaggtggcagctggagactctgggccggaagaagctgaagctggaggcagagcttggcaacatgcaggggctggtggaggatttcaagaacaagtatgaggatgagatcaataagtatacagagatggagaatgaatttgtcctcatcaagaaggatgtggatgaagcttacatgaacaaggtagagctggagtatcgcctggaagggccgactgatgagatcaacttcctcaggaagttgtatgaacaagagatccgggagctgcagtcccagatcctggacatgtctgtggtgctgtccatggacaacagccactccctggacatggacagcatcattgctgaggtcaaggtgcagtacgaggagatcgctaaccgcagctgggctgaggctgagagaatgtaccagaactagtatgccaagctttcccagctggaggctgccctgcagcgggccaagcaggacatggcactgcagctgcatgagtaccaggagctgatgaacttcaagttggctcaggacatcgtgatcaccacctacaggaagctgctggagagcgaggggagctggctggagtctgggatgcagagcatgagtatccatatgaagaccaccagtggctatgcaggtagtctgagctcggcctatgggggcctcacaagccccagcctcagctacagcctgggctccagctttggctctggcgctggctccagctccttcagccacaccagctccaccagggccgcggttgtgaagaagattgaggcccagaatgggaagctcgtgtccaagtcctctgacgtcctgcccaagtgaacagcggtggcagcccctcccagcctgcccctcctgcggctgcctcagagcccagaggcaggctgc

SEQ ID NO: 140568 - DNA, 1282 bp, Homo sapiens
  misc_feature (1)...(1282): n = a,t,c or g
ctgcctgcgccaagcttggcacgaggaaaatctgtcttcctccctagacagtaagctctctgaagtcaagaaccatagttgttttgttcactactgtatactcagcacctaatagtacttggcacataagtactcagggactatttgtcaaatgcaagaacatatgcccctaaagcagaagtcaggaaaaccagaaaaaatgcctttaagtattacagaaatgccacaggcctccacttaaattgaaaagcaagctaacccctcttgataaaaatgtggattgagatcaagaagcagcttctctgctccttctggaatctccacctggtttagcctgctgcctccactcctgcctccaccatgtccatcagggtgatccagaagtcctacaaggtgtccacctttggcccccaggctttcagcagccgctcctacacgagtgggcccggttcccgcatcagctcctcgagcttctcccgagtgggcagcagcaactttcgcggtggcctgggcggcggctatggtggggccagcggcatgggaggcatcaccgcagttacggtcaaccagagccctgctgagcccccttgtccttgaggtggaccccaacatccaggccgtgcgcacccaggagaaggagcagatcaagaccctcaacaacaagtttgcctccttcatagacaaggtacggttcctggagcagcagaacaagatgctggagaccaagtggagcctcctgcagcagcagaagacggctcgaagcaacatggacaacatgttcgagagctacatcaacaaccttaggcggcagctggagactctgggccaggagaagctgaagctggaggcggagcttggcaacatgcaggggctggtggaggacttcaagaacaagtatgaggatgagatcaataagcgtacagagatggagaacgaatttgtcctcatcaagaaggatgtggatgaagcttacatgaacaaggtagagctggagtctcgcctggaagggctgaccgacgagatcaacttcctcaggcagctgtatgaagaggagatccgggagctgcagtcccagatctcggacacatctgtggtgctgtccatggacaacagccgctccctggacatggacagcatcattgctgaggtcaaggcacagtacgaggatattgccaaccgcagccgggctgaggctgagagcatgtaccagatcaagtatgaggagctgcagagcctggctgggaagcacggngatgacctgcggcgcacaaagactgagatc

SEQ ID NO: 140569 - DNA, 614 bp, Homo sapiens
tccaagtctgcttaaaggttaattgattaaagtgggtgggtcctcatgtttactaatgtgtgttgcagctcttttggtacaccagaaggccagaatggaacgacttcaaagagaacttgagattcaaaagaaaaagctggataaattaaaatctgaggttaacgcaccctctccctcatccaccgctgtcacctcctgctgctcttcctgctgctcgtgtactcgttaggtgcggacccgccacctcttttgtgaagcagcagctgaggagactccggtgttcaccatggccaacgaaaagcccacagaagaagtcaagactgagaacaacaatcatattaatttgaaggtggcgggacaggatggttctgtggtgcagtttaagattaagaggcagacaccacttagtaaactaatgaaagcctattgtgaaccacggggattgtcagtgaagcagatcagattccgatttggtgggcaaccaatcagtggaacacagagaaatctttcatgaaagaaagagtcagtcgatgcagccagcttcattgttgtcttattttaagaaattgccccagtcaccccatccttcagcagccaccaccctgatcggtcag

SEQ ID NO: 140570 - DNA, 1415 bp, Homo sapiens
tcaccgcgccgtatgctgagcaccagcgaacgccaggcccgtgcacgtccaagcgcggtctctgtccggatcccccatggcccccaggtcccgctttctgttcccggccccggacgcccgcggccagttctccgcgaccctgagaatcaagagccaagcatcgggtaggagctgctcaccttggtctgggcctggcggcgcccgcagagccggtccgccgggtctctcgggtacccaacaccgctcttcggcccaacgtgtcgctggggcaaccacccagacgaaggaagtgacatcaccttcctgggtctttggagaggggctcattattggtcgcttgtgtgcatgtgctgttgcccttcctgggtgccactcttgtctgcttgccaagatgtcttgatctggctttatcagcatagaacaaataaagggcctctcccaggaaggtttggcaaaacactctccatttagaagcaggggcagtgacaagacccgaggtttgccactcaagcagcaagaagggcaaggagccagtttcatgtcctcatcctggaaggatggccagggctccacagggtcctgtggggggctggcaggagcagatctgccctcctcttgaggaagcaggccaccaccaccaggaagcaacagatggtagcgtacaggtagagcccccacgtgcagctgccccgcagccccagacaccttggaaaatcctgaagatgtgcttttaattgaaagaattctgggtttaggtttcatttttattttgtctttttcaaattcctcatccttattttgagattcagagaaagattttacaacaatgtcttcacacccatcaggtgccatttcctcttcatttttgatggcacacactggctcatctttggttatgttaccgtttgatttattggttttcaaaaacaatagttttgaaggattcttttcttcatcatctgatatatgaaagtcattcatttttttattaactgaattttcatctgctgaagtgtcagaaaaatcacctaaagaaacaatctcatcactgtcaaagtcatctgagtattcagaactcctttgtctggctgagcgagctgtaattgctcttattagctcatcctggaaagtagttcttttggtaacttttggactctttgtatatgccaaagtggtgctaaaaacttcatcagacatagtgtattttttctcgttacctttataaaatagctaattattagaattcaccttctgatagtagcttggtctgggcctggcggcgcccgcagagccggtcctggtccgagcgaggaggaggggctaataacagaggcggagggcggttgctaggaaacagcgtcttcgggaggaagtgacttccccaccgccgggtctctcgggtacccaacacgaaa

SEQ ID NO: 140571 - DNA, 585 bp, Homo sapiens; identical to SEQ ID NO: 137115

SEQ ID NO: 140572 - DNA, 1104 bp, Homo sapiens
cccaacatggcggctccccaagacgtccacgtccaggatctgtaaccaagagattgtcaaatttgacctggaggtgaaggcgcttattcaggatatccgtgattgttcaggacccttaagtgctcttactgaactgaatactaaagtaaaagagaaatttcaacagttgcgtcacagaatacagccagttctctatcaaagggcatttatttggactgcttccacatttttttttaagctaacttattccctgacagacttttcttcaactcagcatgacttcaactctccaactacacctgttaccttcagtgacctggagcagttggctaaagagcaagacaaagaatcagagaaacaacttctactccaggaagtggagaatcacaaaaagcagatgctcaggaaaaccaccaaagagagcctggcccagacatccagtaccatcactgagagcctcatggggatcagcaggatgatggcccagcaggtccagcagagcgaggaggccatgcagtctctagtcacttcttcacgaacgatgctggatgcaaatgaagaatttaagtccatgtcgggcaccatccagctgggccggaagcttatcacaaaatacaatcgccgggagctgacggacaagcttctcatcttccttgcgctagccctgtttcttgctacggtcctctatattgtgaaaaagcggctctttccatttttgtgagatcccaaaggtgccagttctggccctttcagctcctgtttcaggatctgtcctggttcctgagctctaggctgctaagctgagccacacacccctccgtttgcaccagttgcctgcaggttggatggaacacagtgccccacttttctgcaagtagctggcttgtaaagggtgaacagagccatgggaggaaggtctggcattgggatgccgccctggggacatacgaaccgcctccaggaccggatgcccctcctgtctcccgctcccatcgtgcccttaaaggccagatgtggtggagggaagagagaagaggtaggaagaaaggtgatgaaaactcctggtcattccttgaataaacttgattttatttaatagaaaaa

SEQ ID NO: 140573 - DNA, 798 bp, Homo sapiens
atggcttggttcatgtttgtccccgaaaagggaaatcgtgaacgttcgcttggagcgaagaaggtacttcgcccccgtcaattcaatcttcttgggatcccaggtgtcctcacaggaacacccctgcgcaaactggaaaaccaccaaagagagcctggcccagacatccagtacatcactgagagcctcatggggatcagcaggatgatggcccagcagtgtcacctccttaaagctacagccagtatccctggcctgagggactggatgtgtgagggcttacggcagagcccgggacacccttgcccttttgagacctgcaaagtgccggtctggccagcagatgtcctggaggccgcacctcataggtggaaggttctggtgcatttggctgctgccccaacacagacctcacagtgcctgcccacgatccctgggttgattttgtggctggtggtttccctgagcagcgtccatctgcttcagagagctgaggaggtggctggctgccccatcatgagcctggatgtgaggcctgagatcctcaccccactggcagagtctgggttctgctcagcgcggcctggagccattctgtctgcatcttactggagagacatccacagtgtggcgggctctggcttcaggaacactcccccattcacaatagggttctcgccctatgagaatctcatgccgctgctgatccgacagtgggtagagctcagcggtaatgctcgctggcggctgacctcctgcagggccacccagttcctacaggccatgaattggtactga

SEQ ID NO: 140574 - DNA, 2244 bp, Homo sapiens
  misc_feature (1)...(2244): n = a,t,c or g
atggtgacaggcaagggagcggcaccagatgccgaaaccacaagggaagatgcctgggaagctggggactgtgtggaggctggggccagcgccaaggagcaagtggaagctgcccgcaaagacctggaccaagccaaggaggaggtgttccgcctaccccaagaggaggaggaggggccgggggctggggatgagagttcctgtgggactggtggaggcacccaccggcgcagtaaaaaggccaaagcccctgagaggccggggactcgtgtcaccccagatcctgctctggagctcccatccaccccaccaccgtccagccttttacgcccccgcctcagtccctggggcttggccccgctcttccgttccgtccgctccaagctggagagctttgctgacatcttcctcacgcccaacaaaaccccacagcccccacccccctcccccccaatgaagctggagttgaagatcgccatctcagaggccgagcagtctggggctgctgagggcactgcgtctgtcagcccccggcccccaatccgccagtggcgaactcaggaccacaataccccagcacttctccctaagccctctctgggccgaagctactcctgccctgatctggggccccctggcccangggagcctcccttctctaccacatttgctcttcacgcattcactttcttctcggaccagcagaaccaggtctccgatgatgacctcgacccatcctttactgtctcaaccagcaaagcctcgggcccccacggcgccttcaatgggaactgtgaagcaaaactctccgtggtccctaaagtgtcgggcctggagcggagccaagaacagcccccggggcccgacccgctgctagtgcctttccccccaaaggaaccaccgcctccaccggtccctcggcctcctgtctcaccccctgcacccctgccggccactcccagtctgccacccccaccccagccccagctgcagcttcgggtctcacccttcggcctccgcacttctccatatggcagcagcctggacctcagcactggcagttgtctgggccgctggggtcgcctccacgggcaggagccacggccaggacgtgcaggccgccccctgctggtccgtttcggaaccgggcgggtggccgcggcgctgcccgggttgggggcatggctttacaacggtgccgagagtgaaaacgaagaggagagccctcggcaggaaagttctggggaggagatcatcatgggagacccggctcagagtccagaatccaaggactcaacagagatgtccctggagagatcctcccaggacccctctgtcccccagaaccccccaaccccactgggtcactccaatcccttggaccaccagatccccctggaccccccagccccggaggtagtccctaccccatctgactggaccaaggcctgcgaggccagctggcagtggggcgctctcaccacatggaacagccccccagtcgtccccgccaacgagcccagcctgcgggagctggtgcagggccgcccggcgggggcggagaagccctacatctgcaacgagtgcggcaagagcttcagccagtggtccaagctgctgcggcaccagcgcatccacacgggagagcggcccaacacctgctccgagtgcggcaagagcttcacgcagagctcgcacctggtgcagcaccagcgcacgcacaccggcgagaagccctacaagtgccccgactgcggcaagtgcttcagctggagctccaacctggtgcagcaccagcgcacgcacacgggagaagagccctacaagtgcacggagtgcgagatagccttcacccagagcaccaacctcatcaagcaccagcgatcccacaccggcgagaagcctncaagctcctctagcctgttgaagcccctgacagtgccaccaggctacaccttccctcctgctgctgccaccaccacttctaccaccacggcaactgctaccaccacagcagtgccagctccgactcctgcaccacagcgcctcattctatctcccgatatgcaggctcgcctgccctggctagaagagctcttccaaagccccttgagagagtccccatccttccaaccaggatccttccaaccactgctgtcacaggaccttagcaatgccgcattgcaggatccaggaggtctcggctggctctcagcagaggccatccagggtcactcagcctga

SEQ ID NO: 140575 - DNA, 10902 bp, Homo sapiens
caagcatgaggccgagaccgagactcggattgttgagctgcggaaggagggtttctggtcactgaagaggctgcctaaggtgccagagccccctcgccccaaaggtcactgggactatttgtgcgaagagatgcagtggctctctgctgactttgctcaggagcgccgttggaaacggggtgtggcccggaaggtggtgcgcatggtgatccggctccacgaggagcagcggcagaaagaggaacgggcccggagggaggagcaggccaagctgcgtcgaattgcttccaccatggccaaggatgtcaggcagttctggagcaatgtggagaaggtggtgcaattcaagcaacagtcccggcttgaggaaaagcgcaaaaaagccctggacctgcatttggacttcattgtggggcaaactgaaaagtactcggaccttctgtctcagagcctaaaccagccattaacctccagcaaagcaggctcttccccttgcctcggctcttcctcagctgcctccagtcctccaccccctgcttctcgcctggatgatgaagatggggactttcaaccccaagaggatgaggaagaggatgatgaggaaacgattgaagttgaagaacaacaggaaggcaatgatgcagaggcccagaggcgtgagattgagctgcttcgccgtgagggagaattgccactggaagagctgctccgttcccttccccctcagctgttggaagggccttccagcccctctcaaaccccctcatctcatgatagtgacacccgagatgggcctgaagaaggtgctgaagaagagccccctcaggtgttggagataaagcccccaccctctgctgtcacacagcgcaacaaacagccttggcatccagatgaagatgatgaagagtttactgccaacgaagaggaagcggaggatgaagaggatactatagcagctgaggaacagttggaaggggaggtggatcatgccatggagctgagcgagttggctcgagaaggtgagctttccatggaggagctattgcagcagtatgcaggagcctatgccccaggctctgggagcagtgaagatgaggatgaagatgaggttgatgctaatagctctgactgtgaaccagaggggcccgtggaagcggaagagcctcctcaggaggatagtagcagtcagtcagactctgtggaggaccggagtgaggatgaggaagatgaacattcagaggaggaagaaacaagtggaagttcagcatcagaggaatctgagtctgaagagtctgaggatgcccaatcacagagccaagcagatgaagaggaggaagatgatgattttggggtggagtacttgcttgccagggatgaagagcagagtgaggcagatgcaggcagtgggcctcctactccagggcccactactctaggtccaaagaaagaaattactgacattgctgcagcagctgaaagtctccagcccaagggttacacgctggccacgacccaggtaaagacgcccattcccctgcttctgcggggccagctccgggagtaccagcacattgggctagactggctggttaccatgtatgagaagaagcttaatggcattcttgctgatgagatggggcttgggaagaccatccagaccatctctctgcttgcccacttggcttgtgagaaaggtaactggggtccccatttaatcattgttcccaccagcgtgatgttgaactgggagatggagttgaaacgttggtgccccagctttaaaatcctcacttactatggagcccagaaagagaggaagctcaagcggcagggctggaccaagcccaatgcctttcatgtgtgtatcacatcttacaagctggtgctgcaggaccaccaggccttccgtcgcaagaactggcgctatctcattctggatgaggcgcagaacatcaagaacttcaagtcacagcgctggcagtcactcctcaacttcaacagccagagacgcctgctcctgacaggaactcccttgcagaacagcctcatggagctgtggtccttgatgcactttttgatgccccatgtcttccagtctcatcgcgagttcaaggagtggttctctaatccccctaactggcatgattgagggcagccaagagtataatgaaggtctagtcaaacgcctccaacaaggttttgaggccttttttactgcgccgagttaaggtggacgttgagaagcagatgcccaaaaagtacgagcatgttatccgctgcaggctctccaagcgtcaacgctgtctctatgatgacttcatggcacagaccacaactaaggagacactagccacaggccatttcatgagcgtcatcaacattttgatgcagctgagaaaagtttgcaatcatccaaatctgttcgaccctcgaccggttacctcccctttcatcaccccaggcatctgcttcagcaccgcctctctggtgctaagggccacggatgtccatcccctccagcggatagacatgggtcgatttgaccttattggcctggaaggtcgtgtctctcgatatgagagcagacacatttctgccccggcaccgcctctctcgccgggtactgttagaagtggctactgctcctgaccccccaccccggcccaagccagtcaagatgaaggtcaacaggatgctgcagccagtacctaagcaagaaggccggacagtggtggtggtgaacaacccacgggcgcccctgggccctgtcccagttcgacctcctccaggtcctgagctctcagcccagcccacccctggcccagtcccccaagtgctgccagcatcactgatggtttcagcctcacctgccgggcccccgcttattcctgcatctcggcctcctggccctgtcctcttgcctccactgcagcccaacagtggttctctcccccaggtgttgccatcccccctgggggtcctgagtgggacctcacggcctcccacgccaaccttgtccctaaagccaacaccacctgccccagttcgcctgagcccagccccacctccaggctcctctagcctgttgaagcccctgacagtgccaccaggctacaccttccctcctgctgctgccaccaccacttctaccaccacggcaactgctaccaccacagcagtgccagctccgactcctgcaccacagcgcctcattctatctcccgatatgcaggctcgcctgccctcaggcgaagtggtcagcatcgggcagttagcctcactggcacaacgtccagtggctaatgcagggggaagcaaacctctcaccttccaaatccagggcaacaagctgactttgactggtgcccaggtgcgccagcttgctgtggggcagccccgcccgctgcaaagtagtgccaccaaccatggtgaataatacaggcgtggtgaagattgtagtgagacacgcccctcgggatggactgactcctgttcctccattggccccagcaccccggcctccgagctcttgggcttccagctgtgttgaatccacgccccacgttaacccctggccggctacccacacctactctgggtactgctcgagcccccatgcccacacccactctggtgaggcctcttctcaagctggtccacagtccttcacctgaagtcagtgcttcagcccccggagctgcccccttgaccatcttttctcctctccacgtgccatcctcactccctgggccagcctcttctccaatgccaattcccaactcctctccccttgctagtcctgtgtcctctacagtctcagttccattgtcatcttcactccccatctctgtccccaccacacttcctgccccagcctcggctccactcaccatccccatctcagcccccttgactgtttctgcttcgggcccagctctgttgaccagtgtgactccaccattggcacctgttgtcccagcggctcctggacctccctccttggcaccatctggtgcttccccgtcagcatcagccttgactttaggtttggccacagctccatccctgtcttcatctcagacacctggtcaccctctgttgttggctcccacctcttcacatgttccagggtattgaactcaaccgaggccccagcatgctcacctgtcctggtgccagcttcggctctggccagtccttttccggcagcaccaaatccagctccagctcaggcttcccttctggctccagcatcttctgcatctcaggctctagccacccctctggctcctatggcggctccacagacagcaattctggctccttctccagctcctcctctggctcctcttgcggtcctggcaccatcgccaggggctgctcctgtcctggcttcatcacagactccggatccagctatggctccatcgtctactccaggaacctctttagcctcagcttcaccggtaccagctccaacccctgtggtggctccatcatcaactcaaactatgctaccagccccggttccgtcacctctcccgagcccggcttctacgcagacactggccctagccccagctttagcacccactcttggaggctcatctccatctcagacactctctttgggaacggggaacctccagggaccctttccaactcagacattgtcattaactccagcatcatccctggtaccaactccagcccagacactgtctttggcaccaggaccaccactgggtccaactcagacgctgtctctggctccagcaccccctctggctccagcttctccagtgggcccagccccagctcacacgctgactttggctccagcatcgtcatctgcttcactcctggccccagcttcagtgcagacactgaccttgagccctgccccagttcctaccctgggcccggccgcagctcagaccttggcgctggccccagcctccacacagtccccagcttcccaggcatcttcccttgtggtttcggcatctggtgccgctcccttgcctgtcaccatggtatcccggctgcctgtttccaaggatgagcctgacacactgacattgcgctctggtccccccagccctccctccactgctacctcgtttgggggcccccggcctcgacgccagccccccccaccacctcggtcccctttttatctggactccctggaggaaaagcggaagcggcagcggtctgaacgcctggaacggattttccaacttagtgaggctcatggggccctggcacctgtgtatgggactgaagtcctggatttctgtaccctgccccaacctgttgccagccccatcggccctcgttctcctggccccagccaccccaccttttggacttataccgaggctgcccaccgggctgtactgtttccccagcagcgactagaccagctgtcagaaatcattgagaggttcatctttgtcatgcctcctgtggaggcacctcccccttccctgcatgcctgccacccacctccttggctggccccacgtcaggcagccttccaggagcaattggcctctgagctctggccccgggctcgtcctttgcaccgtattgtgtgtaacatgcgcacccagttccctgacttaagactcatccagtatgattgcggaaagttgcagacgttggcagtgctgttgcggcagctcaaggcagagggccaccgagtgctcatcttcacccagatgacccgaatgctggatgtattggagcagtttctcacctaccatggccatctctacctgcgcctggatggatctactagagttgaacagagacaggctcttgatgtgtcggttcaatgcagacaaacgcatattctgcttcatcctttcaactcggagtgggggtgtgggcgtgaacctgacaggagcagacactgttgttttttatgacagcgactggaatcccaccatggatgctcaggcccaggaccgctgtcaccgaattggccagacccgggatgtccacatatataggcttatcagtgaacggacagtggaggagaacatcctaaaaaaggcaaatcagaagagaatgttgggggacatggccattgagggaggcaacttcaccacagcctatttcaaacagcagaccatccgagagctgtttgatatgcccctggaggaaccttctagctcattctgtgccctctgcccctgaagaggaggaagagactgtggccagcaagcagactcatattctggagcaggcattgtgtcgggcagaagatgaagaggatatccgtgcagccacccaggccaaggctgaacaggtggctgagcttgcagaatttaatgagaacgatgggtttcctgctggtgagggagaggaagctggcctgcctggggctgaggatgaggagatgtcccgggctgagcaggaaattgctgccctcgtagaacagctgacccccattgagcgctatgccatgaaattcctggaggcctcactggaggaggtgagccgagaggagctcaaacaggcagaagagcaagtgggagcttggccgcaaagacctggaccaagccaaggaggaggtggtccgcctaccccaagaggaggaggaggggccgggggctggggatgagagttcctgtgggactggtggaggcacccaccggcgcagtaaaaaggccaaagcccctgagaggccggggactcgtgtcagtgagcgtcttcgtggagcccgggctgagactcaaggggcaaaccacactcctgtcatatccgcccatcaaactcgcagcaccaccacaccaccccgctgcagtcctgccagggagcgagttcccaggccagcacctaggcctcgacccactccagcttcagctccggctgcaattcctgcccttgttcctgtcccagtttctgccccagtacccatttcagccccaaatccaataaccattctccctgtccatatcttgccttctcctccccctccttcacagattcctccttgttcttctcctgcctgcacccctcctcctgcctgtacccctccaccagctcatacaccgcctccagcccaaacctgtcttgtaactccttcctctcctctcttgcttggtccaccttctgtgcccatctctgcctcagtcactaatctccccttggggcttggagggctgagggaggagctgtgtgcccagggattgggcatcttccagagtccctggagctggcttctgtggccagttcagaaacctcctcactttctcttgtgccccctaaagatctgttgccagttgctgtggagatcctgcctgtgtcagagaagaacctttctctcaccccttctgcacccagcctgaccttggaggctggcagcatccccaatggtcaagagcaggaggcaccagattctgctgaggggaccacccttacagtgctgcctgaaggtgaggagttgcccctgtgtgtgagtgagagcaatggcctggagctcccacccttagcagcatctgatgagccacttcaggacccactggaggctgacaggacctcggaagagctgacagaggccaagaccccaacctccagcccagagaagccacaggaactcgttacagctgaggttgcagctccatccacctcatcttcagccacttcctcgcctgagggtccttcacctgcccgacctcctcggcgtcgcaccagtgctgatgtggaaattaggggtcaagggactggtcggccaggacaaccaccaggccccaaagtgcttcgaaagcttccccagacggctggtaactgtggtagaggaaaaggaactggtgcggcggcggcggcagcagcggggagctgccagcaccctagtgccctggggtctctgagactagtgccagcccgggaagcccgtctgtccgcagcatgtcagggccagaatcctcccctcccattggtgggccctgtgaagctgctccttcatcctcactgcccactccaccccagcagcccttcattgctcgccgtcacattgagctgggggtgactggtggtggcagccccgagaatggagacggagcactgctcgccatcaccccacctgctgtgaaacgtcggagggggaggccccccaagaagaacaggtctccagcagatgctgggagaggtgtggatgaggcaccctcatccaccttgaagggaaaaaccaatggggctgacccagtccctgggcctgagaccctaattgttgcagatcctgtcctgggaaccacagcttattcctggggccccagccttcttgggaccccagccagttcacagacccaattcccctcctgttcacctgtggagaaaagaaggcgaggacgacccccttaaagcacgagatttgcccatccctggggaccatttcctctgcaggggatggcaactccgaaagtcggacacagccacccccacacccatcacccctaaccccactcccaccactgctagtttgtcccactggctactgttgccaacactgtcaccactgtcaccatttcaacgtccccacccaaacgggaagagggggccgacctcccaaggaatcctccatcacctcgggcccagccaggttccccgtcttgggaccgtgacagcacttctgttctcgagagctgtggattggggaggcgacggcaaccccagggccaaggggagagtgagggtagttcctctgatgaggatggaagccgccccctcacccgcctggcccgccttcggcttgaagcagaaggaatgcgaggacggaagagtggagggtccatggtggtggctgtaattcaggatgacctggacttagcagatagcgggccaggcgggttggaattgacaccacctgtggtctcactaaccccaaaactgcgctcgacccggctgcgtccagggtctctagtccccccactagagactgagaagttgcctcgcaaacgagcaggggccccagttggtgggagtcctgggctggcaaagcggggccgcctacagccccccaagtcccctgggggcctgagggttcagtagaggagtctgaggctgaagcctcaggttgaggaggaggaaggggatgggaccccacgccgacgtcctggccccccgccggcttgttgggaccaccaaccaaggggaccagcgcatcctgcgcagcagcgcccctccctccctggctggccctgctgttagtcacagaggccgcaaggccaagacgtgagtggggctgcccctccacctaggctttccaccgtggccactccctccatgaccaggcctgactctgttaaccactacttgaagtcttgagggggaaagcctccagggagacataggggccttctcccttcttcccaccaaagtagggggtaggcaactggttgtcatggaaatggggatcatcacagtccccttccccttcaccccacgtggctgggcagtgttaagggtggcaagatagtctctgtccccacccccttgtacttgattccccagctgtctttcacacagccccccacccttaggggaagggggaggggcttctctacaatgaggtttttttcttttttttttttttttaagaagaaaaaataataaacttagtttctgtatgagcatccgcgtaaggaggcttctgattttctggtggtggtggagggttgggtgggaacttgggcatcgtttttctcctccctcttgttcttgcaaagatcctagcacctgatctctagcccaggactatatgttccaggcagaaatctacccaagaagagggaagattggtgaatttgatgtggtagggtgcctttccccagtcagtttgaagtcacagatatccttttcctctcatttcttttccctcggttcctaaacgttcctcggagctctttgatgcctcagacctttcccttttatccctcttgctcaggagcttcctttcacaactttttccagagggcaggcgtcctatctccagttgctccatcccttgggccctcccctggctcttcatctagccaaactggtttgagtcagccacaccccttcccagctccctgggctcttcacgtggtggctggccactcaaccccacccctgggcttggcttggagccctgagtcagctccatcaccacccaagccaaaccaaagctgaggtatggagccgaaactcacagtccttcaaggcctatagccaggtgatggaggacgaggagaaggcagtggagatcttgggcaacacggaagctgctcatcctccatcccccatccgctgctgctggctccgcctccgctgcttggcagctactagcattatctgtggctgctcttgcctgggagtcatggctctggtgtttgccatcaaggcggaagagcggcataaagcaggccggtccgaggaggcagtgcgcctgtggggcccgggccggtaaactcatcctggccagctttgctgttctggcttgctgtccctcattctgggtccccttgctgctgtggttgctctcctacgccatcgctcaggctgagtgacccctggatggccctctgctaagagccaagccaaaaccccctggatcctgcaatgcggcattgcctaaggtcctgtgacagcagtggttggaaggatccctggttggaaggatggggacctctctcaaggggctttggaagagctcttctagccctttataaaaggagggcagcagctgagactgatgagaggagggcagcctgctctgttctttcagggccccccccacccccatctcccctaccctagcccaccctagggcctctacccagcgggaggggttgaagaccaggcctggttttattagaattcattttgtaataaaagccttttttagtggtg

SEQ ID NO: 140576 - DNA, 951 bp, Homo sapiens
gactgccaagataaagtgccacgaagaaaagaacccagcatgtgttcaggtttgctgcgggtcaagagctgggtcagcctccagacttattggaaacccagggccacacagggggtttatgtcttaccattaacagaggaacgcatggtggtgctgggtgcctctcgggtgggcaagagctccatcgtgtctcgcttcctcaatggccgctttgaggaccagtacacacccaccatcgaggacttccaccgtaaggtatacaacatccgcggcgacatgtaccagctcgacatcctggatacctctggcaaccaccccttccccgccatgcgcaggctgtccatcctcacaggtgaggcccactggtgcctgggctggggcggcagggccagggcatgggtgcggagtgtgctgggcacttagcagatcctggaggtcaagtcctgcctgaagaacaagaccaaggaggcggcggagctgcccatggtcatctgtggcaacaagaacgaccacggcgagctgtgccgccaggtgcccaccaccgaggccgagctgctggtgtcgggcgacgagaactgcgcctacttcgaggtgtcggccaagaagaacaccaacgtggacgagatgttctacgtgctcttcagcatggccaagctgccacacgagatgagccccgccctgcatcgcaagatctccgtgcagtacggtgacgccttccaccccaggcccttctgcatgcgccgcgtcaaggagatggacgcctatggcatggtctcgcccttcgcccgccgccccagcgtcaacagtgacctcaagtacatcaaggccaaggtccttcgggaaggccaggcccgtgagagggacaagtgcaccatccagtgagcgagggatgctggggcggggcttggccagtgccttcagggaggtggccccagatgcccactgtgcgca

SEQ ID NO: 140577 - DNA, 478 bp, Homo sapiens
ggaattcaccatcctgaagatgatcgaggaggcaggcgccatcatcagcacccggcattgctacagccagaacggggagcgctgtgtggccgccctggctcgtgtcgagcgcaccgacttcctgtctcccatgtgcatcggtgaggtggcgcatgtcagcgcggagatcacctacacctccaagcactctgtggaggtgcaggtcaacgtgatgtccgaaaacatcctcacaggtgccaaaaagctgaccaataaggccaccctgtggtatgtgcccctgtcgctgaagaatgtggacaaggtcctcgaggtgcctcctgttgtgtattcccggcaggagcaggaggaggagggccggaagcggtatgaagcccagaagctggagcgcatggagaccaagtggaggaacggggacatcgtccagccagtcctcaacccagagccgaacactgtcagctacagccagtccagcttgatc

SEQ ID NO: 140578 - DNA, 1168 bp, Homo sapiens
actaccaccaagatgcagagaccggtagtgtccccgaatgcctggctgtgctgttatttattggatacaaggcaaaaggggaggggtaaagagtgtgaatcatctccaatgataggtaaggtcacgtgggtcacatgtgcactggacagcacatggccagtgcttatgtagggagggtaaacgtcctcagaaaggaagtcgacagggcctgttttggggagaaggccaaacagtgagttgggagctgagaggaactatgggctatttggggtcaggggagggaagtgtgtttgggaatcgaggaggcaggcgccatcatcagcacccggcattgcaacagccagaacggggtaagggtctgggccccatacctctgggccctggaggccgcaccagtgtgagttcaggacaggagttccccggggagccaggcctgcagccttccctccccttgtgcactgaccatgggcacgggcataatgccactctatcaagaggccaagtggaagccacgtcagagaccagggaccagcggaggcactgtgagctctgagccacactgttgagatgcaggaagtggctgctggctctgtcagcctgggctgcgtgaggtggcgcatgtcagcgcggagatcacctacacctccaagcactctgtggaggtgcaggtcaacgtgatgtccgaaaacatcctcacaggtacttctgggagcgacagtgttgactggagcagtaagggccgtggctacacagctgcttccctcctgagggcagaggacgctccagggcctggccccaaggtcctcgaggtgcctcctgttgtggtaaggtgccctttctacttctctcttgggggcagatggcagagatcaggtcacctcacctgattggagaccaagtggaggaacggggacatcgtccagccagtcctcaacccaggtaagagccgcggacaccagcagcaggtgccactcctcaccggggacgcataggaggcaggagccctgcacggctttgtgcacggaggtaagaaggaagcgccctggccactccattcctgtcccttggctcattgttgcttctctggcaggtacaataggccaggtgcagtggcacatgcctgtaatcccagcactttgggagatggaggcgggaggattgcctgagc

SEQ ID NO: 140579 - DNA, 445 bp, Homo sapiens
  misc_feature (1)...(445): n = a,t,c or g
gcggtcaccccaatacggataacgngacacgagcggagcagccctggggtcacctatcagtaaaagactatttgtttttttcctcgtcttactggatgtcactctcgggcttgccgacctaattttcactgacagcaaactttatattcctttggagtatcgttctatttctctagccattgccttattttttctcatggatgttcttcttcgagtatttgtaaaagggtgttggagcgggccggagagaagtagagtgggctgcgaggagaaggaaacaggcctttcggaggctcctcatccctcggagggcatcccttactccagcaagagtgagccatggagctacgtgtggggaacaagtaccgcctgggacggaagatcgggagcgggtccttcggagatatctacctgggtgccaacatcgcctctggtgaggaagtcg

SEQ ID NO: 140580 - DNA, 364 bp, Homo sapiens
gtaaaccttaaaacacttaaaagttccaatattaatatcaaagttgaattaaaagcaaaaatattaactatgaacatgactcattttttatcaatagaaggtggaagctacatgacactaacaagaccatgtttaatgaaatgggatttgtattgaaggcaggtgctatctctcccactggacacatttttctcttgtgcagactctgggggtagggaggtggccatgatgaaaagcacgaaaaacactgtagtgactctggtcttcctgctccctctagatcgcttttactgataggtgacaccagggctgctcctttaaattcacctgtgtgtgggctttctttcgcaggtgcctcctcggt

SEQ ID NO: 140581 - DNA, 727 bp, Homo sapiens
ctcttgttgctcagactggagtgcaatggcgtgatctcagctcactgcaatctctgcctcctgggtacaagcaatgctcctgcctcggcgtcccgagtagctggggggctcgaacccagaaggcacaggttgaagtgagcgaagattgtgccattacgctccagcctgggtgacagagcaagaatccacctgcacaaaaagggcaggcaggaaggcagtaaagaaatgagcagggcccaaaccaggagagtgtggcatgccacaatggagactgaacagaaacaaaactacgggcgactgtagtgttgttccccttctacaaatactcgaagaagaacatccatgagaaaaaataaggcaatagctagagaaatagaacgatactccaaaggaatataaagtttgctgtcagtgaaaattaggtcggcaaggatgagagtgacatccagtaagaccaggaaaactccaaatagtctttcactgataggtgacacccgggctgctcctttaaattcacttgtgtgtgggctagaggatgataaaagaatacagtcagcagcactttctttcgcaggtgcctcctcggttgctcctttaaattcacttgtctgtggactgtcattggggccgagctcaatgatgactcccgccaggtcagtcggatcaggaccattgtggtcatagttgtcaagagcatacagtagaatctggtagtgaatccataact

SEQ ID NO: 140582 - DNA, 1179 bp, Homo sapiens
cgaattcccggggcgacgatttcgtagcagctgctccctgaacactttctgatccatcagtcccccagcgccggacgcgccgcgccctggcggctctagggaccccccccgcgcctgcacttagccccgcgcccgagtccacagacaaacgaatttaaaggagcaaccgaggaggcacctgcgaaagaaagcccacacacaggtgaatttaaaggagcagccctggtgtcacctatcagtaaaagactatttggagttttcctcgtcttactggatgtcactctcgtccttgccgacctaattttcactgacagcaaactttatattcctttggagtatcgttctatttctctagctattgccttattttttctcatgggtgttcttcttcgagtatttgtagaagggcccgtctataccattgggctgcccccttcagacctccgggcaggaaaagaagagactgtactggtcagagaaagacatcagcaggagagccagagattcctcctcctctccatcatcaccatcaccattattctcatcaccatcaccgtcaccgtcatcatcatcatcaccatcatggacttcaaagaagttcaaagaatttcctcctctggccagagtgaatcctgttctgtggaagcaggaggctgggtagagctgccctcttccttctccgcagcttttctcatcctgcaaagcaaggagctgagagcctgctggggaaacagtcctagaaacacctcgctagcacccagtgtggacccagaggaaggggctcctaggagaagtggcccagggcccaactcggaaggaagcagccttcagaatcagccgctggagctgcgggactcgcccacggccctcaggactccctggtgttggagcgggccggagagaagtagagtgggctgcgaggagaaggaaacaggcctttcggaggctcctcatccctcggaggtcatcccttactccagcgctccccagcggagtcctcacctgcaggcacaggtgtgcgcacttcgcatctcgaaggccggccagcaagcttcaggtgagcgccagcagcagctggggaaaggacttggaccaactgaaggtattgagggaccagagaacgggaagtgctggggagagaaggacggggatgagctcttgggaaaacccccagaatga

SEQ ID NO: 140583 - DNA, 453 bp, Homo sapiens
  misc_feature (1)...(453): n = a,t,c or g
ttaagaggcctgctcccgctttgcctccaccatgagtaaaagcgccctgaggcctccccagaagcagatgctgccatgcttcctgaacagcctgtggaaccgtgaaccaattaaaccgcttcttanggggtctcctgagagctgttctgtcactcaatgaagctcctctctgccttgctctccctccagttgtccacatacctcattcttcctggacgcgagacaagaacccaggacctgccgagtggtgggactgaaagagctgtaacagaaacagggcttgccacattgcaggtgacaagaaagagagaagagctgcagcccttcaggaagcccagacctaggggctccccaacccagggctgtgacaccctctttggggctctgcagttcctggcatctccaagcttccaggcgccactgcactccccggtgcccacagtggaaacgaaa

SEQ ID NO: 140584 - DNA, 630 bp, Homo sapiens
agggatcccaagtgccacacacataaccattgaagacaaaaatgaaaccatgtgcacagctctgagtcaaggcatcagtccttgctccacactaacaagcagcaccgcatctcctagcaccgatagcccctgctcaaccttgaatagctgtgtcagcaagacggcagccaacaaaagtccctgtgagaccattagcagccctagttccaccctggatagcaaggacagtggaattatagccacaattacaagttcatccgaaaatgatgaccggagtggctccagtttggaatggaataaagatggaagcctaagattaggggttcagaagggagtgcttcatgaccgcagggcagataactgctccccagtggcagaagaggagaccaccgggtcagcagagagcacgctgcccaaagcagaatcctcagctggagatggtccagtcccttattctcagggctccagctcactaataatgccacggcccaactcagttgcagcaacaagctcaaccaaattggaagatctgagttatttagacgggcagagaaatgctcctctacggacgtcaattagattaccatggcacaatacggccggaggtagggcacaggaagttaaagcacg

SEQ ID NO: 140585 - DNA, 1394 bp, Homo sapiens
atggcccctgttctcaaggacgcagccagcgttagttctaacagtggggcagtggcagataactgctccccagtggcagaagaggagaccaccgggtcagcagagagcacgctgcccaaagcagaatcctcagctggagatggtccagtcccttattctcagggctccagctcactaataatgccacggcccaactcagttgcagcacgatttgctccctacaagccacaagacattttgttgaaacccttgttgtttgaagtaccaagcataacaacagactctgtgtttgtgggaagggattggctctttcaccagatagaagaaaacttgaggaacacagaactggcagaaaacagaggcgcggtggtggttggcaatgtgggatttgggaagacggcaatcatttccaagttggtggccctgagctgccacggaagccgcatgaggcagattgcttccaacagcccgggttcatcacctaaaacctctgaccccactcaggatcttcatttcactccgttgctttcaccgagttcttccacaagtgcttccagcacagctaaaacacctcttgggtctatcagtgctgaaaaccagagaccaagagaggatgcagtgaaatatcttgcttctaagaaccagccccatgaggtcgctcctacaccacccctatggtatagtgttaaaagaagcaccctgataagaatgaatgtgatgactgagcagttccaaagtagtcagcttgtaagtgtgggctgtttagagcagaaaattcctgaagaagaatacattattttgatagatggcttaaatgaagctgagtttcataaacctgattatggagatacgctttcttcatttattaccaaaattatttctaaatttcctgcctggttgaagttgattgtgactgtaagagcaaattttcaggaaatcataagtgcgctgccatttgtcaagctttccttagatgacttcccagacaacaaagacatccacagtgacctgcacgcctacgtccagcacagggtgcacagcagccaggacatcctcagcaacatctccctgaatggcaaggccgatgccacactcattggaaaatgcaacatgaagttcatgacccagtccgcctttgagagggcacttccgattctcaacgtggccctcgcatccctccaccccatgacagacgagcagatctttcaggctattaatgctggccacatccagggggagcagggatgggaagactttcagcagaggatggacgccctctcctgcttcctcattaagaggcgagacaaaacccgcatgttctgccacccgtccttcagggagtggcttgtatggagagcagacggggaaaacacggccttcctgtgtgagcccag

SEQ ID NO: 140586 - DNA, 3431 bp, Homo sapiens
tcacacttttaaccaactccgatagggcatccccttccagaaattagggaagcgtagccctggggagccgccagcgtcctgtgcatgaagcatggggctctgggtgtgctggcgaccttctttcaaacagaaggacctctgaggaggtgaccacgacagggcaggacgactgccagagaccagcatgaggacacagcacacccaggctgtttctccccacaatgtgtcggtgccattgacttctacttcatgttccttctccatccccagcaagcactggaccaccgagctgtggcccatgctggccgccgcggtcagcgcctgctgcagggcgtggctcttcctcagggtgcctggctggggaggacccggcgaccactcacaagtcagcaggtactggagaatgtcaccgtggccccgtagggcactgtggacaagcgcacactggcccttcttatccaagtggtccaccagcttcatgtggcccagcagcttctgcggtaaccagaggccagtcatgccgttctctgacgttccgtccaggcaggcaccaaattccaggagcagagtgacaacttcctcgtggccaaggtgagactggacgcacaggattggggcattatttaacacttctgtcctgtagttcacgttggcccctcccaaaatcaggagacggctcaccttcacgttgggagtatagagattcctgagagaggccagggcggcggacagcccctcggtgctgtagccgatccacagggcttggagatggcttgaagaaattcccgtcttcttactgaggcccttgaaaatgtgcgccttcaggatgtggtggccaagctccatggtctgctggcggttcaacttgccctcctgacgcgagaacatgaatgccaagagcgcgtgcccgttcctgggctcacacaggaaggccgtgttttccccgtctgctctccatacaagccactccctgaaggacgggtggcagaacatgcgggttttgtctcgcctcttaatgaggaagcaggagagggcgtccatcctctgctgaaagtcttcccatccctgctccccctggatgtggccagcattaatagcctgaaagatctgctcgtctgtcatggggtggagggatgcgagggccacgttgagaatcggaagtgccctctcaaaggcggactgggtcatgaacttcatgttgcactgaagcaaatagagctcagagagagacacgggcaccaccttgtagctggcactcttaatgaccaagtggcccctctggaaaaggtccagggtgagcttgaggtacaggtaggagccgaggctccgcagcaccaggtggctgctcacttttccaatgagtgtggcatcggccttgccattcagggagatgttgctgaggatgtcctggctgctgtgcaccctgtgctggacgtaggcgtgcaggtcactgtggatgtctttgttgtctgggaagtcatctaaggaaagcttgacaaatggcagcgcacttatgatttcctgaaaatttgctcttacagtcacaatcaacttcaaccaggcaggaaatttagaaataattttggtaataaatgaagaaagcgtatctccataatcaggtttatgaaactcagcttcatttaagccatctatcaaaataatgtattcttcttcaggaattttctgctcatttctcaggtttgtgagtggctccagcactcccctcttgaaagctgccaccgggtcctgcacacaggatcggaggctcagcatgctctgtagttggggctcctttatcagaaggtctctgtaggcggccagctgatgggaccggcagagcaaagctgcgatgctgtgcacaaactcgggcaccaggcaagtgtacgtgttgtcagcctggcagtagtggtaggccaccaccttagaagcaagatatttcactgcatcctctcttggtctctggttttcagcactgatagacccaagaggtgttttagctgtgctggaagcacttgtggaagaactcggtgaaagcaacggagtgaaatgaagatcctgagtggggtcagaggttttaggtgatgaacccgggctgttggaagcaatctgcctcatgcggcttccgtggcagctcagggccaccaacttggaaatgattgccgtcttcccaaatcccacattgccaaccaccaccgcgcctctgttttctgccagttctgtgttcctcaagttttcttctatctggtgaaagagccaatcccttcccacaaacacagagtctgttgttatgcttggtacttcaaacaacaagggtttcaacaaaatgtcttgtggcttgtagggagcaaatcgtgctgcaactgagttgggccgtggcattattagtgagctggagccctgagaataagggactggaccatctccagctgaggattctgctttgggcagcgtgctctctgctgacccggtggtctcctcttctgccactggggagcagttatctgccctgcggtcatgaagcactcccttctgaacccctaatcttaggtttccatctttattccattccaaactggagccactccggtcatcattttcggatgaacttgtaattgtgggctggctgcgtccttgagaacaggggccatgtccaccgatgcctctttccctatctggattccagtcacctaggccctcaactccacgccagagttcaggatctgattttgggtgcccatcgttatgattcccagcatttgccagtgttccatcagcagtattaaaccatacctccacctctttggaatcaatcacagccttccttgtgtttttaaatagaccatttatatgaacataggcatagcaagtatgactctttctgtgttgcgcaaggcatgctctgctatgacatgcagcaaggccaggggcccgagccgcacattcccagccacattcatcaggctcttcaactaaggaaacacctataattccactgtccttgctttccagggtggaactagggctgctaatggtctcacagggacttttgctggctgccgtcttgctgacacagctattcaagggtgagcaggggctatcggtgctaggagatgcggagctgcttgttattgcggagcaaggactgatgccttgactcaaagctgtgcactgcaagatgaatggaaggaggagataccacggcttacacaggatgcttcgacacatgcttttgtttttgtgctaaaacaataaaactaataacaggaaaacggaagttctaatacaaaaatctaaagagatatgtgtgtatagatatggactcatggcgctgctgataaataaacgtaaattgggccttccccaatgctagaaagcaatttccttgtcccagtggatgtcggtaaggacacatccctgccaggttcctgtcg

SEQ ID NO: 140587 - DNA, 1743 bp, Homo sapiens
ttagtaataaatgctggtatatccagtgcattggcggcaccatgtgaccagaaggcggttacccccctggacccagctttcactatcttgtgtgtgtctattatttctcgacctgccgatccacctgggaacaaagagagagccccagtgcattgcaggctgctggccagatcccgcaatagtttcttttgctgtgcagaagatcttcagtttaattagaacccatttgtcaattttggcttttgttgccattgcttttggtgttttagtcatgaagtccttgcccatgcctatgtcctgaatggtattgcataggttttcttctatggtttttatggttttaggtcttagctttaagtctttattccatcttgagttaatttttgtgtaaggtgtaaagaaggggtccagtttcagttttctgcacatggctagccagttttcccaacagcatttattaaataggaagtcctttccccattgcttgtttttgtaagggttgtcaaagatcagatggttgtagatgtgtgatgttatttctgaggcctttgttctgttccattggtctatgtatctggtttggtaccagtaccatgctgttttgattactgtagcctcgtagtatagttggaaatcaggtagcttgatgcctccagctctgttctttttgcttaggattgtcttggctatatgggctttttttggttccatatgaaatttgaagtagtttttcctaattctttggtctttgatgttagggacgtttggatggggtttttgcatggacatcctttttgttgatgttgatgctattcctttctgtttgttagtttttcttctaacagttaagcccctctgctgcaggtctgctggagtttgcttggaggtccactccagaccgtcttttcttgcaagctcttcctcagcgtcctcagattgggacaaggcagaagatctaaaaagctcatagaaatgctgaggtgcttggcagttttgaaagtgacagatcaaaaacttgtactctttcctggatttaccatttatacaaagaaaattcttacccagcttgggcagtatggccattttcacaatattgattcttcctatccatgagcatggaatgttcttccatttgtttgtatcctcttttatttcattgagcagtggtttgtaattctccttgaagaggtccttcacatcccttgtaagttcgattcctaggtattttattctctttgaagcaattgtgaatgggagttcactcatgacttggctctctgtttgtctgttattggcgtataagaatgcttgtgatttttgcacattgattttgtatcctgagactttgctgaagttgcttatcagcttaaggagactttgggctgagacgatggggtttgctagatatacaatcatgccatctgcaaacaaggacaatttgacttcctcttttcctaactgaataccctttatttccttctcctgcctgattgccctggccagaagttccaacactatgttgaataggagtgatgagagagggcatccctgtcttgtgccagttttcaaagggaatgcttccagtttttgcccattcagtatgatattggctgtgggtttgccatagatagctcttattattttgagatacgtcccatcaatccctaatttattgagagtttttagcatgaagggctgttgaattttgtcaaaggccttctctgcatctattgagataatcat

SEQ ID NO: 140588 - DNA, 1758 bp, Homo sapiens
atgcacaagtatgttcgttacagcactgttcacaatagcgaagacatggaatcaactcaaatgtccatcaatgatagactggataaagaaaacatcatacatatacatcgtggaatactatgcagtcataaaaagaaacaagatcatgtcctttgcaagaacataggtgaagctggaaaccattatcctcaacaaaggaacactggaacagaaaaacaaatacagtgtgttctcacttataagtggaagctgaacaataagaacacatggacacagtcagaagaacaatatgcagtggggcctgttggagggcggatcggcaggttgacaaataatagacacacacaagatagtgaaagctgggtccggggggtcaccgccttctggtcccgtggtgccaacaatgcactggatataccagcatttattattaagtttagtgagggcaggggtagcctccacactcacgatggcccccctggtcccacttcttctctcaaactgtctttttctcattcctttgactccactggactttgtcgcccccacgacctggtgttgggtctgatcatcccaacaatggttaatattacaagtcaacttgactggcttgaggatgcccagatggctggtgaagcactgttcctggaaggaaaactaacaaccagaaaggacatctacaccgaaaacccatctctacatcaccatcatcaaagaccaaaagtagataaaaccacaaagatggggaaaaaacagaacagaaaaactggaaactctaaaacgcagagcgcctctcctcctccaaaggaacgcagttcctcaccagcaacagaacaaagctggatggagaatgattttgacgagctgagagaagaaggcttcagacgatcaaattactctgagctacgggaggacattcaaaccaaaggcaaagaagttgaaaactttgaaaaaaatttagaagaatgtataactagaataaccaatacagagaagtgcttaaaggagctgatggagctgaaaaccaaggctcgagaactacgtgaagaatgcagaagcctcaggagccgatgcgatcaactggaagaaagggtatcagcaatggaagatgaaatgaatgaaatgaagcgagaagggaagtttagagacaaaagaataaaaagaaatgagcaaagcctccaagaaatatgggactatgtgaaaagaccaaatctacgtctgattggtgtacctgaaagtgatgtggagaatggaaccaagttggaaaacactctgcaggatattatccaggagaacttccccaatctagcaaggcaggccaatgttcagattcaggaaatacagagaacgccacaaagatactcctcgagaagagcaactccaagacacataattgtcagattcaccaaagttgaaatgaaggaaaaaatgttaagggcagccagagagaaaggtcgggttaccctcaaaggaaagcccatcagactaacagcggatctctcggcagaaaccctacaagccagaagagagtgggggccaatattcaacattcttaaagaaaagaattttcaacccagaatttcatatccagccaaactaagcttcataagtgaaggagaaataaaatactttatagacaagcaaatgctgagagattttgtcaccaccaggcctgccctaaaagagctcctgaaggaagcgctaaacatggaaaggaacaaccggtaccagccgctgcaaaatcatgccaaaatgtaa

SEQ ID NO: 140589 - DNA, 886 bp, Homo sapiens
  misc_feature (1)...(886): n = a,t,c or g
tgtaaatacaaaattgcatacaggattgtgtaaagacaaatgccaggttgggctgccagaatgagccaacagcatgtgatgtgcttccgccnnnnnnnnnnnnnnnnnnnnnnnnnnngtcagggaggtttcacataaccaagattcctatcccagaaaagcagatgtccatagctctgggaatggaatgcgacccttgtggacagcttacaaatgaccttaaatccctcactaacctaccaacactctcactaaacttaataataaatgctgatatatccagtgcatcggcggcaccacaggaccagaaggcagtgacccccatggacccagctttcactatcttgtgtgtgtctattatttctcgacctgccgatccacctgtggctagtagctcccttattggccaggtcagtctaaccaattgtaacaatccatttcctactttcccagactcctcttcagcaagaagtggacatgtgacccagttctgaccaatgagctgaaaagggaggtcagctgggccttctggaaaagcttttgctttccgtatgatgctggaccaggaactcagccgagcgtcccagttttcctggtcattagctactggtagcactgaataaatggtgtcatcctgtctaaacctccacttcctcctatcagcaccacccccatagcaggtgctctccttctccctctcaccaaagagcaaaggggtgacttttaaaagccatctagaaacatgaggaccagctgttggaagaccccagagagccgtgccaactttcttaaattcaggccccggagtcattgcctgaccaggatgggttcctcttgtctgctgccaagtaagacgtgcctttcctcctcctccaccttccaccat

SEQ ID NO: 140590 - DNA, 415 bp, Homo sapiens
ttcaatggttgtgcacggtttatatgaatattagtgattacaaaatattatcaatagaccttgtcacaactgttattgaagaactaatcatctattgcttatttaggtctttctctcctgccagaatgtgcgctccaggtggagaggtatgttgccttatccgtggctggatatatagagattcccacactgccttgcacacgagcactgctgggtaaatatttgttggctgctgaagatgtctccagagaccttctgcaggtactgcagggcatccgccatctgctggacggcctcctctcgccgcaggtctggctggatgaagggcacggcataggtctgacctgccagggagtgctgcatcctcacaggagtcatggtgcctgcgagccgccctcccggaagctcccgccgc

SEQ ID NO: 140591 - DNA, 883 bp, Homo sapiens
  misc_feature (1)...(883): n = a,t,c or g
cctcggctacctcagtgtgaaaggtgggcagttctggaatggtgccaggggcagaggggcaaatgctggggcccagttcggcaatgtacatgaggtcgttggcaatgccgggccaggtcaggcaggtaggatggaacatcaatctcaggcacctggcccaggtctggcacatagaagtagttctctgggacctgcaagattaggcagggacatgtgagaggtgacagggacctgcaggggcaagccaacaagaccttgtgtgcacctcccatgggtggaataaggggcccaacagccttgactggagaggagctctggcaaagccctgggccactgcacctgtctccacttctgtcccacccctcccacntgctgttccagctgctctctcttgctgatggacaagggggcatcaaacagcttctcctctgtctctgcccccagcatcacatgggtctttgttacagcaccagccagggggtccaggaagacatacttcttctacctacagaggcgacatgggggtcaggcaagatgacacccgctgtcctgagcccatgttcctctcccacatcatcaggggcacagcgtgcactgtggggtcccaggcctcccaagccgagccaccccagtccccccctggctcctgggctatgtgctgtacctgtgtctgatgccctgggtccccactaagccaggccgggcctcccgcccacacccctcggccctgccctctggccatacaggttctcggtggtgttgaagagcagcaaggagctgacagagctgatgttgctgggaagacccccaagtccctcttctgcatcgtcctcgggctccggcttggtgctcacgcacacaggaaagtccttcagctctcctt

SEQ ID NO: 140592 - DNA, 898 bp, Homo sapiens
atccagaagtggcacaaaacgcctctgctggctcgtgtgtgcaactgagactgtcagagcatggctagctcaggggtccagctctgcagggtgggggctagagaggaagcagggagtatctgcacacaggatgcccgcgctcaggtggttgccgaagtcagtgcccaggcccccccacacagtctccaaaggtccggcctccccagcgcggggctcctcgtttgaggggaggtgacttccctcccagcaggctcttggacacagtaagcttccccagccctgcctgagcagcctttcctccttgccctgttccccacctcccggctccagtccagggagctcccagggaagtggtcgacccctccggtggctgggccactctgctagagtccatccgccgagctgggggcatcggcaaggccaagctgcgcagcatgaaggagcgaaagctggagaagaagaagcagaaggagcaggagcaagtgagagccacgagccaaggtgggcacttgatgtcggatctcttcaacaagctggtcatgaggcgcaagggcatctctgggaaaggacctggggctggtgaggggcctggaggagcctttgcccgcgtgtcagactccatccctcctctgccgccaccgcagcagccacaggcagaggaggacgaggaccactgggaatcctagggggctccatgacaccttcccccccagacccagacttgggccgttgctctgacatggacacagccaggacaagctgctcagacctgcttccctgggagggggtgacggaaccagcactgggtggtgaccaccttcaaggaacttaaggctggcttgagggcacacagctggttcgggtgacttcgccgcgctgtccttcatggggtgacccg

SEQ ID NO: 140593 - DNA, 478 bp, Homo sapiens
ataggccctccaatgggaggaaaagcacgagttgtgagagcagagcctccacaggaaaccaggaggctaagtggggcggaagggagtgagctctcggactcccaggagtaaaagcttccaagttgggctctcacttcagcccctcccacacagggaagccagatgggttccccaggaccaggattccccaagggggctgctcccagagggtgtgttgctgggattgcccaggacagggatggccctctcatcaggtgggggtgagtggcagcacccacctgctgaagatgtctccagagaccttctgcaggtactgcagggcatccgccatctgctggacggcctcctctcgccgcaggtctggctggatgaggggcacggcataggtctgacctgccagggagtgctgcatcctcacaggagtcatggtgcctgcgagccgccctcccggaagctcccgccgccgcttccgacgaaa

SEQ ID NO: 140594 - DNA, 1940 bp, Homo sapiens
  misc_feature (1)...(1940): n = a,t,c or g
ctaggccagtaagtagtgcttgtgctcatctccttggctgtgataggtggccggccctcgctccagcagctggacccctacctgccgtctgctgccatcggagcccaaagccgggctgtgactgctcagaccagccggctggagggaggggctcagcaggtctggctttggccctgaggctgaggagggagaaggggatgcactgttggggaggcagctgtaactcaaagccttagcctctgttcccacgaaggcagggccatcaggcaccaaagggattctgccagcatagtgctcctggaccagtgatacacccggcaccctgtcctggacaagctgttggcctggatctgagccctcgcggaggacaaagccaccttgggttctgccattgctgctgagtggaagatcactcctgccttttcctttccctagagcctccaccaccccgagatcacatttctcactgcgcttttgtctgcccagtttcactagaagtaggcctcatcctgacaggcagctgcaccactgcctggcgctgtgcccttcctttgctctgcccgctggagacggtgtttgtcatgggcctggtctgcagggatcctgccttgcgcctcatgaccagcttgttgaagagatccgacatcaagtgcccaccttggctcgtggctctcacttgctcctgctccttctgctgcttcttcctcccactttcgctccctttcaatctgcgcaaccttgcccttgccaatgcccccagcttggcggatggactctagcaagaatggcccagccaccggaggggtcgaccacttctctctgggagctccctggactgaaggagcacgcgctgctgctgctgtccgtccctccctggcgccttgccctaacaggggccgcggttgaagggtgggaagtgggggttgcaactggcccaacaccttcagaaactgggggtggtggtgggcccggtggacctggtggtggtgctgtttaagtaaccccatcttgtaaggtctgccttgagtggctcgggctaacctcagtgtggaaggtgggcagttctggaatggtgccaggggcaagagggggcaatgccggggccccaggtcggcaatgtacatgaggtcggttggcaaatgctgggcaggtcaggcaggtaggatggaacatcaantcttcaaggcaccttggccccaggtcttggcacataggaaagtagttcttctgggacctggtgttccagctgctctctcttgctgatggacaagggggcatcaaacagcttctcctctgtctctgcccccagcatcacatgggtctttgttacagcaccagccagggggtccaggaagacatacttagagctgatgttgctgggaagacccccaagtccctcttctgcatcgtcctcgggctccggccttggtgctcacgcacacaggaaattccttcagcttctcctgcagggcccgctcgtccacgggggcggtgcttgctctggatccttgtggctgggggcggtntcatgcaaggccagggtcctgggcgccggtgaagatggagccatattcctgcaggcgctctggagcagggtacttggcacatggagaacaccttgatggccttcttgctgcccttgatcttctcaactcttggcctgggccaaggagaccttctctccaatggcctgtcacctggctccggctctgctctacctgctgggagatcctgctgaagatgtctccagagaccttctgcaggtactgcagggcatccgccatctgctggacggcctcctctcgccgcaggtctggctggatgaggggcacggcataggtctgacctgccagggagtgctgcatcctcacaggagtcatggtgcctgcgacccgcctcgtgccaagctaggcgtaatcgagggtcacagagagtaatcg

SEQ ID NO: 140595 - DNA, 903 bp, Homo sapiens
  misc_feature (1)...(903): n = a,t,c or g
gtgggggnnnnaatcgagtccctagtcagtgtggtggaattccgaactgcagatgtcacgttctgtggctgagagcctcagtgtgcatctgtagtaggaggatgtcagtgaggactgtcctgtcgctgctgagctggcaccgactgtgcctggtctacactccaggtctgccaaacgacccagcaaggtccttcacaactcttctgatccaggatcacacatcacttgtgctttgatgcctgcttctgaacaattttacctcctgagatgtccatttttgggagtgtgagccctcctctcctggtgacagctggctgaggccgtccagcctcaggacacacagggaacggctgcataaggagatctggggcagggggcccaccaggatgttctgccctgtggggggcaacaccggctgtggtctgccggcggcatccagggacagtctgtctaggtgaaggctgaggccgcccccactcgctccctcacccccatgctgacagcagtgagctgaccacagactgtagctggggtggcccctccagtgcgctccccagagcagaacaccccccaggcaacacgtctgatgaaggccaacagcgtcagtcctctggtgtttggtgacatcaaagctgtgccgaaaggccttccctcactgctaacacttgaagggcttctgtccggtgtggaccctctgatggcgaatgtggtctgtcttatgcttaaagatccacctccattaactgcactcttagggtttcttcctctctccacgctcccagtgcgggactgacactctgcaccgggaggccaagggccaccatcgtcttgctggtaccgtaaaaaccctatcctctttgttgggccagcagtgtagaagtgttccctgttcatcgcatccat

SEQ ID NO: 140596 - DNA, 1007 bp, Homo sapiens
cctgaccaaagaagcagagctgctctgacaggtgggaaaggagttcttccacggatagagcagtatccacccagggcaccgcggtcagtcgccaccttattcagctcattatgcaatgaagtatagatggtgcggatggaatccttcctgttgaagaaaggctggccccctagtttctgccccaggtaggtgaggctgtgatagaccttctcggccgcggccaggtgcgccaaggccgccagcagcgacagccagctgccccccgcgctcttgttggcctctcgttccttctccacattgtccttagccttgtcgtaagagaagatacccaggtgagagaagaacgtctccagcaccgcctgttccaccgggaccggggcggccagcgggatagactcccccatgcgagctgcgccccagctcgacccacgtggctctcctcggcctcgcacttccgggttctgagggaacgggcttgcgcacaagcgtgcgtgcgcgtgaccgcctccaccggcggactcgtgagcgcgccgctgccgggaccgctcctgggccttagagaagacgcggataagggccaaggaaagagggaggtagcggttgctgagctccttcggcgcttcggctcctgtagctctgactattcggaccgtcaaggtagaataggaggcggccagttccccgctctaagaagttgcctgcgctctgaggtgagctgacaggcccctctctgtgtggttcgtcagcgctggtgacgtcatgcaaacgtgacgtcagccctggccagaacatctggcctgggctctccaggcacctcgctgggccggctgggagatggggaagtgcctggagttgtgcccacactcacagcagggaccctagtcagccctgacaccttctacaccaactcatggaagtgatttgctgagattagaagactgacgggtaaaggttgatctccttcccattgcctagttttcatcacatcacacaccaccggttaactg

SEQ ID NO: 140597 - DNA, 1581 bp, Homo sapiens
atggtggcaatccacaatgctgatgatgccaaatgctggggggatgtggagcaattggagctctcattcactgctgctctgcctgtgctgcctcacccttctctccctggagaaaggcccctccaagaggctgttgcttttctttgttggcttctggtagatgtgctcctgaaggcaactgtctcaaaggtgggaggaggcagcgcacttgccagtgtggctcgggttatgaaagcacaggcttttagtcccctgctgaggatcctgcacaaagcctctacttccagcttcagggccaggaaagactcagcccacacacccagttgcctcttgaccccttcagggccagagagagcaggtccactcactcaggactcatgtcagccttctccccacgactccttcagagccccagctctccttgaacccagctccgcactgagcacagcagtagcctcccttagaagaagggaagagagactagagccagagcagagggtaggtgagctaggttcactgggggagcgccagcatgaaccctcagacaatcacgacttccaaccaaagtccaagcaggagcagcttcagaaaacactccagccttctggtggtccacattgttcttccttactgttgatggtattttggtggaaacagtggagaaaaactgaaccactgaaagctgaaagaacaggttacaaagaaaaagaaatttcaaccaaatgtagcagtagtccgagcggccagctttctcagtcaagtgcagcaggacccgcctggccagaggatgccagaccagaggccacctggtcagcaaccttgttgtcttttgacccaagatgcaaaaacgatagcatagaagagccatgttctgtgcacatctcctgcacagcatacagtgacccgcttaagatccacaactcctatagagaatgtggcctctgcccggaagtgaaccttgaggtggctgacccttcttcatcaagcagggagctgtggttcagggcaggagcccagggagcaggggcgatgcagggtgtcactgagctcagacctcctgagtttgtgaagtccaggaagccccaagttggcagcggccacatgggcaattgtctgagcaaggggaagaggtttctgggccactgtcagtacaaacaggggcttcctcaaaggcatcagctgcaggccgaggaacgggagagcgggatgaggcacaccaccggtggcgcatatgctgtgctcaccacgggagtcagtccctggtggatctggatctgggagcgaaggtggccctgtgccttccctggaaagaatgaagaacccgccgggaaggtgccctttcccagtgagctcgtgctcactctgcagcgatgcagagcccagagaggaggacctagggctcacggcagcatcttacgagtcaaggcctcagatgtcagcgaaggctcaggcagtttattcttgcacaaaccacagtcagccttggagacatggagaaagagtcaggtgaccctgaaaggagctggagtttcaacagttcacttgtctttaccacagtcagaaaaataccttttatggtga

SEQ ID NO: 140598 - DNA, 805 bp, Homo sapiens
tcaccccactttcccctgctcctccttcacctctttcttctttaccatgttatatgcactctctgatggcttaaaaattatttggtgtagtgcttcaatcaggatcccatctttggtctttgatgttggtgaccttcgggtggggtctttgagtggacttgctatttctttctgtttgttagttttccttctaacagtcaggcccctctgctgcagatctgctggagtttgctggaggtccactcctgaccctgtctgcctggatatcaccagtggaatctgcagaacagcaaagattgctgcctgttctttcctctggaagcgttgtcccagagggtcatctgccagatgccaggcagagctctcctgtatgatgtgtctgtcagccccggcgctgcacttgatttcacgccggtccttagctgccttcccgcggggcagggcttgggacctgcagcccgccatgcctgagcctcccatcccctccgtgggctcctgtgcggccggagcctccccgatgatcgccgccccctgctccacagcgcccagtcccatcaaccacccaagggctgaattgtgcgggcgcagggcacgggactggcaggcagctccaccggtagccccggtgcgggatccactgggtgaagccagctgggctcctgagttctttgggtccactctgcttttatgagctgtaacactcaccgcgaaggtctgcagcttcactcctgaagccagtgagaccacgagcccaccgcgaaggtctgcagcttcactcctgaagccagcgagaccacgagcccac

SEQ ID NO: 140599 - DNA, 2027 bp, Homo sapiens
agcatagatgagaccttgtgttaccaacattgtaagtaatttatgtgatgtggacgtgcttgggaagcatggactttctttcaccttgggcccaaacattggcttagaataaatcgttatttcccaaccactgaagaatctccccccagatagtgaagaggcatttctcaaccctgagcttggcgttcctaccctgccaaggcctgtctccagcactggcgtttttaggtggttttcttctcctggtgcacacctggctgctctcttccagcacgtcctccaccatgggcggtgcgggaacatcagaaatgagttcccagattggccatggttgtacaatcagttgggttttctttgtggtgcagattcttgtcccccaggtcctcccctttacctgcattccttgtgactgtgtggcctcccaaagtgctgggattacaggtttgtctacagattttgagcgttcgaagttgacccctgactaagtatactttgctgctccctcagcctacgacgtggtttggaggtgcccctggaatagtgctagaattcaggactgcctttgcccccgcttgcaggtacaggttcacagtaatcaggtcccgtgccatgacccgggccctgggctaagtcctgggcaccccatatgagagcccagcctcgggcctcctagagccagcgttgtatggagagcagttaggaggcggcagagcagtgccctgagcgcaagcacgaagcgagcgaatgtcaataccacctcatgctcagcagcagtgactggctctgtctgctgcccagccgcctccacgcacgccgaccccaacggacttttccgggagccagccgggcagtttattttggctggctgctgcaggccgtcgaatctgtcatttttgttttcagctctttcatgccctttggtgtatgacatctacaacattgtcttcggcctgcgtgctcagccattcccgatgtgcaccgtcgcaggtcaggctcagccagcagtgatggcctgctgctgttctgtgatgggctgcccaggccagggacagcacttgctggtagttgggcactgggccagcggcaccaatgagcctgttgacacccagagtttattttgtctgaggtcacaggacacctgcatggcaaggccaagtctaaatgactcccgagcccgagtggtctctgagttcaccactatatccctagggcctcgtggcccttcacacacagtggatgttccttaaatacctctcagtggcaagagagtgttgccagacgctcagaaatggagtgatgaatgcttcagtggggagccagccagctggtggcatcagcagactggaaactgctccctctgcaccacggagaggaagggccaggggcgagccagctggtccgagctgaaccacggaaggaagacgcatcatggcccccagctggaccagatggcaggagtcctcagatgagtctcccctgtctgtgggtgcaggtggtgtagactgggttggtgctccacgctggtgctccagcaaggacgagcctcagggacagcccttcctccagccatttgtgccacagccaaggacaggctgccccaagccccctgcctcccagctggttctctctcctaggtcgggaactacaagcggactgtgaagcggatcgacgatggccaccgcctgtgcagcgacctcatgaactgcctgcatgagcgggcgcgaggtgtgagcagagcagaccccaccatggccggcgctgagtgacccgcagcttctctcccctgcacagggccccagtacgggaccgtggagaaggcctggatggccttcatgtccgaggcagagagggtgagcgagctgcacctcgaggtgaaggcctcactgatgaacgatgacttcgagaagatcaagaactggcagaaggaagcctttcacaagcagatgatgggcggcttcaaggagaccaaggaagctgaggacggctttcggaaggcacagaagccctgggccaagaagctgaaagag

SEQ ID NO: 140600 - DNA, 504 bp, Homo sapiens
accatgtatttcctgactcccatcttggtagccattctctgcattttggttgtgtggatctttaaaaatgccgacagaagcatggagaaaaagaagggggagcctagaaccagggccgaagctcgcccctgggtggatgaagacttaaaagacagcagtgacctgcaccaagcagaagaagatgctgatgaatggcaagaatcagaagaaaatgttgaacacatccccttctctcataaccactatcctgagaaggaaatggttaagaggtctcaggaattttatgaacttctcaataagagacggtcagtcaggttcataagtaatgagcaagtcccaatggaagtcattgataatgtcatcagaacggcaggaacagccccgagtggggctcacacagagccctggaccttcgtggttgtgaaggacccagacgtgaagcacaagattcgaaagatcattgaggaggaagaggagatcaactacatgaaaaggatgggacat

SEQ ID NO: 140601 - DNA, 1215 bp, Homo sapiens
tccagaccatgtatttcctgactcccatcttggtagccattctctgcattttggttgtgtggatctttaaaaatgccgacagaagcatggagaaaaagaagggggagcctagaaccagggccgaagctcgcccctgggtggatgaagacttaaaagacagcagtgacctgcaccaagcgggggcaggtgggaatgcagtggaaggcgtggatcagagtaaagttaatggaagagcaacagggtttgctagtaaattggatattgggaaaaggaggagagagggagagttggagactggaagctatcccccaaagactcatgcctatgctctgaaaaagagtggtccatggaatccagggacatggcagcacaggaaaatcgtcagaggtttacaattttacactgtcttcttccctcactcctcagttttggcatttttagctccagtgattgacccttctgttgcatcttcatcttctctaagatcttcaactactgataatgagcttgcagaactttctgaatttgcagatgctgatgaatggcaagaatcagaagaaaatgttgaacacatccccttctctcataaccactatcctgagaaggaaatggttaagaggtctcaggaattttatgaacttctcaataagagacggtcagtcaggttcataagtaatgagcaagtcccaatggaagtcattgataatgtcatcagggtgacaggaacagccccgagtggggctcacacagagccctggaccttcgtggttgtgaaggacccagacgtgaagcacaagattcgaaagatcattgaggaggaagaggagatcaactacatgaaaaggatgggacatcgctgggtcacagacctcaagcttcacagaaccaactggattaaagagtacttggatactgcccctattttgattctcattttcaaacaagtacatggtttcgccgcaaatggcaagaaaaaagtccactactacaatgagatcagtgtttccatcgcttgtggcatcctgctagctgtattttagaatgcaggtctggtgactgtcactaccactcctctcaactgtggccctcgactgagggtgctcctgggccgccccgcacatgaaaagctgctgatgctgctccccgtggggtaccccagcaaggaggccacggtgcctgacctcaagcgcaaacctctggaccagatcatggtga

SEQ ID NO: 140602 - DNA, 420 bp, Homo sapiens
cgcgcccaggggagatggcgtgcaagtatccgctgcggtgttctggtgctagagtggagaggctggcaaagaagaaggcacacgcatgtttgctatggacagcaaccatcaaagtaattacaaactcagtaaaactgagaagaagttcttaaggaaacagattaaagccaagcatactttgctgagacatgaaggcattgagacagtatcctatgccactcagagcctggttgttgccaatggtggtttgggtaatggtgtgagtcggaaccagctgctcccggttttagagaaatgtggactggtggatgctctcttaatgccacctaacaagccgtactcatttgcaagatacagaactacagaagaatctaagagagcctatgttaccctcaatggaaaagaagtagtggatgattt

SEQ ID NO: 140603 - DNA, 852 bp, Homo sapiens
aaatgtagtgcagttttctccaacatggccgcgcccaggggagatggcgtgcaagtatccgctgcggtgttctggtgctagagtggagaggctggcaaagaagaaggcacacgcatggtgagaatccggcctgagccgaagcggagtttgctatggacagcaaccatcaaagtaattacaaactcagtaaaactgagaagaagttcttaaggaaacagattaaagccaagcatactttgctgagacatgaaggcattgagacagtatcctatgccactcagagcctggttgttgccaatggtggttagggtaatggtgtgagtcggaaccagctgctcccggttttagagaaatgtggactggtggatgctctcttaatgccacctaacaagccgtactcatttgcaagatacagaactacagaagaatctaagagagcctatgttaccctcaatggaaaagaagtagtggatgatttaggacaaaagatcactctgtatttgaattttgtggaaaaagtgcagtggaaggagttgaggcctcaagccttaccaccaggactcatggtagtagaagaaataatttcttctgaggaggagaaaatgcttttggaaagtgttgattggacagaagatacagacaatcaaaactctcaaaaatccttaaaacacagaagagtaaagcattttggttatgagttccactatgagaacaacaatgtagataaagataagccattatctgggggtcttcctgacatttgtgaaagctttttggagaaatggttgaggaaaggttacattaaacataaacctgatcaaatgaccataaatcagtatgaacctgggcaag

SEQ ID NO: 140604 - DNA, 924 bp, Homo sapiens
tcattcttgggatacacttatgttattgctgtcaggttcatctgccatacacctatccctagcccttcttgggggctccagaacttctaaagtgaatctttggtgttggtgtggtgtggtcgtgtgtcgtgtgtgttgttctgtgtctgtgatgtgtgtgtgctggtgggtggtagtggtgttgctgttcggtgttttggtgggcgtggttgtggtccgcgtcgggttggtcgtcgttggtcgtgttggtgtggttggtgtggtgctgtactcattcgccgtgtgtgtctcgctgttatgttcggtctcgcgctgtgtgtacatcctttgctctatcctcgcacgcttttgctccgtggacaaaaggtagataggtttaagacaaacctttcttcgggagagtctttggttactctggttatatttcccgcccatggactcgccaggtccagatttttgaaccttgatgtattgttcggtgtccactttattgccgtggagttctggcatgctgttggccttattgtaaacaaacaagttaaaggcaagattcttgccaagagaattaatgcgcttattgaacacattaagcactctaagagccaagatagtttcctgcactgtgcgaacgagcagcgccagacgtagcaatgtgctggaccatgtatggggccggaacctaggcaagcgtgcctgaacacatgcatccggtcctagaacgctaggcatactgtttctagaaacgcaatgaaatcctgggcatgcagtatttaaaacagcaacatgtctgacagctccgagaaatgaaatacgtccatttcttttggcaaggagcagaaggcaacataaagcagctgcaagaattaattcatggagatagttgacattttcgagctgactgcctcttagagaaaatgatgtcat

SEQ ID NO: 140605 - DNA, 363 bp, Homo sapiens
ggcacgaggaaccgccatcttccagtaattcgccaaaatgacgaacacaaagggaaagaggagaggcacccgatatatgttctctaggccttttagaaaacatggagttgttcctttggccacatatatgcgaatctataagaaaggtgatattgtagacatcaagggaatgggtactgttcaaaaaggaatgccccacaagtgttaccatggcaaaactggaagagtctacaatgttacccagcatgctgttggcattgttgtaaacaaacaagttaagggcaagattcttgccaagagaattaatgtgcgtattgagcacatttaagcactctaagagccgagatagcttcctgaaacgtg

SEQ ID NO: 140606 - DNA, 1277 bp, Homo sapiens
cagccatcccattaacccctttcctggaggcaaccatttttaccagtttctggggtttcctactagaggtattcagtgcacagaaacatatctattatgtgtgtgttccatacatacatatttatgtaaaattttttctactgttctgtatcttggtttttaaacgtaatatatctttgagctaatttcatttaagcaagcatagagctcccccatatcccgtgacagccccaccgaggacctcctggggctccctagtcaaacaggttaatgagtctaatggctcaaggcttctgagaacctccctggtgcatgaggaccttgagggggtctcggtggtcagtggcatgaactgtgacagtgcccttgcacggtacatcatcatcctggagaccctcatcatttatttaatcagccctcgttgttggataattgattcatcaggggcctgctctggcctggccatgtatctaccacttctaggtgatgatggggtgctgctgtgcacacccaactttatggcttggcggtcaaatcgcacccagttcatgatgagaagctcaagtcacatggtagacgcatcgccccgaggtagacacatgtcccctagggaagaagccttcggctactcctcacgtgcaagtcacatgctcctctccctgctggcaccaccatggccacagctgatgggcaggggactcggctgccagcagcaggagcggccacaagaatgtgtacccctggggatgacaagaagcccctacagtgaaatccacttcggctcttcacgggccctggggtcttcacctgggtcctgtgcccacgaggtcttgggccccagcatcctcacagtaaacccctttatcccggggtcctcagtgcacgtctggcccagcaacggcaatgaaaccaacaaactgccacacactagagctgggtcctgcggctctgccacctgctctgtcaaacgctggggtccccagaagccacggcccctgccaaagcccccactggtgccccaggctctcctgctggtcagaggccctgctgcggccagggaggaagccgtccagccaccgaaggaagaagtcacacagcgaccgggcggtcactcttccccaggtgtgtttgcacatctgaaggggccacgttctgtggtggaaatccggatggagtatggggaagagtattcaggggtgtattgggggcagatccctcgtaagtggtgtcactggctggtggcaccctcagttactggctgcaaatgggtgggttga

SEQ ID NO: 140607 - DNA, 382 bp, Homo sapiens
tttcgtacaagttgccggcagctgagcgccgcgcctcctcctgctcgcagccccctacgcccacccggcggcggtggccagcgccaggacgcacatcccgcggacaccgaccccagatgtaaagcgggaccccagcccctcgccccccggcgcgatcgacagtctcgccagcgtctcctctgccaaaacccagggctggaagatgtggcagccggccacggagcgcctgcagcactttcagaccatgctgaagtctaaattgaatgtcttaacactgaaaaaggaacctctcccagcggtcatcttccatgagccggaggccattgagctgtgcacgaccacaccgctgatgaagacaaggactcacagtggctgcaaggtt

SEQ ID NO: 140608 - DNA, 1578 bp, Homo sapiens
ctaagtgtcaactgattggattggaggatgcaaagtattgtttctgggtgtgtctgtgagggtgttgccagaaaagattaacgtctgagtcagtggactggaagaggcagacccacactcagtctgtgtgggcaccatccagttggctgccagcaaggtgaatcttctggccttcatctttctcctactcttttcatccaggaagtatgcttcctgcccctgaacatcagaatccggttctttggcctttgaactcttggatttacaccagcggttcgccaggggctcttgggcatataactctgccataataaagacgctcatgtttccatttgttgcctttgggttgccaattttcttctctaccttttttggaaaattacattctgattttcttttgcggaatgggctccacctcattgaatacagttggatggaacagttacccaaggtgccttgtgctctcacagactgtccctgcagcaatggcctaggactgtactcatcagccactgtggacgaggaaattccaaacagcggaccctcatgctcattaaagtgtcttgctgtctcacttgcttgctcagatgaaagccaactgccacgttttgagttgctccaggaaaggcttttgtggtaaggaactgagaaatctctggccaacaggcagcaagaagctgaaaccatcagtccaacaacccctggagccatatccactttctctcctgactccactggaacaaggaggttaggagaatgagcactggacagggtgaagagggaggagcaaggctgagcgtggcttaagttcctgctggggacgaggagattcctccggttttcaaaatattccttttccattgattctgctaggtccttggtcccgggtcggtggccagcgccaggacgcacatcccgcggacaccgaccccagatgtaaagcgggaccccagcccctcgccccccggcgcgatcgacagtctcgccagcgtctcctctgccaaaacccagggctggaagatgtggcagccggccacggagcgcctgcaggtaaggggcacccgggagccgggggccagcctttcccagaagaactccttcagtgacacgttgggccttgggattgccctggttgcaaggtttgaggactgccttttgctggcaaatattgtcaagagtcacggcagctactctgccagataaaatccactgaatcctgcagttaaacttttggcaagctaggagccacattgtttcgtagtaaactttgaagacgtgtttaacttcatgaataacaaataaagcttcttggggaaatagccttttcctccttttctgtcttcttgctgtcctgagcatagatgtgatgtctagcattgcagcagccatattgtgattcgggtggtactggtactgtgggttgtcccgcagttctggagactggaagtcttgtgttggaaacagaaccaggtccttggtcttctgactcttaaaggccaaggtggtaactgattttacttgtttagcaccattcattgctctccaagtacagctctcgcagcccacctgcaggtgcat

SEQ ID NO: 140609 - DNA, 1722 bp, Homo sapiens
agccgcacaccatcctgcgcgtcgtgtcttgggtaaggacggactggccgacggctctgccaggccggggtggtgggggtgtgagcaaaggcggcgcgccggagccagggtttaaggtggccttttttggggggtggatcagggcgtggaccatctcggtggggtgcatgccgcgcctgcgatggacgttggaggaggagagggccgggaaccgggttcgtattgacagctgtgaccttcagtaagtgtcccctccccaccctctgtgcctcagtcttcccacccgaactgggctgggctgggtcagagcctccccgatgagcaccaccccctgctccacggcgcctagtcccatcgaccacccaagggctgaggagtgcgagcgcacggcgcgggagtggcaggcagctccacctgcagccccggtgcgggatccactaggtgaagccagctgggctcctgagtctggtggggacgtggagagtctttatgtctagctcagggattgtcttgaagtcagtgagaccaagaacccaccaattccggacacaagagcagagcagacggcatcagctggagcctggaagggcagtcatgccctgtgtttctgggacaaacgtcccttcacagatagagttttgctcatctccccgctgctggtggagcaggggccaggtgaaggggacctggagagaggggcggctgcgtagctgggacagccccaagctgtcaaacccaagctctggcagccgtgaggggtttatgcatcctcccttgaatccaaacggctgcagaatgtggacgccctcaccccgctcgaggagcaggcccggatgtgaggcaggttccccatctgctgtgggtcagcgagaggcagggcctctctgagccttagcctcccttctcctccagcccccggaagcatgtgtctgttagtaagtgttcgagaggggccttcctggtgttattcctcttttctggggccttgagagaggaaatgaaaggagttctgcatctacaaccgcaaccccaacgcctgcagctatggcgtggccgtgggcgtgctcgccttcctcacctgcctgctgtacctggccctggacgtgtacttcccgcagatcagcagcgtcaaggaccgcaagaaagccgtcctgtccgacatcggtgtctcgggtgagccccacccagcaggtaccccctgcacagagtctacagagggctgtcccggccataggaggcgcaaggacaacccactgaacgaagggacggacgcagcccgggccgccatcgccttctcctttttctccatcttcacctgggtgagtacagccaccgcgcaccagcccacactcgtcccctttccccactgagcccctggatgggtggtgttccctgcctcggcacagccgtaggcctccccggcttgcagaggccggcagccctgtatcacccctggcagtgaggtggcaggagcacccagcactttgggaggccaaggcaggcactacatggaccccagccaggactccagcatgccttacgcgccctacgtggagcccactgggccggatcccgccggtatgggcggcacctaccagcagccggccaacaccttcgacaccgagccccagggctaccagtcgcagggctactgagccacagtgaccgcctgcccccgcccctccccatctgtcccctctctccacacccagcccctgctcc

SEQ ID NO: 140610 - DNA, 628 bp, Homo sapiens
tttctccttcttagttttcttcccaaatggttcctcagccccagtgctgggccctgaaataggcccagctccctgtatagttcccacagagctggccacaccataagtcaggggcaaactggaactgtgggaaggagctgcagcctgtacttccccttcagttagagcctgaagctggaggagcttctttagcaagtaccttctttcttctttttgctttaagaaatttttcctcaagacgagcaatttcatcacaaatagcagcattttcaaacaccgtggccttggccgctttgcgcagccgcaggtacttcagccggtacttctcattctggctcttcttcgggagctttttcatcctggccttgctggactgcagcggagcccgcggcgaggaagcgaggccgtccagcaggctcatggtccagccccgctacgggggccccagggcgctgccggcatcggatcctaagtcggggagcgggcgggagcgctggctttgtctgttccgggctacgcggaatcgggcctctaggaatctagctctccgggacgttcccagggctgaccgcaggaccagagacacccgcaaccgaacgggctcccggcgcctcccagcacttccgtg

SEQ ID NO: 140611 - DNA, 1599 bp, Homo sapiens
  misc_feature (1)...(1599): n = a,t,c or g
tttttttttttttttttgtaaatgatgactcaatctatctccccaagcaccaatcctgaagggaaatgctgaatctgaatgnccccccataggtggaacttcaaactcctccaatgttcaaaaacaacatcgctttttccttcacaaaatcttcattatgtatttgatggaaccaatatcctttgaaataacataaattccaagctttagggtaccctttggacggtataggggataaaagaaagggaacagtcaatcagatgctaagttctcttagttttacttttcttgtttctctncccccttttcccttttttcagtgcaaataggcaaggcaatacacataggcaagtgctggaataggtgcttttgggaatgtgttattctaatttctggacctttcccttatggctttcccaaaatgctgagagacggttcaggcttttgggtagagagaagagatgaactggttgacttgggatgtgggggggacaatttgaggaactcccacccctatttccaagcactggaggcaagcccaaactattccaatataaagttatggctggcaagctatattaagtttattcactccaataaatccagtgcttctaccaataaaagaaaggaagaaacacttggaacactcaaaggttagagggggggaaattactgacagtttcatgtacctctttgggcaaagggtcagttatggggatttgaggggcctcaagaaaataggtctgtgtactggaagtcttaaaaccggaatcaggtttatctaagttggaggtcaggggctctgacaccagtacccttgggcaaaatcaatctctctgggcttccagtgttcctccattttaacaaataatgcctaattctcaagggctgtatctcgagaatcaaaacacatttcctaagagtcctgcagtaacaacgatgactaaaatttattggtatgtcttttacgcaccaagcacttttctttactcatttaatattcattattctgcaagacagttactagctcatttacagatgaggacacagagaaattacgtaatttgtccaaggccacagggcttaaaaagtagtaacgtatacggaaaagccaccactgtattaatactgtcacactgggaagggggaacagcttggggaaagattttgtgagggagtctccaggaggggaccggctgaacgtgggtcagactcacaaacaccgtggccttggccgctttgcgcagccgcatggtacttcagccggtacttctcattgtggctcttcttcgggagctttttcatcctggccttgctggactgcagcggagcccgcggcgaggaagcgaggccgtccagcaggatcatggtccagccccgctacgggggccccaggacgctgccggcatcggatcctaagtcggggagcgggcgggagcgctggctttgtctgttccgggctagcggaatcgggcctctaggaatctagctctccgggacgttcccagggctgaccgcagggccagagacacccgcaaccgaacgggctcccggcgcctcccagcacttccgtgtctgtcctcgtccgcatctctcgca

SEQ ID NO: 140612 - DNA, 766 bp, Homo sapiens
tttttttttaggcccaggacgctcttcattccctttgcacaccacccaccaaccactgcctgccccactccctgtcccccacttcacagagtgcccccagggccagcaggtggtacgggtgtctagcccgtgaccttgttggcacagtccagcagggcggtgtgaatgtccttggcacaggaaatctgggctttgatgaccgccaggtactgtgggtaggggaggctgtcaggctgcactgcgtcgggcttggtggctgtgggcacccaacgttggagagtgcttggcactgtcacaactctgtgacaggcactcatgcgccaggcgcaggcacagctccagctggtcacagagtgcatagaactcttccaggcacttgtcaaagcgctgtatgggtccatcactgctcttttgtccattgtcgatgttagtgttctgaatcaagttgtgggccgcaaccttcatcaaggtctgtagactctccttcagctgcgggatgagcatcttataacgctgcacaggatcgaagtcctgttgctgttgctgcaggaggccgctctgggcagggcccaccagttgtgctggcggttgcggctgctgctggggacccgggccgccagccgaactaggacccgatacaccagcagctgaggaagccgctgaagcttgctgctgggatgcagccatcttcctcgcgtagaccgccggaagtgcgttacgactgcgtctctccccgttgcttttcagcatccctatttctagtccc

SEQ ID NO: 140613 - DNA, 576 bp, Homo sapiens
attttgaaacacttgatggaaaaggcatcaagaatgttaaagttttggattccacgtcctttttgggtccttgctgcgaaagtgctcaaccttgtgctgccaaacttgtccctcgggcccatcgactccagcgtgctctctcggaataagacagaggtcgacatttataactcagaccccctgatctgccaggcagggctgaaggtgtgcttcggcatccaactgctgaatgccgtctcacgggtggagcgcgccctccccaagctgactgtgcccttcctgctgctccagggctctgccgatcgcctgtgtgacagcaaaggggcctacctgctcatggagttagccaagagccaaggacaagactctcaagatttatgaaggtgcctaccatgttctccacaaggagcttcctgaagtcaccaactccgtctttccatgaaataaacatgtgggtctctcaaaggacagccacggcaggaactgcgtccccaccctgaatgcattggccggtgccggtcaatgggtctggggggatgcaggcaggggaagggcagagatggcttctcagatatg

SEQ ID NO: 140614 - DNA, 828 bp, Homo sapiens
atgggggagccatgcaggggctcctctctcctgagctggatccaaggctctctcaatgctcctgtaggactattcgaggattttgaaacacttgatggaaaaggcatcaagaatgttatgttttggattccacgtcctttttggctcaggatggaggttgtgggagagcaggagcagcagtcatctggtcgacctcgacaatgtgatccatctggtgccaggaccacctgtgtgcgcattcactgggaaaagtctgcagaatctacaccaggccttcctggagggcgtgttcctccatctacattcgtgatggaacaaccagttattgtcgccgggacaccagtgcctcatgcacaccatcagccacgggagttttactgttacaagcttgtcctcttaggcacattccctcatcctgaacctgctggcagcagctcctttaggggagcgagggcccaggtccctgcagaatcaggtgatgggtccccaaaacacaaatggtggcacaatgagaaatctggtggtgggcttggacgaaatggtgtggatgctgggtggtctcttgctttcacctctgtggcaggcactgctgaggtacctgctggagcagcgagacgtggaggtgaatgtgcgggacaagtgggacagcacccccttgtgagtgctggagagaggggaaggacgactgtggaagagacagacccatggaaacacatggttgctgtagctcattctcgatcagcagccccagagcaggcaaggatgctaccactggcacatgatgagcatgaacttctgcagattcttctagctctgatcagatcctaa

SEQ ID NO: 140615 - DNA, 2430 bp, Homo sapiens
tcaaaagtcaattccacgaaggcgcaggcttggggattcctttgtcagagaacgattgtctaggtccaagtcgcgcagaggaagtttgtccttggcaggctgtgtgaggctgtgcagcacactgtctttctccagcctccagggtgtccggaggcatcctggtgtcagccgccaatccaaaagttgtctctcaaagctccaggggagggaaagagaggcaggaggcacatggctgaaatcaggatgagtgacagcagttctggcagatcgggcaggaaaatggctcaaagttagttcttccacattcagaacgactgtttttacctgaaaatgcccaggcaccttaagggcctgaatgaagtctttggagaagagggaggtggccagcacatgggacatgagtctctgacactcagtttccacactgatagaatgggaaaaatcatctgtcaacatcagaggaacgtcccaagccctaaatgggcgggtatctggtgtggctcttccctctactgcatggtagttcatgccccattgcaggcccatatgctttgtgcattgaatgtgtgtttttcttgaatctttctcgtaccttcttccctctgtaaacttaagcctcggagaaatattttctttccctgagtctgtttcctctttcgactttcttggattagatgagctggtaaagagggatgttaaggggagtgggggtgaccgcaggtccccatatgctctgggtaaggccacacatacacaccccttcagcaggattgcagagcccctaattagctttgtgatttttaagagccacttccccttctggccaccacttttcttatcatctctggatctggataagccttcgctcctttttgtgtaatgaatgcagcgagtcctgttgcctactgaattcgtccatgtggcaggctcctgggctttctcactattccctcctattgatatggttatggttagtcttccaaacactgaatccacggcatcttctgcatctccttccttcacctctgaatgtcgtggatcgcctctgcagctgccagcatcatcatcaccaataatgtcatcatcttcatcataatcttcattaaaatcattctcatcaccggcatcatcatcaccagtaacgtcttcctcttcattatcatcttcatcaacatcatcatcatcaccaaaatcattgtcaacagcatcatcatcgttatcaccaacatcattaccaacaccatgaccaccattatcgtcatcatcatccttggctggctggagcccgtgccctctgtgactccaacgatgcgggctgcccaggaagcactggtgatggatggcgcccttactcagctgactctgactcgctggacgctctttcctttcctcgtcctcttccttttcctgattgccaatctctgaggggcttggcatctgcagtgattcagggctataactggctggttctgactgaaaatcacattctttttcatctcttttgatcagtttggtaagcctgtgcttgactttcctcatccggagttccttcaggcgacacagataaccgatgggtgataaagtcgaggaccgggtctggtgccagcttttcctcttcccactgctgactttctgtgagttttcctctatcatggcttcttgaataaatggccagtggcttctaaagcttgcacctataggagtcacgtgctcgtaggggtgaagactatcactgatggaattctgtcccaaaatcctgctaacagatggcataaagagcgtctgtaagaactgaggtggagcttctagaacgagaggattggagagcgaggagagcagatggaagcatccttgatccattggagtactgagccttgtgagaagtgtaaccaccctgctaaggaaccatgtggggagattgtggtagagcagaaacctaggggagctgtgagagggggaactggaatctagtactgagagcttcttaaagggattcttccctaattcagagactttgtcttgagacttgaagagtgggttctgcaaggctgctccatgaacattaggctgagaacagcaaggaaaatgccatttggaagcattccactcagaacggatgtccagctgctcatttagatcatgaaccatatatttgagctgcttgttgtgggctttaaggtcgttagtaagctccaagaaggccctgttttgataagagagagcagtgctgtcccctttgggcacggcccttcccctggaagaagaactggaaatctcagatgactcacatttcctgtgctgtaactccaggattttcaaacatctgacactttcatcccggttatcgaggaaataatatgttagctccgtcagactgctttgaatggtcatgcattgcttaacgacaaggatacgttctgaaaaacgcat

SEQ ID NO: 140616 - DNA, 1347 bp, Homo sapiens
atgcatgctacgaattcgagctcggtaccccaggagatccaagtggaagctctgtgtcctcttctgacccagcctcagaagtcaccgagcatcacttctgccatgctctgccagttgaagaagccacagccctctagatccaaggagagggaggcagaccccatctcatgtgggccggagtgtcaaggaaactgggatctctgtgttgaagctgccacagggctgtatggggatggccatctgcgcgattcttcacgcacacgcgtgctcatgaccactggaacttacagggatctgcagggtcttgagggcagggcgggacacgtggctgagctccacgttctgcctgtctgggcaatccaggacaggggctatgttctgtggtgctggactgcttctctgcaccctagggatgtagctagggagcagggcttccctaatgactgcacgtgggctctgggatgcacgctgactgcagagtctacccatacacattcagcagcactggcaaggcaagcatattcccagctcagcaagaaacccacactcctgaatgaaccggagcacattactgagaaaaagttcattaaccttgctagatttgaagcactcaatagccgcacgtggctaggggttctatactggatcgcacagatacaggatgtgcctgtcaccgtggaaagcactactggacagcgtgctgccagaatttctcccagggaggcagaccgaacactagttaaaggacaagtccagggaataaggcaaactgtcattatgtcagtaccaggaaggaaagagggagataagctcaaagaagtctctgatgggagggaagcagctaaccaagcagggatgaagtggggtaaggagtgtaagagcagttcgggcacagagaatgccatgagcgggaaggaagttgggatacttcaggaggagaaaggagactggagtcatggggtagtaagagggtggcaggagaagtggatgacatacaacttttgggcatgtggaagaggtaagaatgctacttgcaggcttgaaatgaccagaacttctgagaatgaccttaagcataaccaggaaggactatggcatggcagagagagggccatgctgggtgacacacacaccctggcgtggagggaagaggaaatggagcaaaagcaggctctccgcattcacagcttatatggaaagacaagtggacaacgagctctaggaagctggtgggtggagcgattcatgggaatgaggagtgggtcttcgtcagactgcaatgggctggttacagaagggaagaagcaacaccagcctgtggcaacttggaatctccgaaggttttaa

SEQ ID NO: 140617 - DNA, 387 bp, Homo sapiens
atggagagtacagaaataggcccacatatttatgagcaatttactttaacaaagatgacaaggaaatttaataaagagcaacttgtcctaatatcccttgcattattggactctggccatactagcaattccctggcctggccatcctgtcttattgtgtctggagttggttcctgccggtgggtttgtggtctcactgacttcaagaatgaagccttcgaccttcacaatctgctggagtttgtaggagatccactccagaccctgtttgcctgggtgtcacgagaggaggctgcagaacagaaaagattgctgcctgttccttcctctggaagcttcgtcccagaggggcacctgccagatgccagccagagctctcctgtatga

SEQ ID NO: 140618 - DNA, 582 bp, Homo sapiens
atgaacatgaacatcaaaaaaattgtaaaacaagccacagttctgacttttacgactgcacttctggcaggaggagcgactcaagccttcgcgaaagaaaataaccaaaaagcatacaaagaaacgtacggcgtctctcatattacacgccatgatatgctgcagatccctaaacagcagcaaaacgaaaaataccaagtgcctcaattcgatcaatcaacgattaaaaatattgagtctgcaaaagggggatcctctagagtcgacctgcaggcattaatgttgccacgtccaccggaggacgaaggccccggggcagagaagagtcggcaggcagcacgtggtgagtgcgggaaaccacaggcatccgcacaagggggatcctctagagtcgacctgcaggcatgcaaccgttactggacaaggtctgctggagtttgccggaggtccacttcagaccctgtttgcctagatatcaccagcggaggctacagaacagcaaagattgctgcctgctccttcctctggaagcttcgtccagagagacacccaccagatgccagctggagctctcctgtatga

SEQ ID NO: 140619 - DNA, 1527 bp, Homo sapiens
tcaataatgctgtgctttttccagactcgtagaggtaccaccttggttgtcttggataaaatctggaataattatctgggttaccaggagagacccttgttcttttcgcttactttctccaaaacatatgaagcctctctctctgtgctgaaccacctggaaaggggtgagtgtactctcttctgcaagtgaggatgtagcaagaagacccacaacagatgccagcaccttaatcttgggttttccagatcccaagactatgagaaataaatttccgttctttataaggtacacagtctgtaatattctgtcacagcagcacaaatgaactaagacagaaattggtaccaggagcataaatgaactaagacagcaattatttgctacaacaaatacctttttttttccaagcatctttggtgaatctaatacaacatccacgagcctcactttgaaaaactctgccatttggtgccccactggaacaaagcttccagaaggaagaacaggcagcaatctttgctgttctgcagcctctgctggtgatacccaggcaaacagggtctggagtggaccttcagcaaactttagcagacctgcagaagaaggtcctgttagaaggaaaactaacaaagggaaaggaatagcatcaacatcaacaaaaatgacatccacacaaaaatccaacagtaaggtctcacaaagctctacgtgagggttcggaatgactcctttgataaggctttttaaagcaccctgcatcctgaggaagataaaaccaagagaaatttccagatagcgtacattccattttatgccacttgtacctctattccaatagttctcagattgttctttatcttctaacaccaccatatcccagtatgtattattttttagaacctgatgctcagagttgaatatcaagtctatggtgtccccaacatgcaattcataagtccctcctacattttggattttagatttgtttgttagagtttgtatcatgtctttgtttttatacagccgcacctcaaaaggagctacatcattgtagtttgcattgggagccacttggccataaattaaatataagccattctgaagtatctccagcttccagtcagacaccttattcacgcaaggaggttcagaagatgccatttgccattttgagggtaatggtcctctaattggagaaaaataaagattagccaactgaaggagcaaagaaatagcaacataactattgagcaaaagagccacagcttccaggatgatctctgagctccttgagttcttgaatggcttaaaggcatattttccaagtggctcaaacacatttttggagaaatgagagctgctctgtggccttaggcatgttacttgagttctctgagcttcagtttccttcacaaaaatttcttgagactgcttcttatcttggtttctaggatatgattctcttttggttctctcccttctttttgccttatcattaggcatctttatggagtcctttcccat

SEQ ID NO: 140620 - DNA, 1192 bp, Homo sapiens
atggtggttctcttggaacgtgatcagcagcaagaaggctggcagcagctggacacacagtacacaggtgcacaggagctgctctggccacagctggacccacagctggtttggccacagcagctggacccacagcaggtgggctggcagcagggtgtgctgcagcaggaaggctggcagcagctggtcacacagcaagttgggcggcagcaaggctggcagcagctggacacacagcaggcgggctggcagcagggtgtgctgctgcaggtggtcacagtggtgggcttccagcaggtggtcctgcagcaggtggtcctgcagcagtcaggcccctcttctgcaggtctgctggagtttgctgaaggtccactccagaccctgtttgcctgggtattgctgcctgctccttcctctggaagcttcgtcccagacgggcacccatcagatgccagccggagctctcctgttgcataaggtgtctgtcgccccttgctgggaggagtcaggaggcatgtgggtcagagacccacctgaggaggcagtctgtcccttagcagagcttgagcgctgtgctgggagaacagtcgatctcttcagagcccgcaggcaggaacgtttgagtctgctgctgaagctgtgcccacagctgccccaccccacaggtgctctgtcccagggagatgggagttttatctgtaagcccctgaatggggctgctgcctttctttcagagatgacctcccgagacaggaggaatatagagcggcagtctggccacagtggctttgctgtgctgaggtggttccgcacccagttcgaaattcccggcaactttgtttacactgtgaggggaaaactgcctactcaagctttggcagtggtgggcgcccctccccgcaccaagctcgagtgtcccaggtcgacttcagactgctgtgctgccagcgagaatttcaagccagtgaattttagcttgttgggtgccttgggggtgggatctgctgaacaagaccactcggctccctggcttcagcccctttccagggtagtgaacagttttgtgccgctggcattccaggcaccactaggatatgaaaacaacaacaacaacaacaaagcaaaacaaaaacacaaaactcctacagctagcttggtgtttgcccaaacagccacccagttttgtgcttga

SEQ ID NO: 140621 - DNA, 662 bp, Homo sapiens
atgagggaccgtgctgtaagggatggtgctgtccagcccagatactatgcttttcccacggtcttcataacctgcagaccaggagattcccttaggtgcctacaccaccagggccctaggtttcaagcacaaaactggtcagccatttgggcagacatcaagctagctgcaggagttttttcccataccccagtggtgcctggaatgcaggagagctctggctggcatctggcaggtacccctctgggatgaagcttcccttccagaggaaggagcaggcagcaatctttgctgttctgcagcctccactggtgatacccaggcaaacagggtctggaatggacctccagcaaactccagcagacctgcaggagaggaggctgactgttagaaggaaaactaacaaacagaaaggaatagcatcaacatcaacaaaaaggacgtccacacagaaaccccaatcaaagttcaacaacatcaaagaccaaaggtagataaatccatgaagataaggaaaaaccagcacaaaaaggctgaaaattccaaacaccagaacgtcaattctcctccaaaggatcacaactccttgccagcaagggaacaaaactggacagagaatgggtttgaggaattgacagaactagacttcagaaggtgggtaa

SEQ ID NO: 140622 - DNA, 1798 bp, Homo sapiens
ccagtggcctcttggtgttcccgggatgtaggtccccctttagcccgtcccattcctcccccggcccctcatactccactctcttcagccggcccatctgcggcagcacctgggccagctcggcagctgcctcatccccgaggagattccaggacagcctcccagacatcccacagggaagcagctcatgttcactgagcactgacgggatggctggtcctacatgaagtcccaggaaagacctgtgcatgaagtcccagggaagaccctgacccgctcccagtttcttgacagatttaagttgcttttcttctaagccttctttagcagtctcttcaaaaagtttgatgacaccattaaggtccacaggcttcaaaacaccagttccacatggcgagggaggcttgctgcaggtgatccctgtcctcgtgggctctacaccctggcaggtcaacacagaagtagggcggctgggaggctggaactggggaacagggagcagacgttctgcaagtagggagcacttcatgagtggcaagtgtggtgtctctggtggtgttccaacggacactccctctggaatgtcatgagaattaaaaactggggcataagggaagaagatggctgagaatggagcctcggtttctatgtctgtaaaacagtaagtactggaccccatctggtcctcctcccagacttgcatctggtgcaatctacggaaacagtctatctgtctgagcagcgggagctccatacagaaacgcaggacccctccagccaggttgttttccgccaagctgatctcttccaaatggggggatccatccagggcctgggccaggctcagggccccacctgggcccagatggctgaatggtaggttctcaggttcagcatgacaacgaactatatttttgtgaccggcggggtcgtatcctctctgggtaaaggcattgccgcagcctccctcgcagccattcttgaagcccgtggcctcaatgtgaccatcatgaaactggatccgtacatcaacgtcgatccaggtactgatgtccaagcggaagagccactgcagagtggagaagcaccgaaccaaacccaacacggcatccagggacaaaccgttctcactgaggccaatcttttcagatttggagtcgcagctgtctgcgtaaaaatcatcactcaacccctgatcaaccatgatttccgcaacgcgttgaccttgtgaaataagactcaccgggtcgtaatccaaccaggcatctttattttcagcaagatatgcagcaaaggcttgctgtccccacggcacttgcgatggggagacaatgggcgaaaacgccgagacgctgacatattcatctgggttacgtaacgccagcaccagcgcgcccagcccgcccatagaatgaccagagatagactttttggccgttgccggaaaatgatgcatcactaaatccggcagctcgttgcggatatagtcatacattttgtaatgttcattccacggcgcttgcgtcgcgttcaggtaaaacccggcaccttgcccgagatcgtaacggtcagcatctgcgacatgactgcctcgcggactggtgtccggcgcaacaacaataatgttgtgctcagccgcgtaacgctgcatccccgatttagtaatgaaattctgctcgttgcaggtcaggcctgaaagccagtacagcaccggcaatttttcattcgcggcttttggtgggagatagacgccgacattcatttcacatttcagtgattgggaataatgccgatacat

SEQ ID NO: 140623 - DNA, 1836 bp, Homo sapiens
ttttttttttttttttttgacgtggaataccattgtgtttattgatcaaacctggcttcgagtgtgacagagccattcttggttctccttggaagtaacaagaacactgggtaacatgtgaagtgcatggagactcacctgaatcccaccaaagtagtagctggacccagtagcctagcttattgtcttggcagtgccccctacccagtaccattaaacctggctttgtcccttacataggacaaactgggcttttccactcccgtggggctgtgttcctacctccacctgtccttggaagctagtatgtaagtaagggaggagtcatcaagtttataagatgggtaggctgaggattgagcgcaggaggggacttcatggctgagtccctggcttgttccagagccctggcccttgagcccctggactggtcagtgcatggacactctcccctcccagctcgggcggaagacttttcctgacttagctgctccatacacacaatctataaatatgtatttgctttaaaaattaaataaattagatcttgggccagcctgagggtcatctggccagccatggagtcctgtgacatggacatttgtcatgtgtcatatatagaccaaccaatcatgtatcctgccacttgggatgccagcacccatgccacagaacacgtgccacactgactttcatgtaacgccacatgtcaaggggtcacactgccacatataaccgtacgtgtcatgcattgtcatgacaccctcattgtgtgtcgcatgtccccaattgatcacacatatcccacgtaatgcagggtactcctttgtccagacccagctcctggttcccaaaaaagttctccctgaggactgcagcaggacacacgtatccttcctcctgggtggagtgcagagcgccctgccgaggctcttctttcctgagtcatttatcccagtgggcgaaaggtggatcatttgggtgcatcacttggctggattccaaaggtcttgagggggccatcaagtaccccaaggggcctggggctggttgtcaaaagaaggcaaagtccaacctgggctcctggcttcttcaggtgctgggccattgtcgcagggaatggggttattccagaggctgcctcctgagtcctccaactcaaccttcctgggccagtggcctcttggtgttcccgggatgtaggtccccctttagcccgtcccattcctcccccggcccctcatactccactctcttcagccggcccatctgcggcagcacctgggccagctcggcagctgcctcatccccgaggagattccaggacagcaagattacttccagggcagggcagctcgtgaagctggaggtgaggagcttggcagtctggttgtcaatcttacaggaaaccaggtctatctgtctgagcagcgggagctccatacagaaacgcaggacccctccagccaggttgttttccgccaagctgatctcttccaaatggggggatccatccagggcctgggccaggctcagggccccacctgggcccagatggctgaatggtaggtgtaggaccctcaggtgctggggcagctcctgagccagccccagggctgtgggatcccccagggcattgcagccaagcatcaactcctccaggcgcctgcaaagaacgagagactctgccaactgcactcccccggctgagctgatgctattccctgagaggctgaggctttgaaggcaggtcatttggtttagtttgtgagtaaccaaggccaaggtggacctgttcaccaaaaggtaactgaggcgaaaatgcccttttgccat

SEQ ID NO: 140624 - DNA, 1438 bp, Homo sapiens
agtaggcaagatggcgtccagcggcggttagttatggagtttatttgatcaccacgtacagagggcggtatgcgactcacgggccaaatatcgagagggacgacggcctcgcgctgtgaaggtatatacaatcaatttggaatctcagtacttattaatacaaggagttcctgctgtgggagtcatgaaggaattagttgagcgattcgctttatatggtgcaattgaacagtacaatgctctagatgaatacccagccagaagactttactgaagtttatcttattaaatttatgaacttacaaagtgcaaggacagccaagagaaaaatggatgaacagagtttcttccggtggattgcttcatgtgtgctatgctcccagaattttgaaaccagttgaagaaactagaaaaaaactacaaatgcggaaggcatatgtagtaaaaactactgaaaataaagaccattacgtgacaaagaagaaattggttacagagcataaagacacagaggattttagacaagactgtcctctacgagatgtctggattttgtaaagctgctttgaacacttctgcagggaactcaaatccttatcttccgtattcctgtgaattgcctttatgttatttctcctcaaaatgtatgtgttcatccgggggacctgtagacagagcaccagactcctctaaggatggtagaaaccatcataaaacaatggggcattataaccacaatgactctttgcggaaaacacagataaactctttgaaaaactcagtggcctgccctggtgcacaaaaggctattacgtcttcagaggcagttgacagatttatgcctaggacaacacaactgcaggagcgcaaaagaagaagagaagatgatcgtaaacttggaacttttcttcaaacaaacccaactggtaatgagattatgattggacctctgttaccagacatctctaaagtggatatgcacgatgactcattgaatacaacggcgaatttaattcggcataaacttaaagagttaataaggttcaatttcagctatgatgtacttgtagcaggacgagctgcagacaaaaccccgcagacaccaggttatagaaagaagaggctttattcggccaggagcgtcggcagacttgtgtctcaagaaccgtgctccctgaagaaaaagttcctggtccttttaagggcttacaactcaagccaatataccctggatttggtttgggaaatacaccatacttacaggaaacaggaattgtctattgctaaagaggttaaaagctcaatggaagtcttgaatatagttactgaaataatcatgaatgtcttcttggggcccaaatgccaggatggggctgaactctcaatgattgccttgacttcagcagtgggctgcagcccaacagaggagagtgtctag

SEQ ID NO: 140625 - DNA, 2461 bp, Homo sapiens
agttctaattatgtttaatattcggtttgctgcttggattgaataatctacatttgcttttaaaaaaaggaaattcacttaactgcatgtcagtcacccaagttttaagtgtacaaatgaaatggaaaacatttattacacaaatttaattacaattctaagaaataaacatgcaaattagatagagttcaatttgcagattgctaatcctcatccttgatcttgttccttcctcccttgattttcaagtctgtgcgtcttccttgattcctagggagccaggcagccagaggtctggtttttcacagtcggaggatcacctgggggcatcctgcagaacctctcctcggaaatccacggggaaatggcaaacaggattgacggggtttcacacgctcctcgctagacagagccgctcattaccataaaccgtctgcagcgacggcggcgcagcgccccagtcgcggcggcgggacctgccgggacccttgcccgccgcgcacccgcagtcaccgccgagcgggcggccgggccgggacccgcgagtgtgcaccggcggccgggctggcgccgagcccagagcggaccagcagcagctcaagcgctgcggccgccgcctccccgctgaccccgcgattctgcgagcccattgtctcggaaggagctgctgaaattgctgggtaccaaacactatgggaggctgacagctacggaggcccaagccccccagggccagcacaagctcctttgcagggagaccggggagctggtcccccactgggcaggatcacattacaggggaatttcaaatcctattaacaacatccaagatcacatactttaaggagggaagtatgtgggaagaagagggatttttcaccccaccacttcaggcagctgtaggccataaaaccatctcaatttttgaggaacgagcccacatcctttatatgtccttagaaaagctaaagtttatcgatgatcctgaagtgtacctccgaagatctgtccttataaacaatttgactgaaaaggatccatggagaaattatcatgcagaataactggtgcttccctgcctgctctttcaatggcacctctgcccaagagtggtttatggctcaagactgcccttaccgaaaacgaccacggatggccaaagaggaatgtgaaaagtttcatgcctgctgcttttaccaagaatgtggtggccactacctaaatttacccctttctgtcaatgctaatgttggaagtgcctccactgctgcctcctctccctccgcctcttcttcctcctcatcttcctcttcctctccccctttgcctttaccgagttgttcccgccaggtggattttgatgtaggtagtgcatctatttacaagagtgatggccagatacctgccaatgaaatctttgtcactaatgtcagatcacttggtgttcaggaaaaggccaaattaaatgatgagaaagcaaatgatgacaccaacagagatggtggccccctcagccacgaacctgtgggaaatgaccttgcttttgagtgcaaagggccaattttatgattattttgagaccggatataatgaaagaaacaatggtaaatgaatcttggaaaaagtccttacggaaaaaggaaggcttcaccaccaagtaacaaactgtgctgcagccaaagggaagtaaaatatgagccatcttctcaccgaactttgaagcatgcacagcatgatcagttagctctcggtaaaattttatttttgaatggattttgtagttttgtacaacagataaaaattatgccatgaacatgccatgtcgttttaatgcctggagagcagattgcgtaaaacatctgtatagcaggcatcagcgagcttctttataaatgtggtgatttttaccaaggaaacgattgacttaatgcttaaaagtatatcatagttttcttacggaaaagatcagtagatgagattgggggacaatgtgcccttgcaatatttccattgccccccaaggagcctgtcactagctaagaaatttctacatgtttgccagttaattagggagttatttggtaagcaaatcaatataaccagcaaagatacctgcttcttctatatgatacaatattttttttaaataaaagactaaagacagggagctagatgaaatggcttaatggtgctgttaagtatttgtacctaacagtcttgtgtgacagatgaaaataggatgtaacataatgaaacacacctgtctaggggcggcaatcaacagtcttacacagagagggtattccctgcaagtttctggcttgcctgtgatgggtgatgaggcttttagagaggtgttatacagggcgatttttggtgccttacttttatcttaatttttgccaatgtgaaaattaaggataaatccagagttacagcagggatttaacaaacaggacaa

SEQ ID NO: 140626 - DNA, 614 bp, Homo sapiens
cacaacctggtggagaacccaaccctttctgccagaaggaggcagagaagggaataagaggtcaaggaggttcggtccttctattattacccccaccatgcgcacaacagccccctcctgcgtaagtggggcaaaacagcgcaaaatacatatctggggccaaaacccatgtgaaaggcaaaatctggaagggagggggcctaaggacaccgagcctgctcccgggaagggaggggggaagggaaaacgttgcctcgacgccagcaagggatttgtattccctcctaaatttgcccacccagcgtcatccccgtcactccaagtaccaattcagaggtaaggggcggctcacgtcaccgctgggccgatatcgcccacatttgccccaagcagttgccctgggcctgaggtttgcccccccctgcagtcggcgaccggcagcgctgcctccccgtccgccattagagacccagccaaacaatacgtgcggagcaagagccgcgcagcgcagcgccgaggaaaagaagaccgaaggaggggtgtcggcggagcagaggcagcagccctctcgccgacaatcttggggacctcggctccggtggacagggtgggag

SEQ ID NO: 140627 - DNA, 1206 bp, Homo sapiens
atggtaaccactgtcgccggcaatacagggatgcccagtaatggccatgagaagcaggcaggtattcctcatgtgcaggaagtgcacgcctgggcaaagccaagggcagcaggtcctcagggagtgatgggaaacgagagagaagcaggcgagcacaagagttcaagaaatatttgcattccaagacttcaagataaaaaagccacacaggccctgaagcagagcttacgtctcctggagcgaaaaaagaaggctgttcacagtgacaccggatggagggcatccacagtaaaagtcaagaagtttgaagtgacttcttcaggggacagatattttagaaataattcaagggccagtggtggagcagaagaaaacagctgtattgaagcagctgtggcacagctccatgactgtcctacagagcagggctaccccacaggcagggaggggcagctcagggcagttctgcagtcatatttagttccgcagattgaggggcagtttttgccgaaatttctagggaaaggggcagtcatcaagggtacttctggttcatcaggtcattgtcatggaaaggggtgtctttggctggctcttcccacatcccatgtgagagcagcaaggttcacctactgcagcccaggacacagcactaacgtaagagggcgtctagcatctctgtcccctgatatccagacctgctctgtagcctcagagatgtggggatccggaaaagagggagatttgggccatggtttaatacaaaagctccttcttcctagatttttcagatcttgctttccctgttcacctgccggcaactctttctatgatctttcccctaagaattcctttcagctaaaaagtgaaggtcttttttcttcaccagttaattattatgagatgagtctgaagtcagaccctgatagctctcttgagggctttgcactgccaatgcagatgtttccaatgttcaggaaaaactttgaaaaactagagtgtctgggcagggagagaggacagtgggatcagaacatgcagcagctgcctctcatctggtttaatggactgactttaagggcatcttctaaggaaggatgtatagaagaaccaggtcagggactctctgctaaaattgtagaaaggggctcatgggatggtgccctggagagacaagagcctttctggaatgggctctggttctag

SEQ ID NO: 140628 - DNA, 553 bp, Homo sapiens
tgagcagctgcagaagcccgtcgtctggttgctgaggttggtattgcagcagcaggagcgatgtctgcagcggtggaaacagcagcgcccactcccagctgcctcaccagccattacccaggcttcgccctgggggcagctgccacccaagggaaagctcctccccctcaaaacaacggggagggccagtcggcgaccggcagcgctgcctccccgtccgccattagagacccagccaaacaatacgtgcggagcaagagccgcgcagcgcagcgccgaggaaaagaagagcgaaggaggggacccggcggagcagaggcagcagccctcaccccgaaaaacttggggacctcggctccggtggacaggaagtcagaccctgatagctctcttgagggctttgcactgccaatgcagatgtttccaatgttcaggaaaaactttgaaaaactagagtgtctgggcagggagagaggacagtgggatcagaacatgcagcagctgcctctcatctggtttaatggactgactttaagggcatcttctaaggaag

SEQ ID NO: 140629 - DNA, 822 bp, Homo sapiens
atggaggcagaactaagtcagagagcagaggagcttgcacctacctcccaccgggaaggctctgggaggagacctcatggagtgctctgcaccaaggtgatgttctacctcaaaggagaaatggcagtgcggccttcgggcagaatgctctcccgtgtttccagcaacagaagttcccgaatactcctgctaaggaaggaagccatcgcatctgtcttgccacagggcacctactttggaagaagcagcaaacaggaaatggccctgtacacagtacgatgcaattcagaatgcttgttattacaacgattccctggttcttcgactctcttgagtcttagtgcacgggctggaggaggtgcccatggcagatgccctggaaggggtcggcagcacggctcaaacagcaacacacactggtgcaacacgtcggatgatgactggggtgaccaccgcagaacttatgaagtgccacaaactggtgcaacacatcggatgatgactggggtgaccactgcagaccttatgaagtgccacagactgagtgctttctgcaagtgggcgttcacaggagactcccaatacctgtgcagaccaggtctgctcggatgcagaaggcggccttctagtcaggaggacagcagctgccagcccaggagttgggacctggccattaaggactttgagaatggtcgccgtttccgtgacagctcctccgctgccatcacggcctctatgccaccactgatccacacgcgtagaaaggagcccaagagggctcgcactcaccttggggctacaatccccaagttctccacatag

SEQ ID NO: 140630 - DNA, 846 bp, Homo sapiens
tcaagcaacactggcctgcattccaccctccatggcaacagtcagctggagtggcagcagctctacagccttgcacagattggcactctgcagccagccaaagtccccaccgccctgagttgccgctctcttggcccccgtagcatgtgatctacaacccttgccccgtgtctcatgtgtatggctggttttccagggcccggatggctccagcccctcctctccctgatcagtgaatgtggcccagcccatccaactctcccccacagccaggaggccagctccaagggcaacacacctggaagctgcaacacggatcagtccacttcccttgtcctggagctcaggagccaaagcaggtggggaggtaagagaggagtaggggagggccagagacagagaggagacagcagctagagcacccgtcctaataacaagggaccaatacatgggtaccacactgggtgctgagacttggccttcttcacacaagtcctcctgagggcatcgctgagctgccccgctcccttccctctctaaccgaacaccaagcctgtcagcttgactgtgttcttgtggccattggcactgccatccttgtggctcagactgccaccacttctccacccatctgtggagaagctgatgctcaccctgcctccactccacttcctccatcctggcctccacaggggaggcagctctcctgctgaaaccctccacttggcccatggccctctggtagagttcagactccctaatgtgggccatgaggccttctgccacctggccctggcccctctctgcccatctcatgccacctccactcctccgtggccagcccat

SEQ ID NO: 140631 - DNA, 637 bp, Homo sapiens
atgattttacccacagcccatggacactgtgccatagaggctgcttcctttggagaactgctgcctgagcagcgcctcaggaacctgtgctcaccaggcacccttgcttctatgttcttgcccaaactgctaatcttgctgttgctgtcaccactgttgctgtccatgtggctgctgctgctggcactgccacaggccctcaaccaagggcaacagcgctacttttacagcattatgaggatttacaactccaggccccagtgggaggccctgcagacccgctacattcacagccttcagcaccaacagctgcttggctatattactcaacgggaagccttgtcttatgctcttgtacttagagattcaaccaagagagcctcagccaaggtagctcctcaaagaaccattccccgggaaaacttcagccatgacaagaagatgtccatcagtactacctgtatctgtggttctacctagggcccaaagtaaaaggcgccaagtgctcaggaactgagacttggcagcattttcagaaacaggaagtttgcccatgtatccctggtatctagtgggtgctttgtgcatatttgttgaatgacagtgaataatttctaatataaacaacatcctaaaa

SEQ ID NO: 140632 - DNA, 1580 bp, Homo sapiens
  misc_feature (1)...(1580): n = a,t,c or g
ctaattcttcttgggtttcgtttttgggttctctatggttctcccacgcttgatcaccaccttccatgttctgaggtcccataggcagcttcctccttggtcttgaggaatactctcatgctcagaggggcatcctttcagctgcttttttttttctccttcccccctgttccctcggctgggctgacagatcagagtgagaggcgctggcaatggactaggaagctcgctgccgctgctactgctccccctgggctccggcgagagcctttccctacgatcctctgatttggggatggggttggtgcagcgttggctgttatacttggccacatattcacattgcttgaagggggcagtcttgtcctccagaacgtgtctgatacagaaggcgtagccgttgagtcgcctctgcttgcacagtttggggctatatgagcacaagggcttattgtcaacctcagagaagtgtatatgtttcccttcatacatcacgtgactgtattccttgtgaacatcagctgattttaaatcttctgcgccatagcaatgttaagagaacccccaaggataccacagtttggaatgccgcagaatcaggatgaagcagattgtcctttcattctccgcccggggcctggcgtgggccggcgaatccccggcctcacatcagagtgagaggcgctggcaatggactaggaagctcggctgccgctgnctaactgcttcccccctgggctccggcgagagcctttccctgtcaagcaagaggggtgaggatcatatttttattttggaaactaaaaagtgcctcccagggtcggtgattattaaggggaaatccctgaatatactctccagccaagaaggcagggctgccggggctgtacaagaagaggcagcagtctccctaacagcaccactacaggcactgcgaggacataacaccagagagctgctcctctgccctccgaaacgacaactttcctaccatcttggaggcagagcaaaggggggccagggggaaaagtgcacccgctcccgataaagtacaaatttttacttctcatctctggaaaaaagtccacaccggccgtctacacccgcgcctgggggagaaagcagggaagaaacggggggtgcatgagaaacgttttcatttgctccagggggaaaaatgtttctgcatcttctgatggaaagaaatctttacaagacacaggttttccggtggttattgttttttattttctgtttttaatttttttcatgttagtgacagtgatattttaatatttttttaagccagtaataatttttctccattacagggctaagttctgtggctggtggtcagtttgtaaatttatacttaaagagacttaatagtaacttcatttatttgtctggttatgttattgtatatataaatatttatgttttcatatattgcatataaaaatttgtgttacatgttactctcagaacagattgctgtaagacaattgtaaaaaaacatgtctttcgtctgtttctcaaagcaatgtaaataaaccctatggactgtccagaaaggcaaa

SEQ ID NO: 140633 - DNA, 494 bp, Homo sapiens
cggcccgtgaattcccggctcgacgatttcgtggcggcttgtgcagcaatggccaagatcaaggctcgagatcttcgcgggaagaagaaggaggagctgctgaaacagctggacgacctgaaggtggagctgtcccagctgcgcgtcgccaaagtgacaggcggtgcggcctccaagctctctaagatgtaagtgaggcggccggatcacagccctcgtgggtggggagcacgtgtgcatcgggatcgtcggaggatttcaaagttggcttaaggagctggccgcttagatgcccactccgtgcatcctggcgcgcatgggagacccgttgtgtgcttagcctcttacctgccttgacgcttgcggtccttgtgcctggaatgcatacccggagacccatcttaatgctgccttcaaagcctacccggaccccttccttgcgcttcccaccaacacttgagtttttaacccccttggcaggtgggtggcttgca

SEQ ID NO: 140634 - DNA, 366 bp, Homo sapiens
atggtggtggtgcgcagtactcggaaggctaagcgagcgggggcggcggcctgtgcagcaacggccaggatcaaggcccaagaccttctcgggaagaaggaggaggagctgctgaaacagctggacgacctaaaggtggagctgtcccagctgcgcgtcgccaaaactcagaaagaaaacctcgggaaattctacaagggcaagaagtacaagcacctgcacctgcggcctaagaagacacgcgccgtgcgccgcccgctcagcaagcacgaggagaacctgacgatcaagaagcagcagcagagcgagcagctgtccccagtgcggaagtgcgcggtcaaggcccgagtggcgcgttgtcaataa

SEQ ID NO: 140635 - DNA, 905 bp, Homo sapiens
tttttttacaattttttttttttaattagccaagcatggtggcacacacccgcaatcccacctactcaaggaagtgaagatgggaggatcacatgagcccaggccgcgaaggcgccagtgagccaagacagcgccactgcattccagcctgagtgacagagtgagaccctgtctcaaaaaataataatctgctataaatatttttgtacacatttgttgaagacatatattttcatttttttctgggcatgtacttgccgtatcattaggtaagtttatatttgaatctacgctctttccctcggagcgggcggcgcggcggcgtcggcgggcttgtgcagcaatgagccaagattcaaggctcgagatcttcgcgggaaataagaaggaggagctgctgtaaacagctggacgcacctgaaaggtggaagctgtccccagctgacgcgttcgccaaaggtgacagrgcggtgcggtcctccaaagctctctaagatccgaggtcgtccggaaatccatttgcccgtgttctccccggttatttacccagacttcaggaaagaaaaccttcagggaaattcttacaaggggcaagaagtacaagcccctgggaccttgcgggccttaaggaaggacacgtgccatgcgcccgcccggttcaaacaaagcacggagggagaaccttgaaggacccaaggaagcaggcagcggaaagggagcggcttttacccgttgcgggaagtaacgcgggtcaagggccctgagggggcgcctttgtcaattaaagcacaaggagaacctgaagaccaagaagcagcagcggaaggagcggctgtacccgctgcggaagtacgcggtcaaggcctgaggggcgcattgtcaataaagcacagctggctgagaaa

SEQ ID NO: 140636 - DNA, 1191 bp, Homo sapiens; identical to SEQ ID NO: 126055

SEQ ID NO: 140637 - DNA, 1521 bp, Homo sapiens
ggcgcactttttttttttttttttttagcatttttaaattttattatgacttcatttgtttaaatatatatatatatatatatatatatatatatttatttatttatagctctatgtccccaccgaccccggccccctccccggcccctagtttttccccctggctttctgtctagtggctgtgtagggcagaaccgtctgcgtgctcttctccagacacccgccggcatgctgctgttcctcgtgacccttcgaagtctgttcaggggccaaggtagagcctgagtggcggctggtcagtggagagcgccgtgacttgtagggggctggggagggctttgggggggcctgcatgggcctctgtatgggcaggctcagggggcaagcccacttcttcctcctccacctcctgctcaccgtccccctcctcatcgtcacagcacagagcatggggtagagcaccctttggtcacttgaaccgcacccctctccccgtgtcccctggggttccggctggggcagctggctcttcaccgtggggccagcaccaaaggcctcctcactggaggagtctggggtctccactcgtggcccattggggatgggcgtgccaccattcatgaggcggtagtcagggccagcccctggccgagtcgactcgggaccatccacggagtccgagggggtagagacgtccaggaaggagcagaactcccagctgtctgagaggatatcggctgtcatgaagtccaggtggcccaggtcaaaggggccacccatgcccgccttgtcactgctagaggtgctgctcacagtggccgtggtccagtcgtccggctccagttcaaagtcgaagtccgaggttagcttatcgatctggctcaccaccgctacatccccagctcggcacagggatcggcacattctcaccagctgctgtggagctccgacgagatggtgactgtgaaagcacttgacaaactgaaggcactggacatgccttgtggtcagtgtggcctcaacccagatgtccagtgatttccagggcacagggggtctgagaaccaagggtctgagcccctctatcagccccaggaaatcctcagccatttggtgctgatcagcgatagggctctggttcacaggatgagtgccaggggctcctctggggagaggggccagctgcattccgccccacccttctttgctgtcagagtgtttcagaggctgcagggctctgggcatgtcggggctaggccctgtgctggagctgagcacacggatggatagcacttgattcttgcccttgaggaaccagccagccagcaggaaggggagagatttacggaactgatgctgacggtaggcaaaatgaatcaggagtgtgtagacgtctttttcttccccttcccctaaatctttacttctctcttgacctgactccgggactcccagccagacacccaccagtaactgctcgataaaacttgcccactgggtcattgaagcagggccttccat

SEQ ID NO: 140638 - DNA, 441 bp, Homo sapiens
attcgtacttcaggtcctgttgtcagcgtcagttttctgacacaggtcacagtatagctcaaaaatgtctgtggagccagcatgcaccttcggaaacaattgatgtactctgccccagaatatgcagccacagtggagtcaccagagtgagacgaaggggccctcaattatcttaaagaaatcctgtagtagcgcaggggctcctctgtgcctgcagaatgtttaaagtggggaatagaaccccttcctcctcggcagagtggccgagttcttttgcccccccaaaaaaagggccgctcccaaaagccacatcggagcctttgtttcctcatccaaaaaggagacactagcaagtgttccctcacaccgagaatgtcggccccctttaggagcctcaaaaaccgcccccagggattgagtgtttgccggcccacgcgtcct

SEQ ID NO: 140639 - DNA, 456 bp, Homo sapiens
ccagtggtgacgggcccgcgctgctgagcgcaagggctctgaagttccagcttagccctgaggtttggtgatagcagccattgtgttctttctacctgtggagccagcatgcaccttcggaaacaattgatgtactctgccccagaatatgcagccacagtggagtcaccagagtgagacgaaggggacctcttgtatcttgaagaaatcctgtagaatagaacaaatcttaaatgtcttcttcaagcaaagaagccagtcccagagcaataaataaagtttatttattgctatatatatatatatagcaatatatatttatattatttatttgttatatatatatgtaagaatgtaggtatacatacatgtgtctgtgtgtacatgaatgaaaatgtatgtaaatcatgtaaatctcctaataaaggctggaaaatccaaaaaaaaaaaaaaaaa

SEQ ID NO: 140640 - DNA, 2237 bp, Homo sapiens
atgggtatagaccaacctgaagagtcttccatatttggtgataagtttactgtgcttgactttcagattgatgtaagaagattccagaatgttaaggaagaggaatgccttagacatcatctcatcaagtcccccaatttgagaatgagaaactccagttcggagatttttccaaagacacaagaagctgccccggcagtcgctcgttccctgtgtgtggttgctgtggctcctaaagtgtcctgtcatcctccttctgaaagaacacttgctagtgtcgacatctggatgaggaaacagaggctccgatgtggcagttgggagcggtcctttgtcagaagcagcaaaggtactgatttgctgttggaagggtggaggcaattcgtggacaggggctctggtagcttagaggtggctgaggaactcaacagcctgtgcgaggaggaaggggtacgattccccacttcagacaagcagcagccacagaccagcccctgcgctactacagccccaaaggagtggagccagggtggctgcatgtggccatgcaggttgggcactgtgagcctcaggggcaccattcacgtggacagcagtggaaccccctggagttccaaaaaaggtggccctgccctgcactctcttgctttgttaggacttctagatacgaggcatccgactgctgccctggagggagggcaaaggatttcttcaagatacaagaggtccccttcgtctcactctggtgactccactgtggctgcatattctggggcagagtacatcaattgtttccgaaggtgcatgctggctccacagggactccaggatgatggagtggagcgtgtgggtgaggatgcaggggcaaaactgtgggagggagaggtggtggtggagcaggtggagcagcggcttcggttcttggcaggcctgcagtcgtggtctctccagcccagcttatcctcctgctccttgctagagacactaaggaagttcacgtctatgaagatgagggcaagtatagtccagatcctaagaagaatcatatggccttctttctgttccttcagtgacaggttccttgttgcttcaagacctacacaaattgggctgccaccaatttggtcattcgaagaaaaggcgggtctcaggaatatggatggctgtcctccctttccccttcagatgtcagccgcatctactcctgcttttggaaaaccccagggcaaacggacctgccaggcagccaaccaaccaccagcccccgtgaaaggctggaacccagctgcccaattcggttgctcctgtccaaagccagacaggtttcccaccgacgcccgctcggaaggcgagagcccccacgtggcccggcgcggcgcggcccccggggaccgcgagcaacaaaagcccggcccgcagcccctgctcctcgccttccttttcaattctcccctgatctcaggtggaattaggaggattaaagcagcaagctctgatgtggcacttggctctagacaagtggagaaggttctggctggtgatacaactcgaaaatctgagttgatagcgacaggggttaagtctccgcattgtgaggttctattgacttttcctgcaggcttgccctttatccttgtctgtattttagtttttaagaagccttcaaaaggttatattatgcagtgtgacaagtgctgtggagagcaaatgaaaggcaaggtttcagcacgagcaaagcttacgttacaaagagggagtgttttgaaatggccttatgacagagcaaagcactatgccagcatcaacaattacctctatgtggtcccagctgcttttatctctcttcgtgagacagacctctctccttccggagcatccaatttttctttgcctgtgacacctcattcttctgggtttctccatgactccttcttctgttcagagagctggtggactctagccagcttccttatcatgagtacaaatgagtctgtttccacgaggacccgcatcatcctctctgcgctgttggctttcattggagatgaccccacagacctgttaccattctgatgttggacctgaaatctagcaaaggtaataaatttgttctggtgcagtatcggagaggtgaccatctatctcaagccctcatttgcagaggaggatgtgggagccatgaggttaagagagaggacaaggacatggagcttatacaggggcaaagccagtattag

SEQ ID NO: 140641 - DNA, 681 bp, Homo sapiens
tcactgacttcgaatgaagccgtggaccctcgctgtgagtgttacaactcttaaggcggcgcgtaccttctgatgttcggatgtgttcggagtttcttccttttggtgggttcgtggtctcactggctcaggagtgaagctgcagacctttgtggtgagtgttacagctcttaaggcggcgcgtctggagttgttcgttcctcccagtgggttcgtggtctcgctggcttcaggagtgaagctgcagacggaggccgcaggtggagctgcctgccagtcccgcgccgtgcgcctgcactcctcagcccttgggtggttgatgggactgggcgccgtggaaccaggggtggcgctcgttggggaggctcgggtgcacaggagcccacggaggaggggaggctcaggcatggcgggctgcaggtcccgagccctgcccctcggggaggcagctaaggcacggtgagaaatcgagtgcagcgccagtgggccggcactgctgggggacccagtacaccctccgcagctgctggcccaggtactaagccgctcattgcccggggccggcagggccggccagcccctccaagtgtggggcccaccaagcccacgcccacctggaagtccagctgtcccgcaagcgccgcgcgcagccccggttcccgctcgcgcctctccctccat

SEQ ID NO: 140642 - DNA, 387 bp, Homo sapiens
atgaacaactccagacgcgctgccttaagagctgtaacgctcaccgcaaaggtctgcagcttcactcctgatctagcgagaccacgaacccaccagaaggaagaaagtccgaacacatccaaacgtcagaaggaacaaactccggacacgccgcctttaagaactgtaacactcactgcgagggtccgcagcttcattcttgaaggaggggagaccttggcggagcggcggaggcgcccagcggaggtgaaagtattggcggaaaggaaaatacagcggaaaaatgcagagctggagtcgtgtgtactgctccttggccaaggtgagggccgagtaggtgaggtcgtgttgagccagaggcacggaaggtcccgctcagtgggtccg

SEQ ID NO: 140643 - DNA, 2958 bp, Homo sapiens; identical to SEQ ID NO: 138192

SEQ ID NO: 140644 - DNA, 7653 bp, Homo sapiens
agtgtgtataaggcagacctggagtggctgcgtggcatcggctggatgccagaaggctcagtggaaatgaacagagtgaaggttgctcaagacctcgtgaatgaaagactctataggacacgtccagaagctttgtcattcaccagcattgtcgacactccagaagttgtcttggcaaaagccaattctctgcaaataagtgagaaactgtatcaggaagcctggaataaagataaaagcaacatcaccattccttctgatactccggagatgctgcaggcccacatcaatgccttgcaaatcagcaataaactctaccaaaaagactggaatgacaccaagcagaaaggctatgacataagggcagatgccattgaaatcaagcacgccaaggcctccagagaaattgccagtgagtacaaatacaaagaaggttaccgtaagcaactgggccaccacatgggtttccgcaccctacaagatgaccccaagtcagtatgggctatacatgctgccaagatccagagtgacagagaatataagaaagcttatgagaagtctaaaggaattcacaacacaccgttggacatgatgtcaattgttcaagccaagaaatgccaggtcctggttagcgacattgattatcgcaattatctgcaccagtggacgtgtctgccagatcagaacgatgtgatccaggccaagaaagcctacgacctgcagagcgatccattgtatcgcaatgcctgggagaaagagaaggctaatgtgaacgtgccagctgacactcccctgatgctgcaatccaaaatcaatgctctgcagatcagcaataaacgctatcagcaagcttgggaagatgtcaagatgactggttatgacctgcgagcagatgccattgggatccagcatgccaaggcttccagggatattgccagtgattatctgtacaaaactgcttatgagaaacagaaaggccattacattggctgtcgcagcgccaaggaagaccctaaactggtttgggcagcaaatgtgttgaagatgcagaatgacaggctgtacaaaaaggcctacaacgaccacaaagccaagatctccatccctgtggacatggtgtccatcagcgctgccaaagaaggtcaggcactggcaagtgatgtggactatcgccattacctgcaccactggtcttgctttcccgaccagaatgatgtgatccaagccaggaaagcctacgacctacagagcgacacagagccttgctctctggcccaggctggagtacagtgggtggccgacatgacggccaggggtcagagccccctcgcgccgctgttggagactttggaagacccttctgcctcccatggagggcagactgacgcttacctgactctgaccagtcgtatgactggagaagaaggaaaagaagtaattacagaaattgagaaaaaacttcctcggctgtacaaagttttaaaggtatccagtataattgattcattagaaatactgtttaacaaaggagagacgcattctgctgttgttgattttgaagcattaaatgttatcgtaaggctaattgaacaagccccaattcaaatgggagaagaggcagtgaggtgggcaaaactggtcatacctttagtggttcattcagcacaaaaggtacatttgcggggagcaactgctctggagatgggaatgccattattgcttcagaaacagcaagaaatagcatctattacggagcagcttatgactactaccttgcatcgaagtgggagtttcatcaattctctcttgcaactagaagaacttggatttcgtagtggagcacccatgattaaaaagatagcttttattgcttggaagagtttaatagataattttgctttaaatccagatatactatgtagtgcaaaaagactcaagttgttaatgcagcctttgagttccatccatgtgagaacagaaactctagcattaacaaaactagaagtctggtggtatttactgatgagacttggacctcatcttcctgctaattttgaacaggtttgtgtgcctctgattcaaagtacaataagcattgattctaatgcctcacctcagggcaattcgtgtcatgtagctacatctccaggtttaaatcctatgactcctgtacacaaaggtgcttcctccccgtacggagccccgggaactccccgaatgaacctgagttcgaatttaggtggaatggccacaatcccatccattcaacttttgggacttgaaatgttgcttcatttcttgttgggtccagaagccttgagttttgctaagcaaaataaacttgtgctgagcttagagccattggaacatccgttaatcagcagcccttcctttttttccaaacatgcaaatacacttatcactgctgttcatgatagctttgttgcagttggaaaagatgcccccggtaacaaaaaagagaaaccaggttctgaagttttgactctcttattaaagtctttggaaagcatagtaaagtctgaagtatttcctgtatcaaaaacgctgggaactccagctttgttcttaattcaattaattttcaacaatttcttggaatgtggtgtatcagatgaaaggttctttctcagtttggaatcacttgtaggctgtgttctttctggtccaacttcaccactagctttcagtgactcagttttaaatgttattaatcaaaatgcaaagcagttggaaaataaggagcatctctggaaaatgtggagtgttatagtcaccccattaactgaattgattaatcagaccaatgaagtaaatcaaggtgatgccttagaacataattttagtgccatctatggtgcattgactttaccagtaaaccacattttttcagaacagagatttccagtggccaccatgaagactttgcttagaacttggtcagaattatatagagcatttgctcgttgtgctgctttggtggcaacagcagaagagaacttgtgctgtgaggaactttcttccaagataatgtccagtttggaagatgaaggcttttctaatttgttgttcgtggatagaattatttatattattactgtaatggttgattgcattgacttctcaccatataatattaaatatcagcccaaagttaaatcaccacagagaccttcagattggtccaaaaagaagaatgagcccctagggaaattgacttctttatttaaacttattgtgaaagtgatctattctttccacacactgagcttcaaggaagcacattctgataccctcttcactattggcaactcaatcaccggcattatttccagtgtacttgggcatatttctttgccttctatgatccgaaaaatatttgcaactttaacaagacctctggcattattttatgaaaactcaaagcttgatgaagttcctaaagtatatagttgtctgaacaacaagttagaaaagctactgggagaaattattgcttgtctgcaattcagctacaccggaacttatgatagtgaacttcttgaacaactctccccactattatgcataatatttctgcacaagaataaacagattcgaaaacagagtgctcagttctggaatgccacttttgccaaagtgatgatgttggtttatcctgaagagttaaaaccagtactaacacaagccaaacaaaaatttctgctcctgttgcctggtttggaaactgttgaaatgatggaggaatccagtggaccatattctgatggactgaaacttgaatcttcgtctttaaaagtaaagggtgaaattcttttggaagaggaaaagtctactgactttgtgtttatacctccagaaggaaaagatgcaaaggaaagaatattaactgatcatcaaaaagaagttctcaaaacaaagcggtttgaggagcaaatggacagtgacattgtcattcctcaagatgtcacggaagactgtggtatggctgaacatcttgaaaagtcctccctttcgaataatgagtgtggttctcttgacaaaaccagtccagaaatgtcaaacagtaataatgatgaaagaaaaaaagctttaatttcatcaaggaaaacatcaactgaatgtgcatctagtacagaaaattctttcgttgtcagcagtagttcagtttctaataccactgttgctggaactcccccataccctacaagtcggaggcaaacctttattactttggagaagtttgatggttcagaaaatagaccttttagtccatcccccttgaataatatttcatcaactgttacagtgaaaaataaccaggaaaccatgattaaaacagattttctaccaaaagcaaagcaaagagaagggactttttcaaaatctgattctgaaaaaatagtgaatggaactaagagatcaagccggagagctggtaaagctgaacaaacagggaataaaaggtctaagcccttaatgagatctgagccggagaaaaatactgaggaatctgttgaaggcattgtagtcttagaaaataacccacctggtttgcttaatcaaacagaatgtgtgtcagataatcaggttcatctttctgaatctacaatggagcatgacaatacaaagcttaaagcagcaacagtggaaaatgctgtattattggaaactaatactgtagaggagaaaaatgtagaaattaatttggaatccaaagagaatacacccccagtagtaatatcagcagatcaaatggtaaatgaggatagtcaggttcagataactccaaatcagaaaacccttagacggtcttcaaggcgacgttcagaagtagtagagtctaccactgaaagccaagataaggaaaatagtcatcaaaaaaaggaacgacgtaaggaagaagaaaaacctcttcagaagagtccattgcatataaaagatgatgtgttacctaaacaaaaactgattgctgaacaaactctacaggagaatttaattgagaaaggaagtaatttacatgagaagactcttggggaaactagtgctaatgcagaaactgaacaaaataaaaaaaaggcagaccctgagaacattaagtctgagggggatggtacccaggacattgtagataagtcctctgagaaactagtcagaggccgaacacggtatcaaactagaagagcatctcagggtttgctttccagcattgaaaactcagaatctgatagttcggaggcaaaagaagaaggttctaggaagaagagatctggaaaatggaaaaacaaaagcaatgaaagtgttgacattcaagatcaagaagagaaagtggtgaaacaggaatgtataaaagctgaaaatcagtcacatgattataaagcaacttctgaagaagatgtaagcataaaatctccgatttgcgaaaaacaagatgaaagtaatactgtaatatgtcaggattctacagtaacttcagatttgttgcaagttcctgatgatttaccaaatgtgtgtgaggaaaaaaatgaaactagcaaatatgcagaatattcctttacaagtctacctgtgccagaatcaaatctaaggactagaaatgccattaagagattacataagcgagactcttttgataattgtagtttgggagaatcctcaaaaatagggatatcagatatttcttcgctttcagaaaaaacttttcaaacacttgaatgccaacacaagagaagtaggagggtgaggagatctaaaggttgtgattgctgtggggaaaaatcacaacctcaggaaaagtcactcattgggttaaagaatacagaaaataatgacgtagagattagtgaaacaaaaaaggcagatgtgcaagcacctgtaagcccatcagaaacttctcaagctaatccatattctgaaggacaatttttagatgaacatcatagtgtgaattttcatttgggtctcaaagaggataatgatactattaatgattcattaattgtttctgaaaccaaatcaaaagaaaacactatgcaagaatctcttccttctggaatagtaaactttagagaggaaatttgtgatatggattctagtgaagcaatgtctcttgaaagccaggagtcacctaatgaaaattttaaaactgttggcccgtgtttaggagactcgaaaaatgtttcacaggaatctttggagacaaaagaagaaaaaccagaagaaaccccaaaaatggaactgagtctagagaatgttactgttgaaggaaatgcatgtaaagtaacagaatccaatctagagaaagcaaaaactatggaattgaatgtaggaaatgaagctagctttcatggacaagagagaaccaaaactggtatttctgaagaagcagcaatagaagaaaataaaagaaatgatgactctgaagcagacacagctaaactgaatgccaaagaagtagcaactgaggaatttaattcagatattagtctttctgataatactacacctgtaaaattgaatgctcaaactgagatttctgaacaaacagcagctggggaactagatggaggaaatgatgtatctgatctacactcatctgaagaaacgaataccaaaatgaaaaataatgaagaaatgatgatcggcgaggcaatggctgaaactggccatgatggtgaaacagagaatgagggcataactaccaaaacctcaaagcctgatgaagctgaaacaaacatgttgactgcagaaatggacaactttgtttgtgacacagttgaaatgagcactgaagaaggaatcattgacgctaataaaactgaaacaaatactgagtatagtaaatctgaagaaaaattagataacaatcaaatggtaatggaaagtgatattttacaggaagatcaccatacttcacagaaagtggaggaaccatcacagtgtctggcatctggaacagctatctctgagctaataatagaagacaataatgcatctcctcaaaaactaagggaacttgatccttcacttgtgtcagcaaatgacagtcctagtggcatgcagacacgctgtgtctggtctcctttggcttctccgtctacgagcattttaaagagaggactaaaaagatcccaagaagatgaaatctcatcacctgttaataaggttcgccgtgtctcctttgcagatccaatataccaagcaggattggcagatgacattgatagacggtgctctattgttaggtcccattcttccaatagttctcccataggaaaaagtgttaaaacttctcctactacacaatctaagtcagttgacctctgtgtaacagcttctgaaatttattctaagatttcagaaatggccaaagaatccataccatgcccaacagaaagtgtttacccaccattggtgaactgtgtggcaccagttgacatcattttacctcagattacatcaaacatgtgggcaagaggcctgggacaactcattagagctaagaatataaaaactattggtgatttgagtactcttacagcatctgaaataaaaactcttcctatccgttctccaaaagtgtccaatgtaaaaaaggctctcagaatatatcatgagcagcaggtaaaaacttag

SEQ ID NO: 140645 - DNA, 790 bp, Homo sapiens; identical to SEQ ID NO: 133641

SEQ ID NO: 140646 - DNA, 777 bp, Homo sapiens
atggtatccagtataattgattcattagaaatactgtttaacaaaggagagacgcattctgctgttgttgattttgaagcattaaatgttatcgtaaggctaattgaacaagccccaattcaaatgggagaagaggcagtgaggtgggcaaaactggtcatacctttagtggttcattcagcacaaaaggtacatttgcggggagcaactgctctggagatgggaatgccattattgcttcagaaacagcaagaaatagcatctattacggagcagcttatgactactaaggtctgcagcttcactcctgaagccagtgagaccacgaacccaccgggaggaacgaacaactccagatgcgccgccttaagagctgtaacgctcaccgcaaaggtctgcagcttcactcctgagccagtgagaccacgaacccaccagaaggaagaaactccaaacacatccgaacatcagaaggaacaaactcaggacatgccgcctttaagagctgtaacactcactgcgagggtccgcagcttcgttcttgaagtcactaatttacaacatggcctcaaaaccaagccaccggaaggaggtagttggggtaaggaggttagaaaagaggaagatgaaaagagaggagaggaagggagaagaagaaagaagaagaaaaaagaagaagaggaagaagaggaggaagaagaagaaaaaggaggaggaggaggggaagggggaggggaaggggaaggggaaggagaaggggaagcagaagattcctga

SEQ ID NO: 140647 - DNA, 662 bp, Homo sapiens
tttcagtctgaactcccacctgtctttccacctcagcattcaggatagttgttgatataaggaaagtacttggatacttgtagtcaaggacatacctcatgctgagaggggggccatggtggtgctgaaggctgccagatgcatgaagccaccagaatgcgtcagtgggatcagcgggaggtaaaagttctatttttgtgaatgtgaaatcagtgtgtccggaattggtgggttcttcgtctcactgacttcaagaatgaagctgcggaccctcccggtgagtgttaacagttcttaaaggtggcgtgtctggagtttgttccttctgatgttcggatatgttcgcagtttcttccttctggtgggttcgtggtcttgctggctcaggattgaagctgcgggaccttcgcggtgagtgttacagctcttaaggtggcgcatctggagttgttcgttcctcccggtgggttcgtagtctggctggcttcaggagtgaagctgcagaccttcgcgtgcagcgctgggctgaaggactcctcaagtgccgccaaagtgggagcccaggcagaggaggcgccgagagcgagcgagggctgtgaggactgccagcacgctgtcacctctcaagctgacatcggcagctgtgaggacccacctgttag

SEQ ID NO: 140648 - DNA, 1020 bp, Homo sapiens
ctagccatgtccagttcttaacagaagcaggatacgcgttccagggcaaactctccgcagctgctgctggaaggtggagcagatccaacagttggagacattggtcacctcagcgtaggtgtgggcccagtccacaatgctgttggagcatgtcaaccctgctattgggttagtcatctgcacagcgactgcaacccttcctgtcaagctctcacaggcctgaacagcagcatatacagcagctaaatgcttctctatcagtgaataccggagctcagctcccttccacagctggaaccaaaaacctattggcgttctaaagtgctccgtgtgctgctgtaggccccagctgaaaccatctgtggttacaagtacatcaacttcaaatgggtgcccctgatcaattacttgtaagtctggtgcttgctgaatggcctgcttggcagccagaaagcctgtttcagcctcatcatcccaatcccacgtagctcccaaccgcacgctgccaactcttgccacaagaggggcattgctgcttcttaatctggtcaggagagctctgtcaaaggtgagcacagcggttttgtcacagccagtggagatgctcaagctcgagagcagtcttggaagagaaccctgcgccgcttgacaccacacccctttcagggcggagcaaatcctctgggcgaggatgcctggtgtctctcgggctctgatagccaccatccacgaggaggagctctcatctgtgacagccttcctctccctgagcatccacctttctacaggtgaggatgacagcccccagtggcctctaaccccaaaggccagcataaaagcttcgatccagtcctctgctactgaccaagaatcctttcccagaggctgctgctttctaaagtaggggcccccctgtgtctttgaaggatacagcctctctccaagctgctttcctgggctggccttgagggtctgcagcttttccaggtgcacggtgcaagctgtcagtggatctaccat

SEQ ID NO: 140649 - DNA, 1633 bp, Homo sapiens
gacgtgggcgttccagggcaaactctccgcagctgctgctggaaggtggagcagatccaacagttggagacattggtcacctcagcgtaggtgtgggcccagtccacaatgctgttggagcatgtcaacctgatcaaacaactcccaagcatttggcagacaatccaggcccttggaccttggatgcattgacataccaaccgcacgctgccaactcttgccacaagaggggcattgctgcttcttaatctctgatgataataatggtgataattttcttggtgcttctgttctgggaaaatgaggtgaatgatgaagcagtgatgtcaactttagaacacttgcatgtggactaccctcagaatgacgttcccgttcctgcaaggtactgcaaccacatgatcatacaaagagttatcagggaacctgaccacacttgtaaaaaggagcatgtcttcatccatgagaggcctcgaaaaatcaatggtatttgcatttctcccaagaaggttgcttgccaaaacctttcggccattttctgctttcagagtgagacaaagttcaaaatgacagtctgtcagctcattgaaggcacaagataccctgcctgcaggtaccactattcccccacagaggggtttgttcttgtcacttgtgatgacttgaggccagatagtttccttggctatgttaaataactcaagatcagctcccgagtctgagatctcttctctcaatggcattggagctggctgtgcctgaagcagacctgaaccgtggacatgtggcaactgctcttgagcggaaggggaagccactgaagagattacactacatctgagatggagacctttcctctgctgctgttcaccctgggcctggatcttgcagaagcatcagaaagcacaatgaagataattatagaagaatttacagactaagagatgccctatgacatggcataaagtggccaagaaaaacagaccattgagatattaatgaacccgatcctgttagttaaaaataccagcctcagcatgtccaaggatgatatgtcttccacattactgaccttcagaagtttacattataatgaccccacgggaaacagtttgggtaatgacaaagagtgttgcaatgacatgacagtctggagaaaagtttcctaatcaaacggatcgcgcaagtggagcaataacttcattcgcagcttcaccaaagtgatgcgcaggggccacagggcccccagctgcgagttttgacagaaaccctggcataagctgctggggggagccctacaaatggaaaaataccgtggggccctttcaataaaaggcaaacaattccccaggtgccaataccatagtgttacctcattagagaagatattgacagtgctgacaggtcattctctgatgagctggttagtttgtggctctaagttgtaaatcccacagagctttaggactagggtcttactaaagaaggacctcttcttgttcattcttgtttaaacctttccttaatatctactctttagcactatagtgaactcctgattatttattctaactggaggagtgaaaaatccaaaattgtggataattcaattaaaagttatgactgataaaaa

SEQ ID NO: 140650 - DNA, 483 bp, Homo sapiens
tttcgtggccagaaaggctctcaagcttgcttcgaggaccagcatggctcttgctgcctctggcatctacgtctacagtaacaagtacttggaccctaatgactttggcgctgtcagggtgggcagagcagttgctacgacggctgtcatcagttacgactacctcacttccctgaagagtgtcccttatggctcagaggagtacttgcagctgagatctaaggtgcaccttcgctctgccaggcgtctctgtgagctctgctgtgccaaccggggcaccttcatcaaggtgggccagcacctgggggctctggactacctgttgccagaggagtacaccagcacgctgaaggtactgcacagccaggctccacagagcagcatgcaagagatccgccaggtcatccgagaagatctgggcaaggagatccatgatttgttccagagcttcgatgacacccctctggggacggcctccctggc

SEQ ID NO: 140651 - DNA, 1044 bp, Homo sapiens
atggccccaagatggctcatgcacatggctggcagttgctatgggctgttggctggcaacacaacaggggtcattgaccagggtgcctgttgcaacttcgggcattcaaggctgtcaggcagctccctcacctatgtgggctgcctggacacatgggtgggcttcctgctacttcagagctgccctccagttgcccctaccacctggttctacagggaatggttctatgagtacctctactgcttacagtgccagctcacctggctttatgacacaaaagcgcagggcgagaggtcagatcacaaggagaatgtgttctatgtacagcatcagaagtatgttggaggagcgactcaagccttcgcgaaagaaaataaccaaaaagcatacaaagaaacgtacggcgtctctcatattacacgccatgatatgctgcagatccctaaacagcagcaaaacgaaaaataccaagtgcctcaattcgatcaatcaacgattaaaaatattgagtctgcaaaaggacttgatgtgtgggacagctggccgctgcaaaacgctgacggaacagtagctgaatacaacggctatcacgttgtgtttgctcttgcgggaagcccgaaagacgctgatgacacatcaatctacatgttttatcaaaaggtcggcgacaactcaatcgacagctggaaaaacgcgggccgtgtctttaaagacagcgataagttcgacgccaacgatccgatcctgaaagatcagacgcaagaatggtccggttctgcaacctttacatctgacggaaaaatccgtttattctacactgactattccggtaaacattacggcaaacaaagcctgacaacagcgcagcacctacaacagtacctgacatacaaaagatccttcagcattgtggtggacgctataatagcgttgcctccgctgaagagagctgcctggcccaagtcacggcatcctccccaggttggactgatggaggtccagcatctgtttccaattccgaacaactttgaggagcacgtctag

SEQ ID NO: 140652 - DNA, 736 bp, Homo sapiens
  misc_feature (1)...(736): n = a,t,c or g
cattcgacngcccgcaggtactcggtctcggatatcgccgccgcgacccacgcgtccgatgagctcatcctgcgtgtgaaggggttgaagctggctgaccgggtcttggccctaatatgctggctgttccctgctccactctgagtggaattgctctccctgccccattctggtgtctttccactcctcagcccctcatcttgcctccacccagctgctccatttttgccacatcgtggcccgcagccccagagtcactgtccatgtcaccatccttctcctcctttggaaaccctctccgcaaaactgtggcccttgtctcagggccccacaaggctgaactgtgggcatagctctctcttcttctcccaagaaggactcagcagcctacattccccattccctggtatgtgcccattgggttggatgtccccgactacttccgttaacccttcccattgtcaagatgtgccacggggtgccactgggggcacactggaacttgtagggagtgtgattttgttggaggtgcacatggtctctgaatttgacagagaacaccttccctttccttgccatgtcaccctccagaggaagtcacacctcagcagaggtggtttggcatctggggccaactccattacagctatgagctcactgctgtcagtgacgtttggtgttttctgtactgtgtttcaataaaaactccttcaaggttgcaaaaaaaaaaaaaaaa

SEQ ID NO: 140653 - DNA, 2577 bp, Homo sapiens
ggctcttgctgcctctggcatctacttctacagtaacaagtacttggaccctaatgactttggcgctgtcagggtgggcagagcagttgctacggtaggtttttcccttttgggggtagcagagaagctgcaggatgtcccttatggctcagaggagtacttgcagctgagatctaaggtaagtaacccatgggacccatctgagccaggccaggactgtctacggagagcttgcaggctcggacacaggggcaaggcctctgctttacggaatctgcagaggaggcaggcgatgggtgtcaaaaagacagttgcctgtcacgtgtcacatgtaagtcatctgaaaggcagtgacactgtagctcctagatacttagaggaggaaggagctgaaaatcaatgctttgcagataagcagatcccaaacagagaggagagaggaaggggtgagctgagcaaactctgtttcttctcctaaattccttaatatgtgggctgcctggacacatgggtgggcttcctgctacttcagagctgccctccagttgcccctaccacctggttctacagggtaagtggagcaggcacaacacccagctccacagagaaggttgccaaccggggcaccttcatcaaggtgggccagcacctgggggctctggactacctgttgccagaggagtacaccagcacgctgaaggtactgcacagccaggctccacagagcagcatgcaagagatccgccaggtcatccgagaagatctgggcaaggaggtacccacctttgcaggggggatgggccttggttgggatgccccaggtacgcagcatccattcaaaggtgtcccacttctcagtgatcgtatgctgcaggtgctctgtgttcttgatgcaccatctgactggagtttcaatgagaatgaaggagagagaaggtgcaggggtaccgttgtgcaacgggtagaataattcatatccagttgttttgtaagagcctgtggcaccttgaatcctggtgtcaccatgttctatgtcatcctgggtaagttttgtgattttgctgagccttggtttcctcatgttatgcaggaacaactgagggttgtcggaaaaggcctttggggttttgtgagggtgagcttgtcaggttttagaattcacggccctcatcagaagacggcctccctggcccaggtccacaaggcagtgctgcatgatgggcggacggtggccgtgaaggtccagcacccaaaggtgcgggctcagagctcgaaggacattctcctgatggaggtgagagccctccctttctccttcctgtgtcctcagtctacgtttatgtggcttgtggatgaagccaagaagaacctgcctttggagctggatttcctcaatgaagggaggaatgctgagaaggtgtcccagatgctcaggcattttgacttcttgaaggtaggtgggacgatgcaatgcagggtatggtggtctggtggcctgatggagtttgtggatggcgggcaggtcaatgacagagactacatggagaggaacaagatcgacgtcaatgaggtgaggtcaagagctcagggctgctgtgccggggaacgtggcgtcaatggcttcgtgcactgcgatccccaccccggcaatgtactggtgcggaagcaccccggcacgggaaaggcggagattgtcctgttggaccatgggctttaccaggtagaagaggcctttgttacccagccctggggcctctgggggcagtctctgatctggactgacatgaagagagtgaaggagtacagccagcgactgggagccggggatctctaccccttgtttgcctgcatgctgacggcgcgatcgtgggactcggtcaacagaggcatcagccaagctcccgtcactgccactgaggtagggggcccctccaggccctgcctcttcctaaatgcagagatcagccatctcctcaaccacgtgccgcgccagatgctgctcatcttgaagaccaacgacctgctgcgtggcattgaggccgccctgggcacccgcgccagcgccagctcctttctcaacatgtcacgttgctgcatcagagcgctagctgagtgagtgtgggctcctccctctcctcccctcctagccccctagatctctttcagcgaggccttcaacttatggcagatcaacctccatgagctcatcctgcgtgtgaaggggttgaagctggctgaccgggtcttggccctaatatgctggctgttccctgctccactctgcactgtccatgtcaccatccttctcctcctttggaatcctctccgcacactgtggcccttgtctcagggcccacaagctgaactgtggcatagctctctcttcttctccaagaagactcagcagcctacattcccattcctggtatgtgccattgggttggatgtccccactacttccgttaagagcctctcagatatgtaagtgtagatgtcctggcttatgatacagtgctcataagcctgtgggcattaggcagcacctctttgagattaggagaggctggctactcccaa

SEQ ID NO: 140654 - DNA, 1383 bp, Homo sapiens
  misc_feature (1)...(1383): n = a,t,c or g
atgctgtgctccatggcgaactcgggctgcctcctgctgtccaactccggcagcatgctcccgcactccgtgccctgcccgcccgccttcctctacctccaacagaggtggatgtcacaagctgagtttcacagaggggacaccgaggccagcagctatgtgttccgtgagcaggaaagcccctcaccccctccccacgatctgggacacctcagacttcctggacgcgtctgccacattcccagtttgaatgcggttggaacacagacgtgtgaaagtctgcagttcggaaaaattttagacgtggagatcatttttaacgagcggggctccaaggtgggtgccgcacggagctgccgccttacagcgccggctgtaggtcccgccaggctaacgtgtgaaatgcgcccaggccgaccatcctcaggcttcccctgcgccgtgaggacagtgtgcagcttggcagcagcgctcccaggacaaggagtgagctcacagtctctggttgcagctgtgcttggccgcgccagccgagccttcatcgacaatactcgtgctttccgcagagcagacctttctgcccaccctgngaagatccccgtatgggacaagaactatatgcggacacctgtgcaggacactggggataccgaggtggcccatccctctgcagaggtgctcactgctcgctgcctagaggagaccaggactgagatcaccggacgctggagaaggtcatggaggatgactctctcctctgggtccctggatgaaagatctgcagaccatgaccctgaaccctctgccagacctgagagaaccccacctgaagaaaggaaggtcaagggccgtctgtccatcctctgggctctgggtgcttcccacctggacacgctttctgggaggctctggaggctaatacctgggtgccctgtgttcgactctaaagaaccccagtttcagcagagctgctgggactggctccaggtggacgctggcgtgcagttaacagggataggggccgtgtcgctgctgccagcagcctgggagagccctgctactcatcccctgcggatgcctccttcccacgctcagactccggggggctggacagacagggaggcagctgcagataccccaaggagctcttcgggagtcatccccaacgtgcacgatgtacagaggggtccctgcaggtactctaaagccagagaccttggtgcatggccctgtttcagcagaggtgctattgcaaatgcctcatgccagagtgaggctatgatcacagtgaagaaacctctggtggtgctttgccacctgagcccacctgaactttccagaacctcagcagtggagggtagcaccccagaccccgagacctga

SEQ ID NO: 140655 - DNA, 962 bp, Homo sapiens
cggacgcgtgggttaatttcataataaccaccttctttgtcttattgcattcaggagttaaggagaagaatagagatgtttcattgcaatacacaatttatgggatgattgaaggaaatagagaaccatgacacataaaaatgtgtgataggatcacagaaagagcacttaactgcaggctatagtcttgagccagaaattgtctctccactacctctgggcaagttgcttcatctctctaggccatttgtggaatgggagccttaaactcctacaattttctagtaagaataaaagcaactttgttttgaaatcattctaactcaacagaagttgaagttatgctatcacgttggaatctctagttatagactaattattttcaatatttattacccaggaccccaaattacgtgaacttttggatgtggggaacatcgggcgcctggagcagcgcatgatcacagtggtgctaaaagcatgtgtctaatgactgtgcagtatttaagctaatgcaagtgttatttacatttttcaggaatggacaaatgatcatctgttagtgctgtgatccatgtgccatttaaacctctctcctttgttgtgttcacttcacagcatatatcgcaacagggagggaggaagctggggaaggaaaaagaccatttgctgactccgttgttttatttcccagaatgattcaatacctcaagaagatttcactccagaaatgcaaatattagaatgaaacttagtttaaaaaattcttattgcttggtttttcattgtttttagtggtgcaaaaagcaaaccatatcttaccgttgatcagatgatggattttatcaaccttaagcagcgagatcctcggcttaatgaaatactttatccacctctaaaacaagagcaagtccaagtattgattgagaagtatgaacccaacaacagcctcgccagaaaag

SEQ ID NO: 140656 - DNA, 1104 bp, Homo sapiens
atggatgcaaaaaaaagaaaactgtacaagtatgcctctacagattcccctgcttttgccattactttcataattatgccatatatggaaaatcaggcagctaaattagcattcgagaggctctcgctaaatgaattagtgttttcttcagaagccttgacacattcagaaacatttctacctcaaccagacaaccggcatcaaaatatgtcatcaaccatccatactgctcccatcgacactgctcttggtggaaatccagcctttctgtatttatttctccaagactttcagcccacgcaggacaactcgctggcgtcggtcacaccttccgcaggagtttccgcgcgcctggcacccccgcccacccccgggccatttaccgatgtggttgtcctcgatgtgctcgatgaggtcggccagggtggggaagtggagtccgcagcccccgaatcggcaggtattggagaagaaggaggcggcggcgatgcctgtcatggtgctacatcgagagcccccctgcgcgcggacccaggcctcacctgcgagccctgccaccaactttatctcgctaggcctgccctttacggcttgccatccgtgccatctgtttggagcctccttggttatgtatatgacgttcttaatacacccacatcgattaattacacctacctccctgcgaggagaactcagggagttaccctggtccctctcagggacatttttttgtactcagccacctgtctaggtgtgacacattcacaggggacccaggaaagccactgcagaaaggacagtgcattggttaaggctagaaggagcggaaacaacggcaagggacatagtgactcttcatttaaaaaggaagcgatttcatcctgtgagcatttaaagcataatgttgaccagcatgtccagtgccctcgagatggggcagctgccggaaggtgtgaatccactggtctaatggagccaactgaagacactgaggatcctgcttcatacagctgtctgtcctccacatacaggaattggtttattttggcatacactgataatcaaaaccgtgcacttcctgtgtcctgtgtggacatctgttaa

SEQ ID NO: 140657 - DNA, 457 bp, Homo sapiens
  misc_feature (1)...(457): n = a,t,c or g
nttgagatcgatnacactaggccangtggtggaattccggacagcaccgccaggctcagcatcctaaccccgcggcaccacctgcagaggagctgctcctgcaatggtactgctacaaggttcagtggtcagagctatgtgcggtacagggccccagcggctcggaactggcacatccatttctatctgaaaacactccagccacaggccattcttctattcaccaatgaaacagcgtccgtctccctgaagggctttgaaggctgcctggatgctgtcgtggtcaacgaagaggctctagatctgctggcccctggcaagacggtggcaggcttgctggagacacaagccctcacccagtgctgcctccacagtgactactgcagccagaacacatgcctcaatggtgggaagtgctcatggacccacggggcaggctatgtctgcaaatgtcccc

SEQ ID NO: 140658 - DNA, 1722 bp, Homo sapiens
aggttcagtggtcagagctatgtgcggtacagggccccagcggctcggaactggcacatccatttctatctgaaaacactccagccacaggccattcttctattcaccaatgaaacagcgtccgtctccctgaagctggccagtggagtgccccagctggaataccactgtctgggtggtttctatggaaacctttcctcccagcgccatgtgaatgaccacgagtggcactccatcctggtggaggagatggacgcttccattcgcctgatggttgacagcatgggcaacacctcccttgtggtcccagagaactgccgtggtctgaggcccgaaaggcacctcttgctgggcggcctcattctgttgcattcttcctcgaatgtctcccagggctttgaaggctgcctggatgctgtcgtggtcaacgaagaggctctagatctgctggcccctggcaagacggtggcaggcttgctggagacacaagccctcacccagtgctgcctccacagtgactactgcagccagaacacatgcctcaatggtgggaagtgctcatggacccacggggcaggctatgtctgcaaatgtcccccacagttctctgggaagcactgtgaacaaggaagggagaactgtacttttgcaccctgcctggaaggtggaacttgcatcctctcccccaaaggagcttcctgtaactgccctcatccttacacaggagacaggtgtgaaatggaggcgaggggttgttcagaaggacactgcctagtcactcccgagatccaaaggggggactgggggcagcaggagttactgatcatcacagtggccgtggcgttcattatcataagcactgtcgggcttctcttctactgccgccgttgcaagtctcacaagcctgtggccatggaggacccagacctcctggccaggagtgttggtgttgacacccaagccatgcctgccatcgagctcaacccattgagtgccagctcctgcaacaacctcaaccaactggaacccagcaaggcctctgttccaaatgaactcgtcacatttggacccaattctaagcaacggccagtggtctgcagtgtgccccccagactcccgccagctgcggtcccttcccactctgacaatgggcctgtcattaagagaacctggtccagtgaggagatggtgtaccctggcggagccatggtctggccccctacttactccaggaacgaacgctgggaatacccccactccgaagtgactcagggccctctgccgccctcggctcaccgccactcaaccccagtcgtgatgccagagcctaatggcctctatgggggcttccccttccccctggagatggaaaacaagcgggcacctctcccaccccgttacagcaaccagaacctggaagatctgatgccctctcggccccctagtccccgggagcgcctggttgccccctgtctcaatgagtacacggccatcagctactaccactcgcagttccggcagggagggggagggccctgcctggcagacgggggctacaagggggtgggtatgcgcctcagccgagctgggccctcttatgctgtctgtgaggtggagggggcacctcttgcaggccagggccagccccgggtgccccccaactatgagggctctgacatggtggagagtgattatggcagctgtgaggaggtcatgttctag

SEQ ID NO: 140659 - DNA, 739 bp, Homo sapiens
  misc_feature (1)...(739): n = a,t,c or g
tgcncgtntcgttagcccgtcccggtccggaattcccgggtcgacccacgcgtccggacaactttaaacaggtgatagaagcggccaatgggaccaccaataactgccacaacaatgagacggtgattctgacgcctaccatggactcgcgactctacatgctctccttcctgcccttcctggtgctgctggttttcatcaggaacctccgagccctgtccatcttctccctgttggccaacatcaccatgctggtcagcttggtcatgatctaccagttcattgttcagaggatcccagaccccagccacctccccttggtggccccttggaagacctaccctctcttctttggcacagcgattttttcatttgaaggcattggaatggttctgcccctggaaaacaaaatgaaggatcctcggaagttcccactcatcctgtacctgggcatggtcatcgtcaccatcctctacatcagcctggggtgtctggggtacctgcaatttggagctaatatccaaggcagcataaccctcaacctgcccaactgctggttgtaccagtcagttaagctgctgtactccatcgggatctttttcacctacgcactccagttctacgtcccggctgagatcatcatccccttctttgtgtcccgagcgcccgagcactgtgagttagtggtggacctgtttgtgcgcacagtgctggtctgcctgacatgcatcttggccat

SEQ ID NO: 140660 - DNA, 551 bp, Homo sapiens
ttctatcacctgtttaaagttgtcagccagaaacacaaaatagacacagcagaatcccagctgggtgacaatcaggaagaagtccacaacacgtcttccccagtgtgcgtggttccggagccaggagcaggggctggattctagtccatccatcacagtatcaccataatccacaaaggatttattcagcctgcggcagaagtggtgagcacatttcaccaggatacccatgcagtgcacggccacgatgcctatgatcagcaggctgatgggacccatcacgatgcctgcatttttcaccgccagagggagtcccaggagtcctgtgccaatgttgccttttaacaggtggatcaaggtctggaaccatctggagcatctgccacgccgggaggaaggcgaggtgggtcctgcccaaggcggcgagcgccgccagccggaactcgtcagtggaggaactcactgctcgggttctggccccagctccggctccggctctggcttcagcacagcccacccttcccgggttcagtatcagcccctcgacgaaa

SEQ ID NO: 140661 - DNA, 1771 bp, Homo sapiens
caccaatgaaacagcgtccgtctccctgaaggtaaggcactgccagcctgagagatttcatgtgggtgtcccaggctggggaggtagggggtgaggcatgaggaatgtcaggaagcccatttctgccaaagaaatccctgcacagttttcagggattctgggtgtgactgttgggccacatgattatcctgtcctggatggccacagccacccaacctggagatatacgtccaaggacggtcacaagtggggctgcttactctcttgctgggcggcctcattctgttgcattcttcctcaatgtctcccagggctttgaaggctgcctggatgctgtcgtggtcaacgagaggctctagatctgctggcccctgtcccctgatgaggatgatgacagtcaccacctcagggtcatcgtgaggatcaaatgagccaacacaggaagatccttgaacagtgactagcactaagttagtgtctatggttgttatcctgtttatactgttctttaggtgactgttgtctctggtgggctgtaagtgttctttgtcaagtgtctgctccacgtcaggcactgtgctttgcaccgggggaaaatggtgatggagggcaacaaggactccgaggagcaccaccaggcccgggccccagaggtcccgctcctcagcctggcccagggtatccaggtgccaggcagaggggttccccacagcaaccctgactttcctcagagcctggaccatacctgaggctctccaggagcggtgggagatgagggccagggcgctgctgctcacggagcccaccagggagatgaccggtccaggcgggggatgaggatggccaagatgctggctctcacatctgaactcagccacgggtgagcgaggaaggaggaactgacgaagaccaatggtcactgccgcaggaggtgccatcggcttccgtgccataccagccattgtcacactgccagacagtgccagcttcactacaaccacattgtcttttctcatgaaagcctgcagactgggtgccagtgctcgggcgctcggacacaaagaaggggatgatgatctcagccgggacgtagaactggagtcgtaggtgaaaaagatcccgatggagtacagcagcttaactgactggtaaacccatcggtgatcagcaccaatggcttcagcagaaggctctacatgaattccccaaaagaatgcagtccagggcagccagtgagggctggcagtggcaggggatgggggcagcagttgggcaggttgagggttatgctgcctggatattagctccaaattgcaggtaccccagacaccccaggctgatgtaaggatggtgacgatgaccatgcccaggtacaggatgagtgggaacttccaggatccttcattttgttttccaggggcagaaccttttaacaaatccaagttctctaaaggaagaaagtctaatacctgaacaatgaactggtagatcatgaccaagctgaccagcatgtgatgttggccaacagggagaagatggacagggctcggaggttcctgagaaaaccagcagcaccaggaagggcaggaaggagagcatgtagagtcgcagtccatggtaggcgtcagaatcaccgtctcattgttgtggcagttattgtggtcccattggccgcttctatcacctgcggcagaagtggtgacacatttcaccaggatacccatgcagtgcacggccacgatgcctatgatagcaggctgatgggacccat

SEQ ID NO: 140662 - DNA, 883 bp, Homo sapiens
atgggctcccccaacgtgtggcctccagtctcgggcctgtgcattgaggtgctcgtggaagacagtatctgccggctctcttcccagcagcctcctcccatctcccttccccgaaggcagcaacatccccagcttctacacagtcgcaccataggcaagcgtccttggacctcgccactgtccccagagcaactcttggagaacaacagtgcagataaagcctctggttctgtgtccaccacgttgccggttgcttataaaaagggagtcaaacatctttctgctcttcttgatccagaggtcctgtccattttcgtgcctccttttatcagtaaagaggacagtcaaacggccggtgccaactgcggcactctcggtaaaacccggatgcgctccttgagaaagaagagagagaagcccagaccagagcagtgggagggcctcccggggccccccagagcgccagagcctgaggatgtcgccgtcccgggcggcgtggacctcctcaccctgccgcagctgtgcttcccagggggtgtgtgcgtggccactgaacctaaggaggattgcgtccacttcctggtgctgaccgatgtctgcgggaataggacctatggcgtggtggcccagtactaccggcccctgcatgatgagtactgtttctacaatggcaaaaccgcaccgggagtgtcctggctgcttcgtgcccttcgcggtgtgcgtggtctccaggtttccctattacaactccctcaaggactgcctttcctggcactaccgcagacctggggccactctgctgtcacccagcagcttggtgactttgcttttggtgaaaggtcctggagctgctgctgcagacgctggggagattccagtgtga

SEQ ID NO: 140663 - DNA, 364 bp, Homo sapiens
  misc_feature (1)...(364): n = a,t,c or g
cgatagacgcccgtatcacgcgtccggagcactgcgccgtttgggaacgcaactttgaggagacagtgcggtggcattctcctggtgtgcagcctgcatatgtgaaggaagttgttgagaagggtgtacagactcttgtgattggccgagggatgagtgaggccttgaaggtgccttcatcaactgtggagtacctcaagaaacatggcattgatgtgcgggtcctccagacagagcaggcagtgaaggagtataatgccttggttgcccaaggggtcagggtgggaggtgtcttccattccacctgctgatggagccttaagaggagaataaatcactaagtgcctnnnnnnnnnnnnnnnng

SEQ ID NO: 140664 - DNA, 519 bp, Homo sapiens
  misc_feature (1)...(519): n = a,t,c or g
aaatgtgtccaataaaagaaaaattagaagtgctataaaatattctatgaggatataaagtattattaaaatataaaggaccaaatagtgatccttgtagaacttgagggattctgagaaatagttgaaatgacactgtctcagggttaggtagactggagagcccaacgctgatgaggcagaggaatgtgtgcagccactgctatcctgggtcagcaaaatgagggtacatgatatataaagatgccctcccaagaaggacaagtctgtaagacaaaggcccaagagatccccacctgtcctcaggaatgctgtgcataccaacacctaccttcaaggcctcactcatccctcggccaatcacaaaagtctgtacacccttctcaacaacttccttcacatctgcaggctgcacaccaggagaatgctggatgtggaaagagaaagttagacagatggagtctcactctctcacccagagctcacattctagtaaaatgaaacnagaggccactgact

SEQ ID NO: 140665 - DNA, 603 bp, Homo sapiens
atgggaagaaaacacatattcatggattggaagatttaatattgataagatgccaatacctttaagttgaagtacagattccacagattcactctccatcaaaattccagctggcttctttgcagaaattgacaagttgatcctaatactgtcctcaggaatgctgtgcataccaacacctaccttcaaggcctcactcatccctcggccaatcacaagagtctgtacacccttctcaacaacttccttcacatctgcaggctgcacaccaggagaatgcatggcaaaactggaagagtctacggtattacccaacgtgctgttggcattgttgtaaacaaataagttacaggccagattcttgccaagagaattgtgcctattgagcacattaagcacactaagagccaatagagcttcctgtgagagttgaggccctctcccgtggctagctagaattgcagaaatccacggtgggaacatggaccgctgagctctcacttttccttttaacacattggggagtttctcctggctcccatttgatgggggttgagcaggttgccttctttctccttccttgccgtagatgtttcctgtcat

SEQ ID NO: 140666 - DNA, 543 bp, Homo sapiens
  misc_feature (1)...(543): n = a,t,c or g
acatgcgccgtttgggaacgcaactttgaggagacagtgcggtggttctggaggctgggaagtccaagaccagttggctcgcatctgacttcagtgaagttccttatgactttcccctgaaaattgccttcccttatccatgggggccaaatgaaagtaaaaggctcctaatacaaccctataaggactgccnaagtatggccagggggcaagtcggacttgggattggagagaaacaggaactgagcattctcctgggtgtgcagcctgcagatgtgaaggaagttgttgagaagggtgtacagactcttgtgattgggcccgaggggatgaagtgaaggccttgaangggtgccttccatcaactgtggagtacctcaaggaaacatggcattgatgtgcagggtcctccagacagagcaggcagtgaaggagtataatgccttggttgcccaaggggtcagggtgggaggtgtcttccattccacctgctgatggtagccttaagaggagaataaatcactaagtgcctaaaaaaaaaaa

SEQ ID NO: 140667 - DNA, 927 bp, Homo sapiens
gaggatctgtggttgggtattttgtgtttttttcttctgccaaaacaagcttgctaacttctttgcttctctgtttccttaaaatgtaaatccgatgttttctggttatctacgactgcataacaaatcatgccaaaatgcagtggctttaaacagcagtctttcattacttcttgcagttcctgtaggtcagaaattcgagaggagcagggctgggcggctgtggctcaggatctctcatgcgctcagtcctcatggagggctaggttggggtcagttgtgccaaactgagtaaaccactcaccctctctggtcttcagtttctcacttggtttttcagatgtaaatcccatctacatgtatttcacttggtatcttcggaagacacgggcagagctggttttgacagtgatgcagttgctggcaaatccgtttgcatccaacattgtcttgaaatttgggtcacctcttcacaaatcctgtttggaaaaatttttccctcggctgctcaacgtcaaggctacacaacccgtcaagggagtgtcagcggtgcgcacgggtttgacaaatcatagttcgctgaaagaacgaggacccatcattagcccaaaccgcggtggaaaggagcgctcggttgcagagctagaacagcagttaccagccggggctgcctggcaccctcccgccgccgccggcgccttcctggccgccgagctgcctcgcagccaggtcccaatgccgaccccaaggcgtgccgcccctggaacccgcgggggtcccaggtccacgccaaaagaaacgcgctctgcttctcccgggcgtcagatgcaccgcctcggccggacgccagccctggacaaatttttccgggaaggcgacgtaaagaatgtcagacttgcaaaaccagagtgcgcctcggttgcttaa

SEQ ID NO: 140668 - DNA, 415 bp, Homo sapiens
acttttacatcggttcttaataaacgcttattcatctctgggaataaagttaaacggagccaatgagcattggcaaggaagttgcccactaacttccagtgggtaaagaaaatcgatgcatctccgggctccccaatccctctaaacgccccctagccctctccaagtgtccagaccacccccaccacggggcacccagggcgagccctgagcacagtctccgaggtccccggagctggagctcggcttacataccgcgtcccattcacgcgctgcaaacgcagcctcatccttccatctccggtttgggtttcccggattccatccacggccaagtcccctattttaatcagcagccccggaggcgcacacgccgcctccgtgtctgcgctaacgttggtcagcggctacgaaa

SEQ ID NO: 140669 - DNA, 714 bp, Homo sapiens
atggggtgtattggaggagaaggctccaaggcatactgctacttgccgtataagcctatagaaggtggtgtcagtattttagttgagggatcagatactaactgtgccatggcttttaccatgcatatcttggcttcaggagaagaactagcagccctctccaagtgtccagaccacccccaccacggggcacccagagcgagccctgagcacagtctccgaggtccccggagctggagctcggcttacataccgcgtctcattcacgcgctgcaaacgcagcctcatccttccatctccggtttgggtttcccggattccatccacggccaagtcccctattctaatcagcagccccggaggcgcacacgccgccaccgtgtctgcgctaacgttggacagcggctgacggctgctcctctgccacaggcagccaaaaatgtcaatttgcacactcctccccctgtcgcccgcccccgtccctctgcaaccccctcccgcggagtcagtgggcttcaggaagcctctgcagaagctgcctgtgttttagagtcttcttcgctcgccgtacctgaagggcatctcccacgactgcaattagctgccaagatttcattgtcggctgcaaagtgcctcctgtttcctcaccgggaaaacacagcacgggagaagtccgaggcaacagcaaacggcacccacgtgctagcaatgtaa

SEQ ID NO: 140670 - DNA, 455 bp, Homo sapiens
caggctttgtaacatcatcattctttctgggctgtctctcttttccagatgcctatgatttggtatttctcctggccagagagtagcactggaaacattgaacacaaagtattctaacccttattgctcaatgtgtttttccagagcagcccaaaaggttatgctgggtttcatgagctgcagaggatgactgactggtgccacctagaaagacaaacagcagaaactgcagagcttggactgagctcagacaaaaatctctgctgcttgtacccagcttgaatattatggccaacacttgaagaatagaaagcatcacttaaaacattttaattatccccacatgtaacatgggccctaaatgttctgaactgaaaacctcactatgtagttgaaggtcaatgacacaagtttcagatattaaaggtttatcactgtttcctgtctaacctatt

SEQ ID NO: 140671 - DNA, 1591 bp, Homo sapiens
atggccagcctgaagacaggaaacagtgataaacctttaatatctgaaacttgtgtcattgaccttcaactacatactcggcacagacaaggaaaaggtaatgcacgaggcaactcatgtccttccttgtctcagaagtatgaactgaggatcaaggaggggcaggcagttagcactagggaaacaagagcaggcaaaaatggacagctgagccagtcaatcagtggacttaagagaggaggggagatctgccatctcctggaactgagggtgcactgtggcttttcaggtggtcaccaactgaactatgggagcaaacaagccatggttagatgtaataaccacatttctaatgacagagaagagtctgcaaaagagccagaaagacggctagagggttgggaagcagccgtccagaaacatagaaagggcccaagattattcttcctgaggccaatgagggacagtttaattacgcagtggcctgctgctttcagacctgtatgtggaaaaagaaaacgtctcaaatccaagttaagagaaggaagttcctacattattggactgctgtgcagctctaggacagtagaaatgcaaaatgatacagctactttggaagatggtttagtcgttttctacaaagctaaacatcctgttaccaaacaatccagcagttgtgctccttggtattcacctaaaggagttgaaaacttacgtccttacagaaacctgcacactgatgtttatagcaggatcccaaagaaacctgagagactacttcaggccatgatgggaaaggcaagtttggacatgcctccttttaccctgctgcaaaagggcgaggaatgtgccaccctcagccaaacctcagcagttgtcccatcttcaaacctgactcatggggaactgagagaaaaggaactgacattcactgcacacctgacacagcgttccttcccactggaggatgcagcaataagagtcatcttggaaacagaggacagccctcaccagacaactgaacctgccagcaccctgactgtggacttccagcctttagaactgggtcttcaagctggctggcatcagctgtttcgctggaatttggcgtctgaaaaacattttaagcaattcttaaaaagccttacgactcttaacatcagaaagcctatctatagggacaacgggatacaaatgtactatctagctctacccgactttcgggttacaaggaagcctgggcacgtgggcagccgccgaccctctgcgccctggccccgcggcccgttgtctggacctgctgtctctgccccgcagcgcctgcctgtggaacgtactcttccctttatcccgagggtaccctcagtatctggcccttccgaaggcttctgcccaggcacctggagcactgcgccaaattttctcccttacccgtttttgggctgccttcccaggggttggctggcagctgctctccgagcagcctattcggttaggaactctctgcgccccttatcttggagggccacagtctgtccctgcagacgaggcaaggaggcagtgctcagcgctccctaccctgggtctctag

SEQ ID NO: 140672 - DNA, 1476 bp, Homo sapiens
aggaagaagagaaatctaaaagtctggaaaacatatttgcgctaataatcgatgaaaatttccttggctttgttagagatctagacatccaaatccaagaagctcaaagaacacctgggaaattcatcacaaaaagaacaccctctaggcacataatcatcaggttacttaaagtcaagacaaaggaaagaatcttaagagttgtgaggcaaaagcatcagctcaacgctgttcggcaggaagtaaaatctctttgtggcttggaagcctctcatgttcctgcagaggaagctctttctggggctggtgagccctatgacatcatcgacagcagtgatgagatggatgcccaggaggaaaacatccatgagagaactgtctccagaaaaaaagaaaagcaagagacacaaagaagaactggacggggctggaggagaagagtatcccatggatatttggctattgctggcctcctatatccgtcctgaggacattgtgaatttttccctgatttgtaagaatgcctggactgtcacttgcactgctgccttttggaccaggttgtaccgaaggcactacacgctggatgcttccctgcctttgcgtctgcgaccagagtcaatggagaagctgcgctgtctccgggcttgtgtgatccgatctctgtaccatatgtatgagccatttgctgctcgaatctccaagaatccagccattccagaaagcacccccagcacattaaagaattccaaatgcttacttttctggtgcagaaagattgttgggaacagacaggaaccaatgtgggaattcaacttcaagttcaaaaaacagtcccctaggttaaagagcaagtgtacaggaggattgcagcctcccgttcagtacgaagatgttcataccaatccagaccaggactgctgcctactgcaggtcaccaccctcaatttcatctttattccgattgtcatgggaatgatatttactctgtttactatcaatgtgagcacggacatgcggcatcatcgagtgagactggtgttccaagattcccctgtccatggtggtcggaaactgcgcagtgaacagggtgtgcaagtcatcctggacccagtgcacagcgttcggctctttgactgtcaggcaccgtgtatgaaatctaacaatgcgctcatcgtcatcctcggcaccgtcaccctggatgctgtaggcataggcttggttatgccggtactgccgggcctcttgcgggatatcgtccattccgacagcatcgccagtcactatggcgtgctgctagcgctatatgcgttgatgcaatttctatgcgcacccgttctcggagcactgtccgaccgctttggccgccgcccagtcctgctcgcttcgctacttggagccactatcgactacgcgatcatggcgaccacacccgtcctgtggatctacccactagtcaattcaccatcttgttga

SEQ ID NO: 140673 - DNA, 2329 bp, Homo sapiens
acaattattaagccaaatttatttcaccccctttttaaaggtactcctaagcggggaacaatgcaccaagacactcctgctccatggcatctttagttcaggcaacctggcagggactgtgcttctctcctcctgcctcaaagaggaacttttaattgtagagatctgcaaagtgctcattgtccttaggttgtctgttatcactcaaatgcccaaattctgtttttgactgacccaggctcactctgcatttactggtgttataggtacagtcactaattccgttttctcaactataaaatgggaataatatcaccctactttgcaaagacctgtgagaaagtagagatactatgtaaagttcctagtatagtaccaagggtataaagtcatcatcaccattatcagcctcatgcaaaaaaatacctaaaatccaaaactgccaaaagaaaatgtatgcaataaatatcacaaattattttttaaaaaagatacacaagtcaatatggtaagattctgaaaaccctgtcacctgctttatttctggagaaagggtaaagggagaagggaaaatattcacttgaatttgaggggcagctaaactggaagcaaccaatttcaggcctctaaggttcctctgatccataagggaatgctgaaacttccttgtttcggagattcaaagaagtttaatttttccctacagcaagatcaacaattttcactgggataaaagaaataagaaccaaactcaatagcaccaaatgggggttttaacacaggaaaacagggccacgtccttttaaatgccaaatttttaccatttaaaatatgtttataaaaccataagtagttgttttccctcttcgattcaacatttctccctccccctaaacaggagcccctagaacctggaagagcatgtacattactaacgagatataccatcccaggcaccctggtccaaactgggaatctggattactaatgggactacactcgagggctgccccccaaggggatgggggaggcaggtaactacggctctcaggggagaatggggtactggaggatgcccaccagttcaaagaggccgaacggctgttgcactggggtccaggggtgactttgcacaccctgtttcaactgccacaatttcccgacccacccaaggaacaggggaaaccttgggaaacacccagtcctcaactccgatgaatgcccgccatgtcccgtgcctcacattgaatagtaaacagagtaaaatatcattccccatgaacaatcggaataaagatgaaattgaagggtggtgacctgcagtaaggcagcaagtcctggtctggatttggtatgaacatcttcgtacttgaacggggaggcttgcaatcctcctgtacactttgctctttaacctaagggacctgttttttgaacttgaaagtttgaattcccacattggttccctgtctgttccccaacaatctttctgcaccagaaaagtaagcatttggaaattctttaatgtgctgggggtgctttctggaatggctggatttcttggagattcgagcagcaaatggctcatacatatggtacagagatcggatcacacaagcccggaagacagcgcagcttcctccattgacttctggtcgcagacgcaaaaggcagggaagcatcccagcgtgtagtgccttcggtacaacctggtccaaaaggcagcagtgcaagtgacagtccaggcattcttacaaatcagggaaaaattcacaatgtcctcaggacggatataggaggccagcaaatagccaaatatccatgggatactcttctccctcccagccccgtccagttcttctttgtgtctcttgcttttcttttttctggagacagttctctccatggatgctttccttcctgggcatccaatctcaatcactgttgtccattaatgtcaacagggttcaccagccccaagaaagagctttcctctgcaggaacctgagaggcttccaagccacaaagagattttacttcctgctgaacagcgttggctacggctttcttgactcgtccagacctcacgaccgccggatccgagttgggcgtaatccgccacggtcactcggccggagcaggcgtcgtgggcccggaacttgagtcgctttcctctcttgggcatggcgaccgtatcggggcgaggcctgcctagcgggccgggcccccgggccatgtctccggccggagagccggccccgggagccgcagagccagctccgcccggctccgcggccatcccacaccggaggccgctcctcggccaagc

SEQ ID NO: 140674 - DNA, 1213 bp, Homo sapiens
attcccggttcgacgatttcgcgcattatagcatgaggcatgcacgtgtctggagattggatttcgggcagagcagatgatgagcgcagaggccctgggcgtgggcttggcgggcaggaagagcaaggaagctgtgtggctgcagcagaaaaatcaggtgggcaggggtactggaggtcacggcaaatggacacaagcatctgcctgccccagcaacagagtcctgcttcccacagaaaccggttccaaagccggcagagacggcgctttgaacttgctcaggccttttgaccatcaccatgctgcatattgtgactctggcctcaatcaagcatcccaacagctgctccccagggagcctgcctgcctgcagccctccctctcaagtggcagtaagacacgtgggaagtcaaaaggcccccaacaagctcctgagaatgttatgggcagagcaggcacaaaggggcatgctgcattggcagacatcgcagcatcatgggctgtgctaaaggaggagactggcaatgagttggttgggcatcaaggcccaggggcttcaatgagaaggtacagggagtgtcacccagtggagacagaaggccgtggaccagaaacccagctccaccacttggctgtggggccctggaaacctaacctctctgcatctgtttgcacacctatgaaagagataacaccttgcagcactgttatgattcagttaaataactctcctgggcttatccctcatcccactgatctccagactgccctggactcagtcttggggccccctgtcttttctatctacacccacttcactgctgatttcatctactcctctgattttaaataccatcaattcactgatgactctcagatttctacctcctggtggagctttcccatgaactccagagccttgcatcccgcctactcagcatccccacctggatgtctcgttaacgggcatctcaaacttaccgcgtccgcaaagctgctttcattgtcttcatctcagctgacggcaactctcttcttccagttgctcaggctaaaaccttgcatcattcttttcttgtctctctcacaacctttatccaatccatcagcaaatcctattaactcttatcttcaaaatatgtccagaatccaacttgtcacaagctctgctgctgccaccctagtctggcccaccttcattttgtccggatga

SEQ ID NO: 140675 - DNA, 553 bp, Homo sapiens
atgtgctatcaggtcactgagtcagtgacaagcactaagattgagggagaacatcttacaatcaggttgccatcatgcacgaaaaagaatcgcactagtgcttatgtcagaacaagctgggagaagggagagacgacaatttcacctcttggcaaagctcagcttgctgaaccttttgctttctgctggctgttgattcagcagaaactactgctgcagaatcataatgctgctgctgctgctgctgctgctctgctgcaggaggctggaggcggctggtgcattaaaggcgaggctcctcccaaccgcgtcagcagccccacgactctttcccagcagcagtggtggccgaggcagaggctgcggctgctctttgctgcagtggggcgcatgcagccgcgaatcggcacctgggcagcaagcgactagcttgcaggttcaggtggaacgcatagacgcgctcttccaacctcctcccctctcgcgccactcagctaagggccacgtctaaactagcacccagagcccctagctccctgtctttctcacgaaa

SEQ ID NO: 140676 - DNA, 450 bp, Homo sapiens
ggaattcccgggtcgacgatttcgtggcagaggctgagctcccgggacccggagcggatctactggcgggcgccgcgccgaggcaccaccgggcgccgagttcctggcggctcgcacgcaggtaaataaaggcagctaaagctgactgctggttgcgcaaaatccccctggctcttctggctaaagtcctaccactccctgtacctggcagcagcctgtcttctgggcctcacctacacacgtctgggtaggagccagtcatctccacccatccacagccatgaatttcctccggcgacgtctctctgacagcagcttcatggccaacctgcctaatggctatatgacggacctgcaacgcccagatagctccaccagctcacctgcttcccccgccatggagaggaggcacccccagcccctggctgcctccttctcctctccaggaac

SEQ ID NO: 140677 - DNA, 672 bp, Homo sapiens
atggggcgccgcggcgcggggaggccgggccgccgggcgggggcgctcgcgcgcgttgaggggcagaggctgagctcccgggacccggagcggatcgactggcgggcgccgcgccgaggcaccaccgggcgccgagttcctggcggctcgcacgaattttatcctggaatgaaggagggccgtggaagaattctgatcagtgatcaggtccctctggcagctctggggacaatggatggaggccggagcatcagaaagctgagcacatgtgtccgtagtactacggaggaggagaaggaggaggaggaggagaaagaagaggaggaggaggaggattctttagagaagagatttcaaagttccacactgcagtctcttactgcagtctctccttgccaccggggacgggcacagccccaggtccctctgaatgaattgctaaactgccacctgcttctgagcattgttcaacctggcagaatccttagaaccaggagaggtagaaaggagttggacttgctgatttttgcagcccttctaggtctggccacctgggcttcagattactataagcctttggaatttgaatatgttgatgaagtgggctcagtggtatgccgcactaaccttgtaggggcatctttagagtatgagaaggaggagaagcagtag

SEQ ID NO: 140678 - DNA, 1116 bp, Homo sapiens
  misc_feature (1)...(1116): n = a,t,c or g
ttagaatatctttgaagtgttcctggttggggatggggggtggggtggaatcttggctggcaggaaaggacacaggccttttaatctcagaaccaaaaagactctgcgctctgatttctccaacttcatttcactatgaagggcattctgctcctccaagtcggtgtgacatatcacagggcactcgcgagtgcttctggaagccctgccgcggaggtcgactcttttaccagagacagaaggtcgggaagatgcagcgagtacagcgttcttattataactcgcctcctcacaggtttctggggcttgggaaagggtcagtgccgccaagccactctgcctttgccatccactttcagagctattcacctggtgcttttcaagaatattacccttcccacaaatgattgataaaagatgaatccgccccccggactccccaaacggtgctcgcttctgcacagttctgcctgctgtgccgctgagctcgatgttgccgcggcggaagctgctgctgctgctgctgctgctgctgctgctgctggtggtggtgctgctgctgctacttcggaaacgattaggaggaggacgcccaagcacgacctgagcctgcgagccacccaggaccaatgtgcaacctgctcgagggatccgctcggcacccgatgcaccacatctatgcaccacagctacacccaggtctctgcaaacaggagagcacagcaagccttcgagtccatgcctgagtctccccccaactccgtgggctcctgtgtggcctaagtctccctgacaagcaccgctccctgatccactgcccagtcccatcgaccgcccaagggcgagggacggcagcagctcactgcaccggggcaggacactagtgaagcactggctccgactaaggggattgggaacttttgctacaaggatggtatgccccccacatttgggatccaagggtgggatcccccaccaggaaattggaatcttccaacaaccgtctaatacctgcagagaggacagccaggaagtatatccttgctgtntacaattttgtgacacagtttcttcatgaaactgtggagtcatgagcttaaatggaataatgcacat

SEQ ID NO: 140679 - DNA, 264 bp, Homo sapiens
  misc_feature (1)...(264): n = a,t,c or g
tgaggacgacgccattgaactttanagccgtgtgcatccgcctnacgttggactggtccggcttcatgctgaagaggtctttgaaaccggataggctggtgtctctgctcctgtacttctcagcgatcagcttctccctggnccaggtcatctgcaccttgtctggcgtaggcggcgcttgggtcctgctgccgccgcggtgtgggacgcggtgttcctgtcgtggatcagctgggcctctngctcctgctcgttcttggacag

SEQ ID NO: 140680 - DNA, 2297 bp, Homo sapiens
ctgtgcagcctccgtgcgtggaagctggccgcctggctgcagcggctttggctccgtgggtaactgtaggctgctgaggacgtctgggtgtatccatctgagttatactggcctgggccccatggccactgtgagaccccaagggcaggcgtctttgtggtcacttcgcacgaggagggaccgggagcgggaacagcaagctcgagctcgaagggcccctcctgggccaggtgggggttggaggtgtcaccgctacggtggccctcgggccaggtgggcggcgctggctctgccgagagcgggcagcccttgggctctggtttcacgttcaaggccatgggaaatttaggcgagtcccgggcccgccaggcccagctgatccacgacaggaacaccgcgtcccacaccgcggcggcagccaggacccaagcgccgcctacgccagacaaggtgcagatgacctggaccagggagaagctgatcgctgagaagtacaggagcagagacaccagcctatctggtttcaaagacctcttcagcatgaagccgtgagtgtccgtgcgtgtggcctgggccagccctgaagtcagccctgcggccaggcctgctttgctcaggcaagcctcactgcagcaggcagatgggtctgttccatggaggcgaggaggcttgtgccgctgggcacagaattcctggccttcaccctgtgggtagttcaggctgctgtcgggccctagggcctgccctacgccaaggctcccacctgtggccttgggctgcgaacaccagggctgtacagggtccttgcgggtgtgggtttggttctgcagacgcagccttgtgacgtccccgggagcacacttaacggatgtctgtttgtgtgcgtgctcgcatgtacctgtcagcgcacctgccggtggacgtgtacctgcttggttggggagcctcctgtggggctgtggccgggcccaggccgccagggacgctttgagacatggaccggccacagcagcttcagagagcagacaggtagggtcgtggagcagagctgcgttgtgagaccgaagtcggggctggacggccacacgttggaagtgctggtcctttagccctgtccttgtcaggcctgggagcttcagcagcaacggctgcacaggccggtgtgggggactctgggcctttccttcctgagcttccggccccttggacccagttgtatcaggaccctcggagaggaggccatgtgtgcccagcctgacgggtctgtgtttggcagtgtctgacgtggggtttaggggcgatgatgtagatgtcaagagaagcgtgtcagccttgaaggcgtcaggcacatgggccacccagacggcttccactgttctgcctgctttgcagatgtagatgtagttaggaaagcgcttgcggtttgtgttgtgtgactcccctgcagggaccagtccaacgtcaggcggatgcacacggctgtgaagctcaatggcgtcgtcctcaacaagtcccaggatgcgcagctggtcctgctcaacatgccaggtcctcccaaaaaccggcagggagacgagaactgtatcctttcttgcagtgtgcctgctgagcgtgcgggcaccccctggtggcttctcgctaagacggggtgaagccgcccccagcaccagtgcagccaaagctccggctccttgggcgagctggcagctgttccccctgcgacagatcctactgacgtccaggagagtcgcaggccaccacagcgaagtgtccctctggctctcaccttcttcttttgtgttgtccagagcctcgcccatcgtccttgtcctcccaggtggtatccactgaggagggccagtcgtgtctgaaaacaccaacagcagcactttcccagacaggtgtgtctctgcacccccgacgtggctctccctggcgactctgcggagcgccacactttgcttttggcgggacccgcacggcttcatcaccgagtgtccctgaagggccagggccatgggatcactggtgacggtgccgtgaaggtctggagagtggattgtgagggatccggagtccctgtcctctgtgggtccagagagctggatgtggcagtgggatgcccagttcttggtcagtgggagcagtttcttgtagaagatcctggaaaattcttcatggcatctcccagtgcctccagcttcccatgctgaaaggcgctgcccgatgtaaggaggtcccagaacctgggaaccacccaccaggccccggaggaggggccactgcctcagctccat

SEQ ID NO: 140681 - DNA, 975 bp, Homo sapiens
atggcagctgggaagggagccccgttgagcccatcggctgaaaacagatggcgacttagcgaacctgagctgggccggggctgcaagccagtgctgctcgagaagacgaaccgcctgggccctgaggctgctgtgggcagggcgggccgggatgtgggcagtgcggagctggcactgttggtagccccaggcaagccccgacctggcaagccgctgcccccgaagacacgtggagagcagaggcagagcgccttcacggagctgccgaggatgaaggaccggcaggtggatgctcaggcccaggagagggagcacgatgaccccacaggccaacctggtgccccacagctgacccagaacatccccagaggcccagctggcagcaaagtcttctctgtgtggcccagcggagcacgaagtgagcaaagaagcgcctttagcaaaccaaccaagcgaccagcagagaggcctgagctaacctcagtcttccctgcaggggaatctgcagatgccctgggggagctgtctggactcctcaacccactacagaccttcgcttgttggggtcgactttcaactcccaagcttttggttggtgatttgtggaacttgcaagcattgccacagaatgctccactctgtagcacttttctgggtgcccctacactgtggctggagcatacccaggcccaggtgcccccaccctcatcatcctccaccacttcgtgggccctcctgccacccaccctcacctccctgggcttgtccacccagaactggtgtgcaaagtgcaacctgtcctttcgcctaacgtccgacctggtctttcacatgcgatcccaccacaaaaaggagcatgcggggcctgacccacattctcagaagcggagagaagaggcccttgcctgccctgtgtgccaggagcacttccgggagcgccaccacctctcccggcacatgacttctcacagctag

SEQ ID NO: 140682 - DNA, 223 bp, Homo sapiens
atgggcgcagttcagaaggcttataacctgcaaaaaaaaagaagaagaagaagaggaagaagaggaagaataagaggtagaagaggaagaggaagaagaagaagaggaagaagaagaagaaagaagaagaagaaggaagaagaagaagaagaagaagaagaagaagaagaagaagaagaagaggaagaagaagaagaagaggaagaagaagaagaagaaagag

SEQ ID NO: 140683 - DNA, 341 bp, Homo sapiens
tgctgtgtttcctccgtgggctatctcatccatctggtgtctcaggaggcaaaggaagggggcccagaaggaggaggagaagaagaggaagaggaagaggaagaagaagaggaagaggaggaagaagaagaggaagaagaagaggaagaggaagaagaagtagaagaagaagaaagaagaagaagaggaagaagaagaagaaggagaagaagaagaagaagaagaagaagaagaagaagaagaagaagaagaaagaagaaagaagaagaagaggaagaagaagaagaagaagaacaagaagaagaagaagaggaagaagacagaagaaacaacttagcatg

SEQ ID NO: 140684 - DNA, 354 bp, Homo sapiens
atgcaggtccgtgacttcattcttgaagtcagcgagaccaagaacccaccggaaggaaccagttacggacacattaagagaatgattctttctataatgatctctaggcaacacaaagaagaagaagaagaagaagaaagaagaagaagaaaggagaagaaaggagaagaaaggagaagaaaggagaagaaaggagaagaagaagaagaagaagaagaagaagaagaagaagaagaagaagaagaagaggaagaggaagaggaagaggaagaggaagaggaagaagaagaagaagaagaagaagaagaagaagaagaagaagaagaagaagaagaagaagaagaagaagaagga

SEQ ID NO: 140685 - DNA, 330 bp, Homo sapiens
atggtagctcacgccttggtcccagccacatgggaagctgaggtgggaggatcgcttgagcctaggagaaagaagaagaagaaggaagaggaggaggaagaggaggaggagaggaagaggaagaagagtaggaagaggaggaggaggaaggaggaggagaaggaagagaaaagaagaaggagaagaaggagaaggaggagaagaagaagaagaagaggagaaaaaaagaagaagaggaagaagaagaagaagaagaagaagaagaagaagaagaagaagaagaagaagaagaagaagaagaagaaaggaaatttgtccgttgagcattaa

SEQ ID NO: 140686 - DNA, 246 bp, Homo sapiens
atggggaagctgcagcaagtcatccagaagatcttgctaagaaatagaattgaagaagaagaagaaagaaaggactgtgaagaagaaagaaagaaggactgcgaagaagaagaagaaagaagaaagaagaagaagaagaagaagaagaagaagaagaagaagaagaagaagaagaagaagaagaagaagaagaagaggaaagaaagacggactgccaagcctaagagttggtgtcctgtggcataa

SEQ ID NO: 140687 - DNA, 349 bp, Homo sapiens
aggaagaggcggaagagaaagaagaggaagaagaagaagaagaagaagaagaagaaggagaaggagaaggagaaggagaaggagaaggagaagaagaagaagaagaagaagaagaagaagaagaagaagaagaagaagaagaagaaatactaataatgaaacaggagagtaagtctaagagaagggaggattaacctgaacttgacagatcaactggccccacccagatcaataaactggctcatgtgatcttgtggcaacccccgcccaccccggcaacccaggaattaactcagtgcagtaagacagctttgactccctaggatttcatctctgaactgaccaatca

SEQ ID NO: 140688 - DNA, 282 bp, Homo sapiens
atgtgtatagagtcagagagagaagaagaagaggaagaggaagaagaggaggaggaggaagaggaagaagaagaagaagaaagaagaagaggaagaggaagaagaagaagaaagaagaagaggaagaagaagaagaaagaagaagaggaagaagaaagaagaagaaagaagaagaggaagaagaaagaagaagaggaagaagaagaagaagaaagaagaagaggaagaagaagaagaagaagaagaggaagaagaagaagaaaaagaaaagacagtcattaa

SEQ ID NO: 140689 - DNA, 399 bp, Homo sapiens
atggtgccccctggatggtgccccctggatggtatcccctggaaggtaccccctggatggtatcccctggatggtgccctctggatggtgccccctggatggtatcccttggatggtatcccctggatggtgccccctggatggtatcccctggaggatcgagaagaagaagaagaagaagaagaagaagaagaagaagaagaagaagaagaagaagaagaagaagaagaagaagaagaagaagaagaagaggaggaggaggaggaggaggaggaggaggaggaggaggaggaggaggaggaggaagaagaagaagaagaagaggagagaggaaagagagagggaagagagagagcgagagagcaagagagagatgcaaggagcagacagcctttctaa

SEQ ID NO: 140690 - DNA, 255 bp, Homo sapiens
atgttgtggctcccgcagccggcgctggggacgcgcgcggccgagactctggcctgcagtcgccgccgccgccgccagctctacaactgctgcctttaccttagaagaaggaagaaggaagaagagaaggaaaaggaggaggagaaggggaaggagaaggagaaggagaaaaaagaagaagaaaagaagaagaagaagaagaagaagaagaagaagaagaagaagaagaagaagaagaagaagaagaagaaatag

SEQ ID NO: 140691 - DNA, 393 bp, Homo sapiens
atgaagaagaagaaagaaggaagaagaaggaagaaggaagaagaaggagaagaagaaggagaagaagaaggagaagaagaagaagaagaagaagaagaagaagaagaagaagaagaagaaggaggaggaggaggaggaggaggaggaggaggaggaggaggagaaggagaagaaggagaagaagaagaagaaggagaagaaggagaagaaggaggaggaggaggagaagaagaagaagaagaagaagaagaagaagaacaacaacaacaacaacaacaacaacaacttgaaaaattaagatcaaggaaaaattattccttaatccatgagctacagaatggatattgttttagcaggcatgaaaatattaatctcctcatacatctccattag

SEQ ID NO: 140692 - DNA, 423 bp, Homo sapiens
atggaggaggcagaggcagagagaaaagaagaagagaaggttagagaaaagaagagaagagaaggagaaggagaaggaggaggagaaggagaaggagaagaagaagaagaagaagaagaagaagaagaagaagtcaaatatctggagaagaagaagaagaggaagaagaagaaaaggaagaagaagaagaagaggaagaggaagaaagaagaagaacaagaagaagaagaagtcaaatatctggagaagaagaagaagaagaggaagaagaagaagaagaggaggaggaagaaggagaaggagaaggagaaggagaaggagaaggagaaggagaagaagaagaagaagaagaagaagaagaagaagaagaagaagaagaagaagaagaagaagaaaatacaaatatctggagccgggatttga

SEQ ID NO: 140693 - DNA, 167 bp, Homo sapiens
aacaacaaaaagaagatgaagaaaaagaaaaggaggaggagaaggaagaggaagatgaagaagaagaaagagaagaagaagaagagaaagaagaagaagaagaagaagaagaagaagaagaagaagaagaagaagaagaagagaaacacaagaggcagagaccatag

SEQ ID NO: 140694 - DNA, 510 bp, Homo sapiens; identical to SEQ ID NO: 119439

SEQ ID NO: 140695 - DNA, 621 bp, Homo sapiens
atggcgccactacccttcagcctgggtgacagagtgaaacactgccttcaaaaaaaaaggagaaggaagaagcagcagaagaagcaaaagaggaagaggaagaagaggaagaggaggaagaagaggaggaagaagaaggaggaggaggaggagaagaaggagaagaaggagaaggagaagaaggagaaggagaaggagaaggaggagaaggagaagaagaagaagaagaagaagaagaagaagaagaagaagaagaagaagaagaagaagaagaagaagaagaaggaagaagaagaagcagaagaagaagaagaagaagaagaagaagaagaagaagaagaagaagaagaagaagaagaagaagaagaaagtatccaatgtgggttgcatctgagactctgggagaaatctagaccgaaagaagaagaagaagaaggagaaggagaaggagaaggagaaggagaaggagaaggagaaggagaagaagaaggaagaagaagaagaagaagaagaagaagaagaagaagaagaagaagaagaagaagaagaagaagaagaagaagaagaagaaggagaaagtatccaatgtgggttgcatctgagactctgggagaaatctag

SEQ ID NO: 140696 - DNA, 294 bp, Homo sapiens
atggtgcccgtatctgcttctggtgagagcttcaggaaacttttgatcatggtggaaggtgaagaggatcagggatcacatgataagaggaaggaaggtgaagaagaagaagaagaagaagaagaagaagaagaagaagaagaagaagaagaagaagaaggaagaagaagaagaagaaggaagaagaagaagaagaagaagaagaagaagaagaagaagaagaagaagaagaagaggaagaagaagaagaaggaatactttcaaacttattctgcatggctagtattatgctga

SEQ ID NO: 140697 - DNA, 155 bp, Homo sapiens
tctatagacatttaccaaaaaaaaaagaagaaaaagaagaagaagaaaaagaagaagaagaagaagaagaagaagaagaagaagaagaagaagaagaagaaggagaagaaggagaagaaggagaagaaggagaaaatatgaaaagaaatgtctag

SEQ ID NO: 140698 - DNA, 1413 bp, Homo sapiens; identical to SEQ ID NO: 121395

SEQ ID NO: 140699 - DNA, 842 bp, Homo sapiens
tcagcctcccaaaatgctgggattacaggggtgagccacttcgcctggcttccagattcagggtgggggacagaacatacgtgagagcagccctttgcctgctgctgtcctcctcccagtgccccagcgggtttagcagccacagtggctgtgcctgccaagcacttctgctgagcccttcccactgtttaatagagcctgctgcccctggctgtcttcctggatgtgctgtggccacgaccaggttaacacatccgaaccaaactcagtattttacaacccccctgacaacttacccctaatttataaagaattgcataatttgtaaagaacaaaaatatatttctcacagtctggatgctggaaagtccaggatcaaggcactagcatctggtgtctggtgagggccttcttgctgcgccctcacacggatcaaggcgccagcatctggtgtctggtgagggccctcttgctgcgccctcacatggatcaaggcaccagaatctggtgtctggtgagggccctcttgctgtgccctcacacggatcaaggcgccagcagcaggagaatggcgtgaacccaggaggcagagctggcagtgagccgagatcacgccactgcactccagcctgggcaacagagcaagactccatcagaagaagaagaaagaagaaagaaggagaaagaagaagaaagaagaagaagaaagaagaagaaagaagaagaagaaggaagaagaaggaagaagaaggaagaagaagaagaagaagaagaagaagaagaagaagaagaagaagaagaagaagaagaagaaggaagaagaaggaagaagaagaagagga

SEQ ID NO: 140700 - DNA, 471 bp, Homo sapiens
atgccaggaacaatccagctgacagcaaaatatatcctctaccggctgcaagcatccaaggccaagtgcattgtggccagtgaggaggtggtcccagtagtggagtccattgcactggagtgtcctgactttaagaccaaactcctggtgtctccacaaagccggaacagaaaaagtttgccaactcctgccctaaaccgctatagggagatgaagcttaaaaaaagaagaagaggaaggaagaaggaagaagaaggaggaggaagaggaggagaaggagaagaaggagaaggagaaggggaagaaggagaaggaggaaaaaaagaagaagaaggaggagaaggagaaggagaagaggaagaggaagaggaagaagaagaagaagaagaagaagaagaagaagaagaagaagaagaagaagaagaagaagaagaagaagaaaagaaagaagaagaagaactggactgttaa

SEQ ID NO: 140701 - DNA, 777 bp, Homo sapiens; identical to SEQ ID NO: 121054

SEQ ID NO: 140702 - DNA, 357 bp, Homo sapiens
atggtgagaccctttctctacaaaaaaataaaagaagaagaagaagaagaagaagaagaagaagaagaagaagaagaagaaggagaagaagaagaagaagaagaagaagaggaagaggaagaggaagaggaagaggaagacaaagacgacgaagaagaaagaagaagaaagaagaagaagaagaagaagaagaagaagaagaagaagaggaagaagaagaagaagaagaggaagaagaagaagaagaagaagaaaaaaaacattctttataggatccagatctgggagagaaagaaaacaaaggacaaaggaaaagaaaacttgcccgtgggacttcccagccatccctttcacctg

SEQ ID NO: 140703 - DNA, 295 bp, Homo sapiens
aactctatcgagagagagagagagaaggagaagaaggaggagaagaagaagaagaagaagaggaagaagaagaagaagaagaagaagaagaagaataagaagaagaagaagaagaggaagaggaagaagaagaagaaggaggaggaggaggaggaaggggggaggaaggagggacaaacactctagaattttcaaggcagaagactgtccgagttgctggcagtccctgtcaacacagggccccactttgaggataagttcacctgcccaagttttcctttaagtgatggtttga

SEQ ID NO: 140704 - DNA, 771 bp, Homo sapiens
atgcaagagcaaataaatgacttaaagttggaacatatatttacacaagaagcagagtgtaagagtttgggaaatgtgcagcgcagccatatggcagagaaagaaaaagctttttcaggaaaggaattcaagcaggttttggagcagccacttactagagaaatttgtataactaaaggagacccaagtgctaatagtcaagactatcgggaaaaggactccaaggcatttcagagaactttgtggcagcctctcccatcccagacacttctccccaacatccctgccactctagcttcagcctcaggtcaatggggctcagctacagctggggctgcagctccagagggtgcgagccataagctttggcagcttccacatggtgttattcctgtgggcatacagagtgccgaagttgaggattggcagcctccacctagatttcacaggatgtatggaaaagcctggatggccagaccaaagtctgctgtaggagaagagccctcacagaggacttctactaaagcagtgagaacaaaagaagaagaagaaggagaagaagaagaaggagaaggagaaggagaaggaggaggaggaggaggaggaagaggacgaggaggaggaggaggaagaggaggacaaggaggagaagaagaagaagaagaagaagcagaagaagaagaagaagaagaagaagaagaagaagaagaagaagaagaagaagaagaagaagaagaagaagaaacactgaaaaatgaggagttagcataa

SEQ ID NO: 140705 - DNA, 429 bp, Homo sapiens; identical to SEQ ID NO: 118058

SEQ ID NO: 140706 - DNA, 282 bp, Homo sapiens; identical to SEQ ID NO: 117047

SEQ ID NO: 140707 - DNA, 798 bp, Homo sapiens
atggctgacacttgggctggagttcccaagctgcaaggctataaaaaggtcctccccaggactgcccctgaaagcctccagattccaatgaattttgactccattggaagtgaaaggaaaagaagagcggggaaggaaaggaggaaaaacaacaacaacaaaagccacgacagagaacgggaaaaggcagagactgaaagcgaaggaccgtcggaggaggagggcgagaggtctggagaggagggctcgccggaggaggcgggcggggcgggctgtgcggagggtgcggccagcgcgagttccctgctcgctcggacaccccagcgccctcacagagacccctcggactccctgggccccagcccctcacgcagcccctcagactcctcaccgaagctgccgtcactcccgcagttccccacccctcccgtggaagacccatcccttaaccgagccttcctctcctcgctgcaccgtcagtcccttttccagcctgggcgacagagtgagactaggtctcaaaaaacaaaagaagaagaagaagaagaaagaaggaaggagaaggaggaggaggaggaggaggaggaggaggagaagaagaagaagaagaagaggaagaggaagaagaagaaaagaaagaagaagaagaagaaagaagaagagaagaagaagaagaagaagaagaagaagaagaagaagaagaagaagaagaagaagaagaagaagaggaaagaagaagaagaagaaaagaagaagaactctgaggagcatatgacagggaatcacagtctgaaatga

SEQ ID NO: 140708 - DNA, 642 bp, Homo sapiens; identical to SEQ ID NO: 121062

SEQ ID NO: 140709 - DNA, 1167 bp, Homo sapiens
atggctccgcgccctcaggccgcccgcctgcccagctgcgggacccgttctcagggagcagcgcggccgccgcccctcgggaccgccgccgcctaccggcctctcagcagccggctgctgacggggccaccgccggcttcctcctcctggctcgcaatccacttccggatccgtgttggaagttctggccagggcaatcagagaataaaatacctaggaatccaacttacaagggatgtgaaggacctcttcaaggagaactacaaacgactgctcaatgaaataaaagaggatacaaacaaatggaagaacattccatgctcatgggtaggaagaatcagtatcgtgaaaatggccatactgcccaaggttcaagcgattctcatgcttgtattgttcttgcacctgttctgcaagtacaacattgtgggaatggaaaatgcaggaaatgggcacgattggtctttggataggcacctgatgcaagcttcagccaatcaacaggccactcagctggccatcagtaggccatccaatcagagcaaagcccaggactttcttcgactcttaagaaaagagaagcaaactgccctggacacctttgccccattgaaggagcaggctcagaagtggaatgaggatggaataaggagcagtgttataccaggaattcagcaccagtcgctattgctggcagttcttacattcaacagcagcaaaactagcttgggtgacagagcaagacctgtctcgaaaaagaagaaagaagaaagtaggaagaagaagaagaagaagaagaagaagaagaagaagaagaagaagaagaagaagaagaagaagaagaggaagaggaacaagaacaagaagaagaacaagaagaacaagaagaagaacaaggagaacaagaagaagaataagaagaagaaggagaagaagaagaaggagaggaagaagaagaagaggaagaggaggaagaggaggaggaggaagatgaggaggaggaagcagaagcagaagaaaaagaaagaaaagaaagaaagagaaagaaagaaaagggaaggagggaaggaaggaaggaaggaaaaagggaaggaaagggaaggagagggagagggagaaggaagaacaaagaagaaagaaggagaagcagaggcttgtgctggatag

SEQ ID NO: 140710 - DNA, 690 bp, Homo sapiens
  misc_feature (1)...(690): n = a,t,c or g
atggtaaaagggagccagttgcagaaggcccatgtcatgtctgtcctccatgagatgctgcagcagatcttcagcctcttccacacagagcgctcctctgctgcctggaacatgaccctcctagaccaactccacactggacttcatcagcaactgcaacacctggagacctgcttgctgcagagctactccattcagcatttcaatagcattgacctgaatgacatggatgtgaacttacatggcaactttgttcacattgactttcacggtttgagtaggggtccaaggagcaacatgatgtctgcttttgtggttgctctaactcactcctcagataaaggatcttgcataaatccttcaggaagctactctgcaaaggaagcttttgcagtactagaagtcctaccagagaaatcagatcaaaaaaaaaggaagaagaagaagaagaagaagaagaagaagaagaagaagaagaagaagaagaagaagaagaagaagaagaagaagaagaagaagaaggaagaagagaaagaggaagaggaagaggaagaagaagacgaagacgaagacgaagaagaagaagaagaagaagaagaagaagaagaagaaganagaagaagaggaagaagaagaagaagaagaagaaataaaaggcatccaaaggggaaaggaagaagttatctctaa

SEQ ID NO: 140711 - DNA, 708 bp, Homo sapiens; identical to SEQ ID NO: 118062

SEQ ID NO: 140712 - DNA, 2334 bp, Homo sapiens
atgaaggtggagctgatgggatttgctgaggggctggctgtgcgagtgagggaacaagaggaggtgaggctgaattggaaggtggagctgctatggacagacttgcgtgatgtgcccaagggtgccaacagcttcagggtctctggaagctccggggtggaggtcttcatggtctacaaccgcacacgtgtgaaagagcccataggcaaggcccgttggccgctagacactgatgcagacatggtcgtatctgtgggcacagccagtaaggaattaaaggacttcaaggtgagggtctcctactttggggagcaggaagaccaagctctgggccgcagcgtgctttacctcactggcgtcgatatttcccttgaggttgacacaggccgcacaggcaaggtgaagaggagccaaggggacaagaaaacctggcgctggggccctgagggctatggggctatcttgctggtgaactgtgaccgggacaatcacaggtccgcagagcctgacctcacccacagctggctgatgtcgctggctgacctgcaggacatgtccccaatgctgctgagctgcaatggccccgacaagctcttcgacagccacaagcttgtcttgaacgtgcccttttctgattccaaaagagtgagggtcttctgtgccaggggtcctgaggatgtgtgtgaggcctataggcatgtgctgggccaaaataaggtgtcctatgaggtaccccgcttgcatggggatgaggagcgcttcttcgtggaaggcctgtccttccctgatgccggcttcacaggactcatctccttccatgtcactctgctggacgactccaacgaggatttctcggcatcccctatcttcactgacactgtggtgttccgagtggcaccctggatcatgacgcccagcactctgccacccctagaggtgtatgtgtgccgtgtgaggaacaacacgtgttttgtggatgcggtggcagagctggccaggaaggccggctgcaagctgaccatctgcccacaggccgagaaccgcaacgaccgctggatccaggatgagatggagctgggctacgttcaggcgccgcacaagaccctcccggtggtctttgactccccaaggaatggggaactgcaggatttcccttacaaaagaatcctgggtccagattttggttacgtgactcgggaaccacgcgacaggtctgtgagtggcctggactcctttgggaacctggaggtcagccctccagtggtggccaatgggaaagagtaccccctggggaggatcctcattgggggcaacctgcctgggtcaagtggccgcagggtcacccaggtggtgcgggacttcctccatgcccagaaggtgcagccccccgtggagctctttgtggactggttggccgtgggccatgtggatgagtttctgagctttgtccctgcccccgatgggaagggcttccggatgctcctggccagccctggggcctgcttcaagctcttccaggaaaagcagaagtgtggccacgggagggccctcctgttccagggggttgttgatgatgagcaggtcaagaccatctccatcaaccaggtgctctccaataaagacctcatcaactacaataagtttgtgcagagctgcattgactggaaccgtgaggtgctgaagcgggagctgggcctggcagagtgtgacatcattgacatcccacagctcttcaagaccgagaggaaaaaagcaacggccttcttccctgacttggtgaacatgctggtgctggggaagcacctgggcatccccaagccctttgggcccatcatcaatggctgctgctgcctggaggagaaggtgcggtccctgctggagccgctgggcctccactgcaccttcattgatgacttcactccataccacatgctgcatggggaggcatacagcttagaatgtagacaacactgggggaaaaacttgtactttcgagttggtctgaagaagaagaagaagaagaagaaaaaggagaaggaagagggacaagaagaagaagaggaggaagaggaagaggaagaagaagaagaagaagaacaagaagaagaaaaggaagaagaggaagaggaagaagaagaagaagaagaagaagaaaaggaagaagaggaagaggaagaagaagaagaagaagaagaagaagaagaagaagaagaagaagaagaagaagaagaagaagaagaagaaagaagaagaggaagaagaattgatgtttgtcaggcagttcctccatccagtcagagctgtagtggtcttggttgtaaatccaagtcatga

SEQ ID NO: 140713 - DNA, 993 bp, Homo sapiens; identical to SEQ ID NO: 118017

SEQ ID NO: 140714 - DNA, 248 bp, Homo sapiens
atgacagcaaagtgtgtgtgtggttggggggtgggggagagagagcgagagaaagagagagaagaagaagaagaagaagaagaagaagaagaagaagaagaagaagaagaagaagaagaagaagaagaagaagaagaagaagaagaagaagaagaagaagaagaagaagaagaagaagaagaagaagaagaagaagaagaagaagaagaagaagaagaagaagaagaaaaatttaaagaatctatgaa

SEQ ID NO: 140715 - DNA, 1104 bp, Homo sapiens
acccccgttggcaacagcggcgacagcgtgcggggtggccgctcggagcagcccaaggcgcggcaacgacggaagccgcgcgtgctcttttcgcaggcgcaggtgctggccctggagcggcgcttcaagcagcagcggtacctgtcagcgcccgagcgcgagcacctggccagcgcgctgcagctcacgtccacgcaggtcaagatctggttccagaaccgacgctacaaatgcaagagacagcgccaggacaagtcgctggaactggctggccaccctctaacgccgcgccgagtagctgtgcccgtcctggtgcgcgatggcaagccctgcctgggccccgggcccggcgcacctgccttccccagcccctacagtgcagcagtgtcgccctactcttgctacggaggctacagcggagcaccctacggcgcaggctacggcacctgctacgcgggcgcgccctcgggtcctgcgccacacacaccactggccagcgcgggcttcggacacggtggccagaatgccaccccgcagggccatctggcagccacgctgcagggtgtcagggcctggcttccccaaacccctaagcagccgcagaagcgctcccgagctgccttctcccacactcaggtgatcgagttggagaggaagttcagccatcagaagtacctgtcggcccctgaacgggcccacctggccaagaacctcaagctcacggagacccaagtgaagatatggttccagaacagacgctataagactaagcgaaagcagctctcctcggagctgggagacttggagaagcactcctctttgccggccctgaaagaggaggccttctcccgggcctccctggtctccgtgtataacagctatccttactacccatacctgtactgcaagaagaaggagaaggagaaggaggaggaggaggaggaggggaagaagaagaagaagaagaagaagaagaagaagaagaagaagaagaagaagaagaagaagaagaagaagaagaggaggaggaagaagaagaaggagcagcagctggaaatatttgggtatagctttgatgtgaagattaaatgttaccatgtatag

SEQ ID NO: 140716 - DNA, 843 bp, Homo sapiens
ggctggggcaaagttctccagaaggctgtgtatgctctgagccagcttccaatatacggtactgcttttcccatagccaggatatgcagagtccaggaatcaggggtggaagtggaagtggcacctcttattatcacccctagtgacccactagcaaaatttttgctacctggacacttggggttcctcctacctttaagtcaacaggctaagaagggagttacaatgttggctggggtgactgacccagactatcaagatgaaaccagtctactactccacaacggagagtgtcaacttcaacttaagtgtggccttcctgtgaaggaaagtcagttgacgagtagcaagaaccgcttcatacttcaggcacatccaacatgggaggggagaaaggaaagagaaggagagagagagagagagaaagagagagagaagaagaagaagaggaagaagaaggagaagaggaagaagaagaagaaagaagaagaagaagaagaagaagaagaagaagaagaagaagaagaagaagaagaagaagaagaagaaagaaagaaggagaagaaggagaagaaggagaaggagaaggaagaaggagaagaaggagaaggagaaggaagaaggaagaaggaagaaggagaaggagaaggagaaggagaagaagaagaagaagaagaagaagaagaagaagaagaagaagaagaagaagaagaagaagaagaagaagaagaagaagaagaaaagagagagagagagagagagagaatgaacatgaaccaaagaagaaagaggaagagtcattctgagcatccaatatatgtgtcctcctattacatcacatag

SEQ ID NO: 140717 - DNA, 684 bp, Homo sapiens
aaaatagaaatcacagcttagtggtcacccttagctagcttaggtgtgaaaatcccatttcttcccatgtgggccatgtgggtgtatctctggcacacacaagaggtctgtttagccgccttattttggcagatagggaagacatatctgaaaattggtgctcactcgtatgttgtgtgtgtgtgtgtgtgtgtgtgtgtgtgtggtggctttgtatctccctgtttccaggggacatgatgaccttgttgatgaaaaaagacactctgacagaagaggagactcatgttttatatatcagaaacagtattagccatagactctattcaccaacttggattcatccacagagacatcaaaccagacaaccttcttttggacagcaagggccatgtgaaactttctgactttggtctttgcacaggactgaaaaaagcacataggacagaattttataggaatctgaaccacagcctccccagtgatttcactttccagaacatgaattccaaaaggaaagcagaaacctggaaaagaaatagacgtcagctagccttctccacagtaggcactcctgactacattgctcctgaggtgttcatgcagaccgggtacaacaagctctgtgattggtggtcgcttggggtgatcatgtatgagatgctcatcggtaagttgcatggt

SEQ ID NO: 140718 - DNA, 520 bp, Homo sapiens
aaatcaaaagcattgatgatacctcaaacttcgatgagtttccagaatctgatattcttaagccaacagtcctgtcttcagcaccgtgagcagtccattggaggcaaggcagtgaatcaactctcacatctatttctttcccagtggccacaagtaatcatcctgagactgactacaagaacaaagactgggtcttcatcaattacacgtacaagcgctttgagggcctgactgcaaggggggcaataccttcctacatgaaagcagcaaaatagtactcttgccacggaatcctatgtggagcagagttctttgtataacatcatgctttttcctctcacactctttgaagagcttccaagaagttgatggaacccaccaatatgtcatagtaaagtctcctgaaatgtggtagtaagaggattttcttccataatgcatctgaaaaactgtaaacaaagacaaccatttctactacgtcggccataaacagctatcctgctttggaagagaagcatcg

SEQ ID NO: 140719 - DNA, 405 bp, Homo sapiens; identical to SEQ ID NO: 120995

SEQ ID NO: 140720 - DNA, 417 bp, Homo sapiens
atgggcctgggggttggctctccctcagtcccttggtcctgtgagctctggaaagctgaaaggaagaagaagaagaagaagaagaagaagaagaagaagaagaagaagaagaagaagaagaagaagaagaagaagaagaagaagaagaagaagaagaagaagaagaagaagaaggaggaggaggaggaggaggaggaggaggaagaagagggagaagaagaagagttgggtagactgcacggaggaagtggcaaagtacgtgggcttggcttcactgagaatcagcagggttccaccaacagacagcaccaaagagaagacaatagaaaaagtaaacagaagaaaataaacaacacgaagcctgaggccacagaaagcctcattgttaatggaataacaatcacagcacctgcctga

SEQ ID NO: 140721 - DNA, 1446 bp, Homo sapiens; identical to SEQ ID NO: 119442

SEQ ID NO: 140722 - DNA, 693 bp, Homo sapiens; identical to SEQ ID NO: 124159

SEQ ID NO: 140723 - DNA, 711 bp, Homo sapiens
atgagtgcgacagatgtatggctgtgttgtcgtcgataccgagagctcagtgcagtctatgatcccatgctggaggaggagaaacgtcataatactttaaatgaaggaagtaatgatcatgtcctagtcctcagccagcaggtggcgctcaaagctaacaaggcatttcctgcttatccaagttcaccatttcaggtcaccactggatatcagttgcctgtatataattatcaggcatttcctgcttatccaagttcaccatttcaggtcaccactggatatcagttgcctgtatataattatcagtttcagaacgtctggcggaatccaaacactgaaacctacctgcagccccaaatcacgccgaatcctgtaactcagcacgttcaggaatatcctacttatcccgattcagcatttcaggtcaccactggatatcagttgcctgtatataattatcagccatttcctgcttatccaagttcaccatttcaggtcactgctggatatcagttgcctgtatataattatcagaataaagaagaagaagaagaggaagaaggggaagaagaagagaaggaagcagaagaggaagaagaagaaggagaagaggaagaagaagaagaagcagaagaagaagaagaggaggaagaagaagaagaagagagaaaagcatgtttttcaggttaccctcaagaagttggtgtctag

SEQ ID NO: 140724 - DNA, 1233 bp, Homo sapiens; identical to SEQ ID NO: 118061

SEQ ID NO: 140725 - DNA, 369 bp, Homo sapiens
atgtcttacgtggcagcagttatgttcttctgttcagtattaggaaagttccagatgaacttggaggaggaagtggaaaaaagaagaaggaagaagaaagacaaaaagaaagagaaggaggaggaggaggagaaggagaaagaaggagaagaaggagaaggagaagaagaagaagaagaagaagaagaagaagaagaagaagaagaagaagaagaagaagaagaagggaagaagaagaagaagaaggagaagaagaggaagaagaagaagaagagaagaagaagaaaaggaggaggacactttattgcatgtaaattaaaatacttatggacagtgagtggccacatcttatgccctaatacgaattag

SEQ ID NO: 140726 - DNA, 1206 bp, Homo sapiens
atgagcaaagaggggaacaatagacactgggaccgacttgagggtggagggtggaggagggtgagggtcgaaaaacgacttttcagagactacccttcctcacaccccagaggtgcagaggccttcacatctcctgacagcattggcaggtgcacgttgagatttccgggcctccagatggggctgcaccaaccggccctaattgccattttgagaagcggagcagacctgtctcatctggaagggcccatgctggaagcgggagcgtctgcgtgtgccccagctgtctctcctggtgatcaagcattacaacagcacccaggagagggcaggaaggtgccgggaaaaagaagaagaagaaaggaagaagaagaagaggaggaggaggagaagaggaagaagaagaagaagaaagaagaagaagaagaagaggaagaagaagaagaagaggaagaagaagaagagaagaagaagaagaagaagaagaagaagaagaagaagaagaagaagaagaagaagaagaagaagaagaagaagaagaagaagaaacaaacaaacaaaagggccaccgtgcaaaaatctaatgttggtcttctgccctcagaacaaagccccttctccctgtctccaaattgcagcagagttcagctgggcatgggcaaggtagctgatcgcagaagcagagtgggaaggctagtcttctcttccttcagtggtgcagaaatccagaagactgtaatggattctgctccaggctcagtcctcatgctggttgtaagccagctcattgcagttctggctgataccaaggtagatgccacaagtaccagaattttcaaggccctggagctgctggaggggcttccgcagactccagggatgttgcagaacggagctgaggcctctcgtggccagttttctgttctgtcatcaaggtcatacaagacagaagctgatggactgaacttacagcacatttctgtctcctggctgggatggaggatggaggatggagggaaagtggaggaaggatttgagagcctctgcttccatggagctcataaatcacagctgacaaagcaggggctctccgctgtgtacaccttttgtttcaggtgcaaatggtcactggaatatgcatgtggactttgtgtggttaagaaactacatacgcacagtggagtagttactgggccagagagctga

SEQ ID NO: 140727 - DNA, 990 bp, Homo sapiens
atgtcagcggtatatgggcatgtcagcggtatatggacatctcagcgatatatgaacatgtcagcggtatatggacatgtcagcagtatatggacatctcagcggtatatggacatgtcagcagtatatgaacatctcagcggtatatggacatgtcagcggtatatggacatctcagtggtatatggacatctcagtggtatatggacatctcagtggtatatggctcataaagagctctcacaatcagtgtcccctcatcactcagaatcatcctgtggcctcgatatcactattgtccacatttgcagaacaggaccactcttctcctcaacccccatgtcaatggcagaatgggaattaatgcccacctacgggttgcaagtgcttacaggagctgggcaagcaacgaagctattacatgatgatgatgaagaagaaagaagaggaagaggaagaggaagaggaagaagaagaagaaagaagaggaagaagaagaagaagaagaagaacaagaagaagaagaagaagaagaagaagaagaagaagaagaagaagaagaagaagaaggagaaggagaagaagaagaaaaaaaaaacccaccagcagggtactgcccagctttccccccacaccctgcatgcccccaactctgtacctctgtgcctagatgaggctgtttgcttctccctgtctgtcctcatcatcttcccccctttccaaatcctgttagataaggtagcaaaattccttcagaggtctcctccttttcccctctcctcctcctccttcttgttcttcatcactaccaccccgaccaccactctcaccaccatcaccatcaccaccatcatcaccatcatcaccatcaccaccatcatcatcgtcaccattgccaccatcatcaccatcaaccccatcatcaccatcaccaccatcagcaccatcaccaccaccaccacatcaccattatcaccaccaccaccataa

SEQ ID NO: 140728 - DNA, 591 bp, Homo sapiens; identical to SEQ ID NO: 120429

SEQ ID NO: 140729 - DNA, 1407 bp, Homo sapiens
atggagatgatatggccatctaaagggatgccattcacatccacgtcctacagcaacaaggaaagcagcctcttgtccgtggtccagactagttcatacagtcacacgcacactcggggctccagtgaagaagttgaatctctgaatagaccaataacaggctctgaaattgtggcaataatcaatagcttaccaaccaaaaagagtccaggtccagatggattcacagccgaattctaccagaggtacaaggaggagctgagaataaaatacctaggaatccaacttacaagggacgtgaaggacctcttcaaggagaactacaaaccacccctcaatgaaataaaagaggatacaaagaaatggaagaacattccatgctcatgggtaggaagaatcaatatcgtgaaaatggccatactgcccaagattattgttgaagatgccctgcagatttactatgatatggttttggtctgtgtcggtgttggtgtatcttgtcgaattgtaatctccagtttggaggttctagaaagcagacgtgggcagcgcattttcttccttgttcaggcagagcaagttttgtgggcttttaaagaggttagctctaactgtaatgacaaatctacactgagaggatctgttgtgaaattgcaatgcacttcaggaacatcagcatttgacatatttcaagttggcagcagagtcttgggggagcacagattacccagtgttcattcagcaacttatatgagccttacatattttgagcttgcaggtcttctggagaaatcaagtcagttggttggctctacaggtgtagaagacatcgtggccataatgattcctgagccaaaagggaaggagatagtaagcctgctggaaagaaacatcaccgtgacaatgtacatcaccatcggaacccggaacttgcagaaatatgaaagatggaaaaagaagagaaccaaagggctagagtatcaagaatttggatttgacgatgttaaatttagaagccttttagatattgaagcagagatgccagaccttcacaggctacccagaaacatgcatgcttccagtccctccaagagaactgctcgtggaaggaataaaaacaagagcagcagattaaccatgtttggagtggaaatccaagaagaagaagaagaagaagaagaagaagaagaaaagaagaaaagaagaaaagaagaagaagaagaagaagaagaagaagaagaagaagaagaagaagaagaagaagaagaagaagaagaagaagaagaagaagaaggagaagaagaagaagaagaagaggaggaagaagaagaagaagaaaacatttccatcatattggttcctagcaaagctaaagaaagagctttatcagttcaggagctacaataa

SEQ ID NO: 140730 - DNA, 552 bp, Homo sapiens
atgctgttgctacttctgcttttgctgttgttgttgttgttattgctgctgctattgctgctgttttggattcccagccagcaccttctcaggggcagcatccatccccctgcttcctcatccccagcattatcacgtaaggaagaagagaaaaaaagaaagaagaaagaagaagaagaagaagaagaagaagaagaagaagaagaagaagaagaagaagaagaagaagaagacgacgacgacaatactaacagcccaactccagatgcttatcaagtcaatccagatgtaccgtgccctagtgaggtgaagagaagcactaccttagaaagagagaaaagcagtgatgatttccaatttgccaccaaggaagtgtgtgtttctcccagggtgcttgttggctctgctaaccttggtgtggaaggagcccgtgtgtggagtccctgtggggaaggccctgaagaacaagagctggagagaaacggagtgaagggaaacggtgtgctgagcagctgtgggaggctgaggagactggaagcggccagaggaaaa

SEQ ID NO: 140731 - DNA, 1684 bp, Homo sapiens
atgggtctggccgtcgagcagcttgtccccaccatggagctatgggcactgggctgtcacttgccgagtgccctggacgtgctagggctgaatggccccacctctaacactggggatcacatttcaagcactgccggatccggcttgcgcgccgggaaggctcccagcgaagtgagagcgaagcctccggcgaggctggaaatagcgccgcgcccgcccggcgccccgcccccggcccgtgccccgccccgccgtggtggcggctacggcggtggccgggccgggcggggatcgctccagcgatgcactcggccctcccgggggctcgcgggcgccgcgcccacgcgcgctctgcggctcccgcggcccctctggcagcgctctcagaaagagtcgctgctgggcgcggtccggcggccgcgggggtgggagcggtcgtggctggggctgcgccggtctcccggttcaggagagccggactccggcctgacgctaggctccagaccgcggccagtgctgccactgcctcggtgggtcgcacgcggcgccaacccgggaaaaggaccaggcgtcaccggggcgggccttgaccacagcggggcaggggcgcgcgcccaggacccgatgctgcgggggcgcagggccggtgaaaggcggaagattgatcctgaggaagattctgggatatccctgggcttcagctcgcgtggaattcggtcaaggccgcgagctgcctcaggcccgggtgtccgcatccatcctcaaatccctggggctctagattctgctgaaagtgccctgcgaacaggtgctcccttcaggacttcatcctggaagtttgtgtcgggtcaccagcctgagagcggggccaaccgaccctcttcatacacactcgggaaaacagcgtggagggtggaaccggcccacggccacacagcaccgggacagagtagggacaggaacacggggccctggattcgggtccttgttcttcctaagaagaggcagccccagcctgcaggggacaagcaggccttgggaaggggggcaactgctttctcacaggagctggaggaaactgtgcacacagtcaccttcaggtgcagattggaggagctgagtgcaagggccagggactcaagtgtcaggaaaaacagggcagtggaacccttattcatcctacatcccaaagctgttggagcagagcaggagagaagaagaaggagaaggagaaggagaagaagaagaagaagaagaagaagaagaagaagaagaagagaagaggaagaagaggaagaagaggaggaagaggaggaagaggaggaagaagaggaagaagaggaagaagaagaagaagaagaaaagaagaggaagaagaggaaaaagaaggaggaggagaagaagaggaagaagaagaagaagaagaagaagaagaagaagaagaagaagaagaagaagaagaagaagaagaagaagaagacgaggaagaagaagaagaagaagaagacttgttccacagaggagtttgggagccatctatactggcagagggacatccgagagcagcagacctggaatgccagccccatgtccagcacccgacctgggcccctgaaggtccacagaggtgaaggagaaactggaaaaaccgagatgcacaaaattttttccaaattggaagcag

SEQ ID NO: 140732 - DNA, 297 bp, Homo sapiens
cctactcagtgtgaagaggatgaggatgaggatgaaaatctttatgataatccggttccacttaaggaagaaggaagaagaagaaggaagaaggaagaagaaggagaaggagaaggaggagaaggaggagaaggagaaggagaaggaggagaaggagaaggagaaagagaaagagacgaagaggaggaggaggaggaaaaagaagaagaagaggaagaagaagaagaagaagaagaagaagaagaagaagaagaagaagaagaaaaagaagaagaagaagaagaagaaaggctatga

SEQ ID NO: 140733 - DNA, 462 bp, Homo sapiens
atgacaagctataagttcacagagcccaagaacgggatctggcaacttcatgaagcagcacaactagatacaacatataacaagttaaacaaaaaagaagaggaagaggaagaaggaggaagaagaagaggaagaagaggaagaagaaagaagaaggagaaggagaagaagaagaagaagaagaagaagaagaagaagaagaagaagaagaagaagaagaagaagaagaagaagaagaagaagaagaagaagaaggagtcatacttctatccccaaagaatctactcttctccagtctcaatctgtgggcttaggatgagggtccctgactttgttccagaagaacaacaagtgaagcaagagagaggcctgagacaatcaaggtattccatccttctagttcatctggggttggacagacacatgactcacaccagatcaagcagtcctaaacagatctaa

SEQ ID NO: 140734 - DNA, 1620 bp, Homo sapiens; identical to SEQ ID NO: 120607

SEQ ID NO: 140735 - DNA, 338 bp, Homo sapiens; identical to SEQ ID NO: 125391

SEQ ID NO: 140736 - DNA, 801 bp, Homo sapiens
atggttgaccagaggcatctggtactcacctcctccaccaagaaaaaccaaaataacaacttccaagtttttgttattgaaaatgtggggagagaaccacagacagacaagatagcatcaccaggagctggtcagagctgcacagcctcggtcaccgcagacctgctgagccgggatctgcattttaccaaggttcccagctggtcttcagatggtccaccatactatccccctgcctgtcacttgatgtcagagccctacttctgggggtcctgctgctatgatacaccgatcaaaaccaagactaccaacgaagaagaagaaggagaaggagaggaagaggaagaggaagaagaagaagaggaagatgaagaagaggaagaagaaaaagaagaagaagaagaggaagaggaagaaggagaaggagaagaagaagaagaagaagaagaagaagaagaagaagaagaagaagaagaagaagaagaagaagaagaagaagaagaggaagaagaggaagaagaagaagaaagcctagaggcggaaggtgaacaagtgtccttggagttgccaataggggggaatttgcacagatttggcagctgtttctggtggtcatcattagttcccagtgcatctatgggatctgaggaaaccaatgctaaaagaggagatgaggacacagacatgcacagagggagggtgcagggagaaaaagccatctgcaagccaaggagaggggcctcagaagagaccaacccccctgacaccttgatcttggacttccagcctccagaactgtga

SEQ ID NO: 140737 - DNA, 1218 bp, Homo sapiens
atggctcacaacctcctcctcatttctgaagacctcaggagcgtccgatgtgggaggatccatcagaatcggccaaacagtgctgagagattcaacttggcaggtgctgtcctgggctcccctggtttcacctctggccgccactactgggagaccaagataccagtgaaatatccccctcagtcttctgccccaggaaagccgaccttccctgttgtcgttcagggcaccctgagtggggcagcagtgctgcagctggccaccttcagggaggtggaacccaacctggaggaggaaggccctgcagaaccctggacaggggatgagggagacctaaaggtgaggttctgcctttctgtgcccacatgggaagtacggttcctagggtccaggtcttcagccgtgagtcggaaccccagctgggagggaggtacagcgtcagaggctcccctcgcctgcatggcagcagaggaaacttgcatcgaaggggccagtactgtggatgcgagggagccattcttggaggtccttgtcctgctcaggtatccatttcctcagggtccatttgagggccctcagagggccttcaaaaccaaaaacaaaacacagggtctgcagtatcttaggatgttgtctccaagaggctctaagaaaagccagtgtaaagtcactgaattcttggagttggtccaggaccaaggtaaagacaatcacagagcaattagtcctcaaagaggaagaagaagaagaagaagaagaagaaggagaaggagaaggagaaggagatggagaaggagaaggagaaggagaaggaggaagaagaagaagaagaagaagaagaagaagaagaagaagaagaagaagaagaagaagaagaagaagaagaagaagaagaagaagaaggggaagaaggggaagaaggggaagaaggggaaggggaagaaggagaagaaggagaagaatgagaagaagaaagaagaaggaagaagaaggaagaagaaggaagaagaggaagaagaggaagaagaggaagaagaagaagaagaggaagaagaagaggaagaagaagaaagaagaagaagaagaagaagaagaagaagaagaagaagaagaagaagaagaagaagaagttgttgttgttattgggccagagaaatgctccaagaattcactacaaaatgtggtcttgttctttggcacaacccactaggcagctga

SEQ ID NO: 140738 - DNA, 571 bp, Homo sapiens
atgcagatcccatctctacataaattgaagaaagaagaagaagaggaagaggaagaggaggaagaggaagaaagaagaagaagaataggaagaggaagagagaagaaagaagaagaagaagaagaagaagaagaagaagaagaagaagaagaagaagaagaaggagaagaagaagaaagaagaaaagaagaagaaagaagaggaagaagaagaaagaagaagaaagaaaaagaaagaaagaaaagaagaagaagaggaagaagaaaggaagaagaagaaggagaagaaggagaggaagaagaagaggaagaagaagaagaaagaagaaaagaagaagaagaggaagaagaagaaggagaagaggaagaagaagaagaagagtcgtgcctcatggtgcacacctgtaatcccagctactcaggggatcgcttcacccaggagtttgaggctgcagtgaggtccctcacttgggctctgcttttggtggaaattgaacttaaacacccacctaaacactcaacaggaaatctctgcttctccatcaaagagaataaaaagtctcatccttccc

SEQ ID NO: 140739 - DNA, 1365 bp, Homo sapiens
atgaaacaggatcctcatctctcaccttatacaaaagtcaactcaagatggatcaacgacttaagtctaagacctgaaaccataaaaattctagaagataacatcagaaaaaccctcctagacattggcttaggcaaagacttcatgacaaagaacctaaaagcaaatacaacaaaaacaatgatgaatagatgggatttgattaaactaaaaagcttctgcacagcaaaagaaataatcatcagagtaaacagacaacccacagaatgggagaaaatcttcacaaactatgcatccgacaaaggactaatatccagaatccacaaggaactcaaacaaatcagcaagaaaaaaccaaaccatcctatcgaaaagtgggctaagaacatgaatagacaattctcaaaagaagatatacaaatggcaaacaaacataggaaaaaatgctcagaatcactcgtgatcaggaagatgcaaatcaaaaccacaatgggataccatctcataccagttagaatggcaatcattaaaaagtcaggaaacaacaggctgtctcttcttcctccaccctgtctcttcctcctcctttctcccatgcgatgcgaatatccaggaaaaattggaaactgctgctttttaggtccctcttctgcaggtctgctggagtttgctgaacgtccactccagaccctgttttcctgggtatcaccagtgtgggctgcagaacatcaaagattgcttcctgctccttcctgtggaagcttcaccccagaggggcacatgccagatgccagccagagctctcctagctggcagtcaggaatgtctaagtctgttgaagctgcacccacagccaccctttcccccagagataccttgcccagtaaggaggaatctagagatgcagtctggctaaagtggctttgccatgctgtggtggattctgcccagtctgaaattcctggtggctttgtttatactgtgaggggaaaaccacctgctcaagctgcactaatggtagacgtccctcctcccaccaagctcaagcatcccaagtcgacttccatctgttgtgctgtcagtgagaattttaagcctgtggatcttagcttgcttggctccatggcgttgggacctactgagaaaggccagttgtctccctgccttcagtctgcttttgagtggagccaacggttctttctcactggggttccaggcactactgggaagaaaggaggaggagaaggaggaggaggagtaggagaaggagaaggagaaggagaagaagaagaagaagaagaagaagaagaagaagaagaagaagaagaagaagaagaagaagaagaagaagaagaagaattttaa

SEQ ID NO: 140740 - DNA, 539 bp, Homo sapiens
atgagggagctacagggccttgagggtccgaagatcctgagacagatgcttacatggacgttgagacaggaaagaatggtcaagacagactgggcgacagagcgagactccatctcaaaaaaaaagaaggaggaggaggagaagaggaagaagaagaaggagaagaagaagaagatgaggaggaggaggaggaagaagaagaaggagaagaagaagaagaagaagaagaagaagaagaagaagaagaagaagaagaagaagaagaagaagaagaaggaagaagaacaagaacaagaacaagaacaagaagaacaagaagaacaagaagaagaacaagaagaagacaacagagatgaggacaggggactccaaccatcctcgggcatctggaggcaccgcagcttccaaaccagcgccatttcaagggacatcgacacagcagccaagttcattggagctggggctgccacagttggggtggctggttctggggctgggattggaactgtgtttgggagcctcatcattggttatgccag

SEQ ID NO: 140741 - DNA, 646 bp, Homo sapiens
  misc_feature (1)...(646): n = a,t,c or g
ctgggtacaaaggtgggccccgtttccnnnnnnnnnnnnnnnnngaaaaaagaaaaaaaaagccatagaattttattaaggagagtaatctcggtcagattcaaagttctggagtgtaaaagctccgaagttccttttttattacaggctacccacctttctgttctgagacccctcaagagacatataagaaggtgatgaactggaaagaaactttgacttttcctccagaagttcccatctctgagaaagccaaggatctaattttgaggttctgctgtgaatgggaacatagaattggagctcctggagttgaggaaataaaaagtaactgtttttttgaaggcgttgactgggaacatatcagagagagacctgctgcaatatctattgaaatcaaaagcattgatgatacctcaaacttcgatgagtttccagaatctgatattcttaagccaacagtggccacaagtaatcatcctgagactgactacaagaacaaagactgggtcttcatcaattacacgtacaagcgctttgagggcctgactgcaaggggggcaataccttcctacatgaaagcagcaaaatagtactcttgccacggaatcctatgtggagcagagttctttgtataacatcatgc

SEQ ID NO: 140742 - DNA, 487 bp, Homo sapiens
accgcaattcccgggtcgacgatttcgtccgcggcgggggaccgggctgccttggcccctcagcgctcgcgtcttttccggcaggtgggaacgcttgctgttgtcctcacccgtaaccgcctgttgccccctgtctcagagtccctcacgcgtcccctcccgtctttggctcgttggctgccgccgccggggcttcgccagccttcaagtcgagactactggccgaaggggcgtctgcggctctccgccgtccccagccctgcctctccctgggctctgccatggcaatgacaggctcaacaccttgctcatccatgagtaaccacacaaaggaaagggtgacaatgaccaaagtgacactggagaatttttatagcaaccttatcgctcaacatgaagaacgagaaatgagacaaaagaagttagaaaaggtgatggaagaagaaggcctaaaagatgaggagaaacgactccggagatcagcaca

SEQ ID NO: 140743 - DNA, 2482 bp, Homo sapiens
tctaatgctggtggttatattcaatgggactgagagaatagaggatcttaggaaacctccatcctttgatgccattcttggtggggggcttagagtcctcttcttccagaacgaagcacatccccctttcgccagctggcgtaataacgaagaggcccgcaccgatcgcccttcccaacagttgcgcagcctgaatggcaaatggcgcctgatgcggtattttctccttacgcatctgtgcgaaacgctggtgaaagtaaaagatgctgaagatcagttgggtgcacgagtgggttacatcgaactggatctcaacagcggtaagatccttgagagttttcgccccgaagaacgttttccaatgatgagcacttttaaaggtctgctatgtggcgcggtattatcccgtattgacgccgggcaagagcaactcggtcgccgcatacactattctcagaatgacttgggtgagtactcaccagtcacagaaaagcatcttacggatggcatgacagtaagagaattatgcagtgctgccataaccatgagtgataacactgcggccaacttacttctgacaacgatcggaggacccaacgagctaaccgcttttttgcacaacatgggggatcatgtaactcgccttgatcgttcggaacccgagctgaatgaagccataccaaacgacgagcgtgacacccgatgcctgggacaatggcaacaacgttcgcaaactattaactggccaactactactctagctcccggcaccattaataactggatggaagcggataaagtctcacatccaggtcatgctgatataagaggtgggttcacagtcttgggcagctctgcccttgtggctttgcaagaaatacaaaaaactgtcagagactattatgaacacttctatgcatgcgagctagacaacatagtagaaatggaaaaattcctggaaacatacaaccacacaagattgaaccgagaagagattgaatccctgaacagaccaataacaagttccaaaattgaatcattaataaaaaccctacaaactagaaataacccaggaccagatgaatttacagccaaattctaccagatgtataaggaagagctgggcaatgaacagcatttatcaattctctcttccaaagagaaagaagagctaaaccatggcaaatctccaaatacaacctcctcaggagtaggaggagcagaaggagaaggagaagaagaagaagaagaagaagaagaagaagaagaagaagaagaagaagaggaagaagaggaagaagaagaagaagaagaagaagaagaagaagaagaagaagaagaagaagaaagaagaaagaagaaagaagaaagaagaaagaagaagaaagaagaagaaagaagaagaaagaagaagaaaagaagaagaaaattagccgggtctgtgggtcagacctcagcaggtggtgcctcgtgtgaggaacgctgcagcggcctggtgattgtgacgtatcccttgacatcgaaggtgaaaagggctgtgcagtcatcttcacaaccggcagaccaggagactccctctggtgcctatgctaccagggccctgggtttcaagcacaaaactgggcagccttttggggaagccactgagctagctgcagaaggatcacaactccttgcagcaagggaacaaaactggatgaacaatgagtttgatgaattggaagaagtaggcttcagaagaataaccagtttagagaagaacataaatgacctgatggagctgaaaaacacagcaagaaaacttcatgaagcatacacaagttgcaacagccaaatcgatcaagcagaagaaaggatatcagagattgaagatcaactcaatgaaataaagcaagaagacaagattagagaaaaaagagtgaaaagaaatgaacaaagtctccaagaaatgtgggactatgtgaaaataccaaatctaggtttgattgttgtacctgaaaatgatggggagaatggaaccaaattggaaaacactctgcaggatattatccaggagaacttccccaacctaacaaggcggatcaacattcaaattcaggaaaaacagagaacaccacaaagatactcctcgagaagagcaaacccaagacacataattgtcagattcaccaaggttgaaaagaaggcaaaaatgttaagggcagccagagagaaagagagagacagagagagagaagaagaagaagaggaagaagaagaagaagaagaagaagaagaagaagaagaagaagaagaagaagaagaacaagaagaagaagaggaagaggaagaggaagaggaagagaggaacagagaaagagagagagagagggagagagggagacttgctatgttacccagacttaagtgcagtcatgtgatcatagctcactgcagcctgaaattcctgggctcaagtgatccagttgccccagcctccgag

SEQ ID NO: 140744 - DNA, 1129 bp, Homo sapiens
taagggagatgtgggtgagtggctgtcagcaggaaaaggtgagagttcagctatgtttgcatctgagcaggaaatttccaaggatgagcagggaactccagtgctgggctcattttactgggaggtagatagccccaggaaggaatccagtcaggcctgggcaccaggccaggagtggataaagctagaaagagacaccacagaagagaagatgtttgaacagctgaagccaatcgaacctgtacagaagacgctcccatgggtgggcgaggtagctgccaccctgcaggaagccatgaagagagattgctggagggaggcacgggtgaagaagaagccagtcacctttgaggatgtggcagtgaatttcacccaggaagagtgggactgtctagatgccagccagagggtcctttaccaggatgttatgtcggaaacctttaagaatctaacatctgtggcctgggtccgaaaaaaagaagaagaagaagaagaagaagaagaagaagaagaagaagaagaagaagaagaagaggaagaggaagaagaagaggaagaggaagaggaagaggaagaggaagagggagaggaagaagaagaagaagaagaagaaggagagaacaacttggctatggggaaatcctttaacgtgattactgtgcatgtccgttccgaggaatgggatttaatgacctttgatgccaacccatatgacagcgtgaaaaaaatcaaagaacatgtccggtctaagaccaaggttcctgtgcaggaccaggttcttttgctgggctccaagatcttaaagccacggagaagcctctcatcttatggcactgacaaagagaagaccatccaccttaccctgaaagtggtgaagcccagtgatgaggagctgcccttgtttcttgtggagtcaggtgatgaggcaaagaggcacctcctccaggtgcgaaggtccagctcagtggcacaagtgaaagcaatgatcgagactaagacgggtataatccctgagacccagattgtgacttgcaatggaaagagactggaagatgggaagatgatggcagattacggcatcagaaagggcaacttactcttcctggcatcttattgtattggagggtga

SEQ ID NO: 140745 - DNA, 1072 bp, Homo sapiens
aaatcactgcatgatcttgagccagccattcaacacacttccccatctgcaggagtaagtgatgggaaatggagtctttctccctcacacagaggttgaagaatggtagtaaatggctgattatggtctctgagtaacctcttttttttttttttttttttttcatttttttccgcccatcaataaggctttccagtacaacatggtaacttgcttttttctttttattcctttgcatcattcatatattatactatgcctttaatgaatatggattttcttttttctttgttggttatttagttttaaccaagattgacaactacatcttcttagtcttcttagaatttgagttttcacctgatacactggtctttctctctcttttcccacagggtgtattctacccactggaaaacctcaccgacccccccttctcaccagttccttttgtgctcccagaacgcagcaactccatgctctacattggaatcgccgagtattctacattttccctgaaaagacaatccacgtaaaatcctaacagtgacataatggtaaccttgtgatctcccttcaccaactcacgcctcacaatctttatttctttctcggaatgtgggcagattgcagagatctacatcttgtcccagcccttcatggtgaggatcatggccacagagcctcccataatcaatctacaaccaggcaatttcaccctggacatcctgagccgagatcacaccactgcactctagcctgggcgacaagagtgaaactccatctgaaaaagaagaagaaagaagaagaagaagaagaagaagaagaagaagaagaagaagaagaagaagaagaagaagaagaagaggaagaagaagaggaagaagaagaggaagaagaagaagaaggagaagaagaagaagaagaagaagaagaagaagaagaagaagaagaagaagaagaagaaggggaggaggaggaggaagaggaagaggaagaagaagaagaagaagatgaggaggaggaggaggaggaagaggaagaggaagaagaagaagaagaactgctctag

SEQ ID NO: 140746 - DNA, 2370 bp, Homo sapiens
agcttccatctccaccaacaaccattcagggaggaattcacacttccacatggaggcttttctttcagaaaaccagtcaaggattttcagagaaacaagaattgcagcccttcctctttgggctgttcctgtccatgtacctggtcactgtgctcgggaacctgctcatcatcctggccgcaatctcagactcctgcctccacacccccatgtacttctttctctccaacctgtccttcgtagatatctgttttgcctccaccatggtcccaaagatgttggtgaacatccagacacagagcaaagtcattacctatgcaggttgcatcacccagatgtgcttttttgtactctttatagtgttggacagcttactcctgaccgtgatggcctatgaccagtttgtggccatctgtcaccccctgcactacacggtcatcatgagccctcagctctgtggactgctggttctggtgtcctggatcatgagtgtcctaaactccatgttacaaagcttagtgacattgcagttgtccttctgcacagacttggaaatccctcactttttctgtgaacttaatgagatgatccaccttgcctgttctgacacctttgtgaacaacatggtgatgcattttgcagctgtgctgctggacggtggtcctctcgttgggatcctttattcttactgtaggatagtttcctccatacgtgcaatctcgtcaactcaggggaagtacaaggcactttccacctgtgcatctcacctctcagttgtctccatattttatgacagagcttcagtttccatcatcaaccatccagggaggaattcatacatccacatggacgacaccttccttccagaaaatccatcaggtcacatcaacaagatgaaaccagggaatgatacacgaatttcagaatttcttcttctaggactttcagcagaaccagaattgcagcccttcttctttgggctgttcctgtccatgtacctggtcaccgtgctcgggaacctgctcatcatcctggccacaatctcagactcccacctccacacccccatgtacttcttcctctccaacctgtcctttgcagatatcagttttgtgtctaccactgtcccgaagatgctggtgaatatccagacgcagagcagagtcatcacctatgcaggctgcatcacccagatgtgctttttcctactatttgcagtgttggacagccttctcctagctgtgatggcctatgatcgcctgggcaacagagcaagactctgtctcaaaaaaaaaaaaagagaagaagaaagaagaagaagaagaagaagaagaagaagaagaagaagaagaagaagaagaagaagaagaagaagaagaagaagaagaagaagaagaaaagaagaggaagaaaagaaaaatgccaaagtcacatcacaagatgaaatcatggaacaatacaataattttagaatttcttctcctgggaatttcagaggaaccagaattgcaggccttcctctttgggctgttcctgtccatgtacctggtcactgtgctcgggaacctgctcatcatcctggccacaatctcagactcccacctccacacccccatgtacttcttcctctccaacctgtccttcgtagacatctgttttgtctctaccactgtcccgaagatgctggtgaacatccagacacacaacaaagtcatcacctatgcaggctgcatcacccagatgtgctttttcttactctttgtaggattggataacttccttctgaccgtgatggcctatgaccggtttgtggccatctgtcaccctctgcactacatggtcattatgaaccctcaactctgtggactgctggttctggcatcctggatcatgagtgttctgaattccatgttacaaagcttaatggtgttgccactgcccttttgtacacacatggaaatccctcattttttctgtgaaattaatcaggtggtccaccttgcctgttctgacacctttcttaatgacatagtgatgtattttgcagtagcgctgctgggcggtggtcccctcactgggatcctgtactcttactctaagatagtttcctccatacgtgcaatctcatcagctcaggggaagtataaggcattttccacctgtgcatctcacctctcagttgtctccttattttatggtacatgcttaggggtgtaccttagttctgctgccacccacaattcacacacaggtgctgcagcctcagtgatgtacactgtggtcacccccatgctgaaccccttcatctacagtctgaggaataaacacataaagggtgctatgaaaacattcttcagaggaaagcaatag

SEQ ID NO: 140747 - DNA, 2037 bp, Homo sapiens
atggcgccatattgtagcaggacgagccgcagacaaaactcctcagacaccgagttaaagaaggaatgggtttattcggccgggggcatcggcaagactcctgtgtcaggagccgagctcccccaccagccaacagtagtagctgaaaagcgagagcacactgatgaagaacactgcgggcacaaagaaaaggaaaaaacgtggcgttctcaggaattgacgtcctccaggcccccagatgagggtagtgagcaccctgagagccagctggactcccctcttggtgtgttactgcacagccacagcctctggagtggaatgatagctgatgacatcattttaaaagtcacagtactacagagatgtttggacactcatcagaggcagacctgctgtgggaaagtcaaggccttggctgatgcaaaaataattgcagtttttgccattacaataattcttaccaagaactattcacattggaccaaagccaattgtaatgatccatgtgatggagagagccagaatgctatgaaagtggccttgaccagaaataggtcatttgatccttggctcattgacatctccatagattttcggtgtacaatgttcggtctgatgtgcaaggtacaacttttccagagaagaagaggaggggggcggggaggagcaggaggaggaggaaagaaggaggagaaggagaaggagaaggagaaggagaggaagaggaagaggaagaggaagaggaagaagaagaagaagaagaagaagaagaagaagaagaagaagaagaagaagaagaagaagaagaagaagaagaagaagaagaagaagaagaagaaaaggaagaagaagaaactgtctctacaccttcattctcaggacaagttcattgtctggcaccaagctccttgggacgcggaggttggggtcatggcgccccgaagcctcctcctgctgctctcaggggccctggccctgaccgatacttgggcgggctcccactccttgaggtatttcagcaccgctgtgtcgcggcccggccgcggggagccccgctacatcgccgtggagtacgtagacgacacgcaattcctgcggttcgacagcgacgccgcgattccgaggatggagccgcgggagccgtgggtggagcaagaggggccgcagtattgggagtggaccacagggtacgccaaggccaacgcacagactgaccgagtggccctgaggaacctgctccgccgctacaaccagagcgaggctgggtctcacaccctccagggaatgaatggctgcgacatggggcccgacggacgcctcctccgcgggtatcaccagcacgcgtacgacggcaaggattacatctccctgaacgaggacctgcgctcctggaccgcggcggacaccgtggctcagatcacccagcgcttctatgaggcagaggaatatgcagaggagttcaggacctacctggagggcgagtgcctggagttgctccgcagatacttggagaatgggaaggagacgctacagcgcgcagatcctccaaaggcacacgttgcccaccaccccatctctgaccatgaggccaccctgaggtgctgggccctgggcttctaccctgcggagatcacgctgacctggcagcgggatggggaggaacagacccaggacacagagcttgtggagaccaggcctgcaggggatggaaccttccagaagtgggccgctgtggtggtgcctcctggagaggaacagagatacacatgccatgtgcagcacgaggggctgccccagcccctcatcctgagatgggagcagtctccccagcccaccatccccatcgtgggcatcgttgctggccttgttgtccttggagctgtggtcactggagctgtggtcgctgctgtgatgtggaggaagaagagctcaggtgattggattgtggctgcccacagcgagagaggattttccccgctcagtcactcacatgccaatcccttccagaaacaccctcgcaggcacacccagaaataa

SEQ ID NO: 140748 - DNA, 1896 bp, Homo sapiens
cccatggggaagggagaagaagaagaagaagaagaagaagaagaagaagaagaagaagaagaagaggaagaagaagaagaagaaaagattagctgggcatggtggcacgtgcctgtagtcctgtagtcgtaaccgcctgttgccccctgtctcagagtccctcacgcgtcccctcccgtctttggctcgttggctgccgccgccggggcttcgccagccttcaagtcgagactactggccgaaggggcgtctgcggctctccgccgtccccagccctgcctctccctgggctctggtgagttgcttgctgccgccgtcttcatcacaggaaaaggcagggaaaattcttaagaagagagtggaaaagcaacagccagaggaaaaagtcggtaagggcttagaggaaagtctgtgtccttgctcatccatgagtaaccacacaaaggaaagggtgacaatgaccaaagtgacactggagaatttttatagcaaccttatcgctcaacatgaagaacgagaaatgaggtaaagaattttgtttgaaaaaattgaagaagaaggcctaaaagatgaggaggtaattaatattggcaatgttttccttcggaaggaaacagagtttcttcgtttgaagagaacaagacttggattggaagattttgagtccttaaaagtaataggcagaggagcatttggtgaggtaaaaatcacagctacttgtcaagtgggacatgtgtatgcaatgaaaatactccgtaaagcagatatgcttgaaaaagagcaggtaaagcacagttgtagcagtgctttcattctagtggaggcagacagtttgtgggttgtgaaaatgttctatagttttcaggataagctaaacctctacctaatcatggagttcctgcctggaggtaattacttgacgatgaaaggtcataaagacactctgacagaagaggagactcagttttatatagcagaaacagtattagccatagactctattcaccaacttggattcatccacagagacatcaaaccagacaaccttcttttggacagcaaggtattgggggggcattggcatgaactgcccttccaggagcccagacttaggggcttcctgagccagtgctgtgacaccccctttagggctctgcggtttctggcatctccaagcttccaggtgccactgcattcccctcgtccagatctttgcacaggactgaaaaaagcacataggacagaattttataggaatctgaaccacagcctccccagtgatttcagtaagtggtaacaattacgttagcctaaagcagaaacctggaaaagaaatagacgtcagctagtaagtaatatctgtggcttctgaaagaatgcagaaaatgtttctcttggtcaggtgcggtggctcacacctgtaatcccctacattgctcctgaggtgttcatgcagaccgggtacaacaagctctgtgattggtggtcgcttggggtgatcatgtatgagatgctcatcggtaagttgcatggtttcagaggacttcctcaagagacatataagaaggtgatgaactggaaagaaactttgacttttcctccagaagttcccatctctgagaaagccaaggatctaattttgaggtattagagaacatccctccaccttcaaatcaaaagcattgatgatacctcaaacttcgatgagtttccagaatctgatattcttaagccaacaggtaacaccaccagcattgtctcctgcgactacaagaacaaagactgggtcttcatcaattacacgtacaagcgctttgagggcctgactgcaaggggggcaataccttcctacatgaaagcagcaaaatagtactcttgccacggaatcctatgtgg

SEQ ID NO: 140749 - DNA, 929 bp, Homo sapiens
cgtcccggaattctcgggtcgacgatttcgtgggagagctgccgtccctgacctcgacctgagacgtggaggagggacagggaaaaagccttcttctcgcagctgcaggttgccccaccgagggcatttttccgcaccgagggggcggggggcagaatgcacgccagaaaacctaagtgcgctgggtttaaaatagcaacaacaacaaaaattacaaataaccaaaaaacagcataagaattaaaaacagttatattccaatgtttttaatacttggttcacattttggatgctctccccagggatccgacggcgctgcggaggcggcagcgatgtttgggatcctaaagaaagcatcagaccagactcaggtctggacgtccctcaagtggccccggaggtaccgatattagtgtcaccgccgtcagtgcccctgcccagaaataaaacctttgttctgagagaaattgaaaagctggaaaatatggagtaggcgatgtgaagagaaactacagggaatgtagaggtcgggttttaaatgcgtatttcctcaaggatgttgtggaagcagagacaaggtggctggcctggagcaggctggaggacctccaaggatctccacagggaggcagttacatttaacaccctacctagcaaaagaagaaaagaacaaccccatcaaaacatccctggggttttaacaaaggaatccctgacaaaacgtgactgataactaggacagaactgaaaagtggaagtaaagtcaatcccgaccccccaggacgcctgggaactcagggaagcgcctccagaagggaacagctcagaaaccctgaccagacctggcggacaagaaccgtgtgggcgggggacaggaacgcccacccagaggccgggagagcatggtccaggactggcagccactaaca

SEQ ID NO: 140750 - DNA, 408 bp, Homo sapiens; identical to SEQ ID NO: 114871

SEQ ID NO: 140751 - DNA, 1059 bp, Homo sapiens; identical to SEQ ID NO: 114869

SEQ ID NO: 140752 - DNA, 346 bp, Homo sapiens
  misc_feature (1)...(346): n = a,t,c or g
ggataactaaaaaggagtgcataaaagaatattgtccaagttggcaccagaattggggagttttaaggggtttagaagcctggccgtcaatacccacaacagttatggaggcaagggaaacaggcccttgaaaataaggtaatgtggagtgagtagcctccataatgattaagaaggggacggatttaccctccactgtaagagttacccgaagcttggcctccatcatggtccagggggctttcgaggctattgggcagtgtcagtcttcagccactaagccgagaagatctgggaaggagtcaatcagagccttgggccagttggacagtccagtttccagtgn

SEQ ID NO: 140753 - DNA, 602 bp, Homo sapiens; identical to SEQ ID NO: 123812

SEQ ID NO: 140754 - DNA, 1812 bp, Homo sapiens
ccaaccagatttcagtggagtgaagttcaggaggcatggagctgacaaccatgaggcctcggcagccaccgccaccaccgccgccgccaccaccgtagcagcagcagcagcagcagcagcagcagcagcagcagcaagagtaactctgactggcagccactcccagagcccctggaactctggcccaaggctctctgactccttcccagatcttctcagcttagcggctgaagactgacgctgccggatcgcctcggaagcccccagaccatcacggatgccgagcttcgggtaactcttacagtggaggctcccttattaggtcgagacattttaactaaattttctgcttctctgactattcctgggctacagccacacctcattgctgccttttcccccagttcaaagcctccttcacctcctccccttgtatctccacaccttaacccacaagtatgggatacctctactccctccttggcgaccgatcatgcaccccttaccatctcattaaaacctaatcacccttaccctactcaacgccaatatcccatcctgcagcacgctttaaaaggattaaagcctgttatcactcacctgctacagcatggccttttaaagcctataaactccccttacaattcccccattttatctgtccaaaaaccggacaagccttacagctccttcaggtatgtatactcactctttgttgagtctcccacaattaccattgttcctggtccagacttcaatctggcctcccacattattcctgatactacacctgacccctatgactgtatctctctgatccacctgacattcactccatttccccatgtttccttctttcctgttcctcacccttttcacacttggtttattgatggcagttccaccaggcctaattgccacacaccagcaaaggcaggctatgctatagtatcttccacatctatcattgaggtcaccactctgccccactccactacctctcagcaagccgaactcattgccttaactcggaccctcactcttgcaaagggactatgcgtcaatatttatactgaccccatatcctgtaccaccatgctgttttatgggctgaaatgtttcctcactatgcaagggtcctccatcattaatgcctctttaataaaaactctactcaaggccgctttacttccaaaggaagctggagtcatacactgcaagggccctcaaaaggcatcagatcccatcgctcaggacaacacttatgctgataaggtagctaaaaaagcagctagcgttccaacttctatccctcacagcagtttttctccttctcatctggtcactcccacctactcccccactgaaacttctacctatcagtctcttcccacacaaggcaaatggttcctggaccaaggaaaatatctccttccagcctcacaggcccattctattttgtcatcattttgtaacctcttccatgtaggttacaagccactagcccgcctctcagaacttctcatttcctttccatcgtggaaatctatccttaaggaaatcacttctcagtgttccatctgctattctgctactcctcagggattgttcaggccccctcccttccctaaacatcaagcttggggatttgtccccacccaggactggcaaattgacttcactcacatgcctcaagtcgggaaactaaaatacctcttggtctgggtagacactttcactggatgggtagaggcctttcccacggggtctgagaaggccactgtggtcatttcttccttctgtcagacataa

SEQ ID NO: 140755 - DNA, 853 bp, Homo sapiens
atgcagcaagaagaccctgaagaaagtaccaaaagccccaacccaacgaccaataaaaaacaagaaaagaaacttagcctgtttggtggtctcttcacatggacgcgtgtgaaattcggtgccgtgactcagattgggggacctcccttgggagatcaatcccctgtcctcctgctccttcaacgtttattctccaaaggatatcgggtatccccatccaaagctcaaatttcttctccatccgttacctacctcaatagtgtctccttaataaaaactcttctcaagaccactttacttccaaaggaagctggagtcattcactgcaagggccatcaaaaggcatcagatcccattgctctgggcaacacttctgctgataagggattgttcagaccccctcccttcccttcacatcaagctcggggatttgcccctgcccaggactggcaaattgactttactcaacatgccccgagtcagaaaacaaaaatacctcttagtctaagtagacactttcactggataagtaaaggcctttcctacaaggtctgagaaggccactgctgtcatttcttcccttctgtcagacataattcctcggtttggccttcccacctctatacagtccaatagcagactggcctttattagtcaaatcagccaagcattttttcaggctcttagtattcagtgaaacctttatatcccttacagtcctcagtcttcaggaaaggtagaacagactaatggtcttttaaaaacacacctcaccaagctcagcctccaacttaaaaaggactggacagtacttttacctcttgcccttctcagaattagagcctgtccttga

SEQ ID NO: 140756 - DNA, 1046 bp, Homo sapiens
ttaactaacaatcttagactcaagattatcagcaatgcatttctgccagtggactgattttgctggaggaatgtgtaatatgtgctgagattcctggggcctcagagtgggaagacagtcactcagggccaaggggacctggagccagaagagctcaggatcatatgtgtgtgaaacttggtgtttaatcacctgtgcattccttttgtgatattcactgaaagactgttggcctctctcactatccctcaaccactttctcctttcaatcttggcgtcacccttcaatctctcccttctcttaatttcagttcctttccttttctggtagagaacggagacgcgttttatctggcagccactctcagagcccctggaactgtggcccaaggctctctgactccttcccagatcttctcggcttagtggctgaagactgatcctgcccaatcgcctcggaagccccctcttagtctgggtagacactttcactggataggtagaggtctttcccacagggtctgagaaggtcaccgcggtcatttcttcccttctgtcagacataattcttcggtttggccttcccacctctatatagtccgatagcagaccggccacaaaatcttccttcagcttaatctctcccactctaggttcccacgacgcccctaatcccactcgaagcagccctgagaagcatcgcccattatctctccataccatcccccaaaattttcgctgtcccgacactttaccactatttcgttttattttttttgctttcttctcaaataccttgcacataatgggaaagatggctgctgaaggtcccaagtccacattatactgccagttcactgaaaaatagtcttttttggcaactataaataagaacaatctatttaaagttcctaatttcggagaataaggtacattgatttgattaacctgggtgaagtatgcatctttgtatgagggaatgcagaaaagagccaggtatgtcacattcaacccatagagcatggctttctccaacagaaacagga

SEQ ID NO: 140757 - DNA, 416 bp, Homo sapiens
cgtggtatggagagagaatgggcgatgtttctcagggctgcttcaagcgggattaggggcggcgtgggaacctagagcgggagagattaagctgaaggaagattttatggggacttccgaggcaatcgggcagcatcagtcttcagccgctaagccaagaagatctgggaaggagtcggtcagagagccttgggccagagttccaggggctctgggagtggctgccaggggcccaaggaccagtgtacaagggcccatcactgtcagtaactctgcccactccagtagtaaagcagccaaatgctcacatacccacacatgggcacaaggaccagtctggttggggcttgctgtggcagctatccccactcagtctagtggttgggatgccacatgaccaatccagaggcccatga

SEQ ID NO: 140758 - DNA, 1280 bp, Homo sapiens
atggaggagaaggaggagaggaaaaggagaaggaagaggaagaggaggagggaagagggaagagatggggaaagaaaaagaatggagaagcaaaaggagaaccaggatcctaaagatccacctacgacctcaggtcctcagaccgaccagcccaagaaacatctcaccaatttcaaatccgagacaaaggagacacgttttatccgtggacccaaaactccggcgccagtcacggactgggaaggcagccttcccttggtgtttaatcattccagggacacctctctgattattcacccaggcttcagaggtgtcagaccacgcagggacgcctgccttggtccttcacccttagcggcaagtcccacttttctggggaaggggccagctgctcctcgccagaccgagctaggtcccaattcttcctcagcctccgctcctccaccctataatccttttatcgcctcccctcctcacacctggtccggcttacagtttccttccatgactagccctccccctcctgcccagcaatttactcttaaaaaggtggctggagctaaaggcatagtcaaggatttaattaacctcaccttcaaggtgtacaataatagaaaaaagttgcagttccttgcctccactgtgagacaaaccccagccacatctccagcacacaagaacttccaaacgcctgaactgcagcagccaggtgttcctccagaacctcctccccgaggagcttgctacaagttccagaaatctggccaccgggccaaggaatgcctgcagcccaggattcctcctaagctgagtcccatctgtgcgggaccccactggaaatcggactgtctaactcacctggcagccactcccagcgcccctggaattctggcccaaggctctctgactgcttcccacatcttcttggcttagcggctgaagactgatgctgcccgatcgcctcggaagccccctacaagaccatcacggacgccgagcttcgggtaactttcacagtggaaggtaagcccgtccccttcttaatcaatacagaggctactcactccacattaccctcttttcaagggcctctttcccttgcctccataactgttgtgggtattgatggccaggcttctaaacctcttaaaactccccaactctggtgccaacttagacaatactcttttaagcactcctttttagttatccccacctgcccagttcccttattaggctgagacactttaactaaattatctgcttccctgactattcct

SEQ ID NO: 140759 - DNA, 2453 bp, Homo sapiens
tcagtctccttttgacccaagacttcttgtcagcactggtttctgcagtgactgtgggttcatctggggtctccctctgtctctggtgtctctcagtgtgttatttctctccctgtggctgtctgttcctccttgcagcttcctgtgtctctttatctgggtacctttccttctttgtcccttgctcagacttcttgtctggtactcagtctctgtgtttgtggatctgtaattggggttccccgcaatgagactgggttctgggccccctgtgtgtccctggcccccaggactgctgagctgtttccagtgtggggagagaatttcatgggctgtcatcaccaaacccatctgcctccggatgtcccactcttcttttgccaagaagaaggtatctctgttttcattggacaaggacttgttcttcagtcgccagatacctagattctctgctgggacctgttcaaccctccaggtagccaactggatcctgaacgtcttaacaggtacccatacattgatggataggttgattgatgaggtctgctctagtctgaaggcaaaggttgagattactgccagtcttgctgctgtcagtgagtatccccaaccaacgttatccctttgtaagacatcagctgtcacttgtgaatcaaccaggagtctctctccctttctacaacatgcaatgaatcccaaagcaggaacaacaaccacagaaattaactgtgaactgtgcttctttttatgttctgttggcaaggctaaagtgcaaagctctataccttgctcctcttctgctgtgttccctttgggtttcctatagaggcagtggctgccatttacaactcccccagaatttctgtccccatcatcatctatccagctctctggcaggggtacattctgctcccccgaggtaaccttgaagctagtgtcaatgatggatttgcacaacttcacttctgagttctgaatacattttttctgcatgacacttcgtgagtgaagatgacatgcctggaagcccatgccttcacgaatgtatgccagctttcttctaaaaggtccagtcttagatgaacacttcctgcatgtgcatgggcatgtgtgtagatctgtaggtgcaggctgttcccatggctctacaattaaaatatctgccaacatcaactcccctaagaacctgattgaatttcctgtggcttcatctctgaggccctcctgtaggaaggccctgctcccagtggctgctgggccacgtcttaacacaatctctggcttcagggtggaatggcaattatttaaaattggctcaggtctgcatactccactggattcttttttatcccactttaagtctttcccttgggacagcttaaacagctttatctttttaatgacaaaatgcccatcgataggactgccccccttcccccattgcattccctcaatgtactcatcaacatcatcatcatcagtatcactaccatcatcgtcatcaccatcgtcatcatcattatcagagatagaaataaaatccaggtcttcctttgtttgtatattgctactttcaaaatcattaagcctgtcactgttcgtggggtaattctgagcatatgacaattgcctctgagtcacaggctgtacccctacagcctccccaagattcacagggtttcttcgaggacttagagctacactattttttcggagacccaagtgaaaccaggccaggaaaacagccaaaagtttcagtccaacagattctttaaaagttttggtatggttctttgagtctttgaaaggtgatttgtggaggacaagaaaggctttgtaggcactccctgccctcatccttggaatatcccttccccgatcttctcctgatgccaggaattccattagcgagtccgcatgtgtgttgatgcacggattagcaggcagatgcatgcaggagaggtcgacatgaggccctggaaataagtctgccttgcttggaccatttctgtgatacaaagtggtaaaagatgatgaaacatcaggggatttaactatatcaacatgattggcattgctgctggtgctattattaccatgaatatagggtcttttcttgtgttgcctgagttctgctgatttgcttctatttgttcctctccacattggtctgcattcagctggtgagtcccttatatcaaagcccttgtcactctctgcataaaatccctcatttttgctgatactgtcattaatgttcaattcatgtaacttagcattgagaaggaaactcgcaagatgctttgccattatggaagggaaatcattgccattaatatctgtgtctaagacactctcatctgcagcaacatcccccatactggtaaatttcagcacatcccagaataaggcattaatttgcttcctctttttaccattttgatgctctcccc

SEQ ID NO: 140760 - DNA, 1122 bp, Homo sapiens
ctatctccttggtgcagtgggccccgagatttgtagagtgtgctcatccctctggctggagccgtggcgccaagcatgtccacgcagtgaggcctgggtctctctcctgtcctcaggactggagtttacacgaagtcggtggccttgggaaaccaggtgcacagacacggatttcctcgtggctggcgaagacaatgtccttcccctggggaaagcagcccacgggttctggagcggaggtcttggctggggtctgtgggacccgctgcccctgcccgccccttcccccggcttggacgattgcagcggcgctagatgaatgaatagaatttcctgggagtccaggaagcctgaagacacctgcgacctcaggaacgcgcgcctgcgccctcggggtcggtcccgtcccgcccgggttgtagccaggctcctggtgggctgctgcgagtcggaagaggtgggatgctgctgcccggctgtgctgcagtcgcggatcttcaggaggaggtcccgggcttcagctgggacgcgtgggctgtcaagggggagcagaggcagggcgggggcggggttgtgaagcactgagacgccatcccggggcagcgggtctcggatccgggacccccagagccgctcgcctctgccccagggcagctgtctccctctacacccgagtaccgccggcctcctggcgagtcccgccgtcaccggcggccagacctggcgcaggaccaacgtggcgccgccgtgctgttgctggcgggcgccagaggcctcagtcccctgcccaggattccggctctcggggcggcctcctttccgcccacgctccagttcttcctccagctccccagctccggagcttccaccacatctgccggcttctttctcctggttctccatcaacctctttggctgctccttcttgatttcctttttgacaatctgctgctgctccgccattctcttttcattcctcatggatttctcaagtgtgtttctattcctgcattttaaactttccttgtttttcctgatacctctccttgtctgaacctcccctgttctaaggcaggtgttccatccgtgtgcgcttttggcatcctgggatgctcccagcat

SEQ ID NO: 140761 - DNA, 994 bp, Homo sapiens
ccccagccatgaaactgcccaaggggaccaggagctctgtgtactttgcacagcacccagaaaaggagccattgccctcaaggcaggaggtcaagcagacccctgtcatcatggccaagatcaaaggtccggggcccgccaagtacctccggccatcctgcacgggctacatagatcatgacatctccatgttcaaggcaccagcttataccctgcatagccggcactcagagaagcggatggtgtgccacagcagccctgggccttgctatctcttggatcccaaaataactcggtttggaatgtccagctgcccgcaggtccccatggaggagcgcatctccaacctgcgcctgaaccccaccctcgcatcctgccagtactactttgagaagatccacccaccgggggaacgcagggctccccagtacacgtttggctaccggcgcccatacagagtgatggacctcaacccggctcccaaccagtaccagatgccactcttgctggggcccaacacccctgtcagccgagctgctccctgctacagtctggcctccagggacaagaactggttctacaaggaggatgtggcaggaggccctggacctaccacgtacgcccgacctgagccatccatctatcagaaccgcagccctacttacagcatggccaagcgcttcgcctaccctctggacctcacgccacggcctggccccggctcccacgaggtccagcaggtcactgtgcacaagccccacatccctgctttcaccatgggcatcaagcactcactccacctgtgcccactggtcatcgacattcgtgactgaggcccctcttggggcactcactgcccctcatccccagaaattatttttctacaccaaattgagcaatttgaccaagatttctagtagcagagccggtacctgctgagtgtccggcacacagaagacattagagatacattttcatgtaaaaaaaaaagccg

SEQ ID NO: 140762 - DNA, 597 bp, Homo sapiens
atggggagcacagttgctcctgcgctggctgtggctgtgggggaaggaagagccgctccattcctgcgtttgatcaggttgtcacgaggactgagggtcgacgcaggtcctctgggcagcatggggtggtgccgggtggaccccacggtggcctgtgttcgccacgtggccgtgggtgcaggacatgtggccacagcaggcctggcccctgccccagggagtggacattccctgagcctgccccccacccccactgagaacttagtggctatgagagaacaggaaagcaggaagctagacagggcacagacccccgacggtggagaccctgacccggagcactgtgcagggccgggggaggagcctggatctgaggagtgcagttccagttgtggctttgccgcggcgtccccatggcatgctgttggggaccgtgagactgtgggcggcctagctgtattgcagcctgaggccagaggagagccaccgggcatcctggagtgcagccctcatgccccgaggccacctgccatcgcccaggatgactcaagatgccacctggctccgatggctgatgacgggggccctggcagctga

SEQ ID NO: 140763 - DNA, 428 bp, Homo sapiens
aaggcttctgaaaagaggggcaagagccactctgcgccacaaaggttgggtccatcttctctccgaggttgtgaaagttttcaaattgtgaaaaaaagataaaatgtgacttcccctgctctgtgcagcagtcgggctggatgctctgtggcctttcttgggtcctcatgccaccccacagctccaggaaccttgaagccaatctgggggactttcagatgtttgacaaagaggtaccaggcaaacttcctgctacacatgccctgaatgaattgctaaatttcaaaggaaatggaccctgcttttaagtatgtacaaaagtatgtctgcatcgatgtctgtactgtaaatttctaatttatcactgtacaaagaaaaccccttgctatttaattttgtattaaaggaaaataaagttttgtttgtta

SEQ ID NO: 140764 - DNA, 1365 bp, Homo sapiens
ttttttttttttttttaacaaataaaactttattttcctttaatacaaagttaaatttcaaggggttttctttgtacagtgattaaatttggaaatttaccagtaccagacatcgatgcagacatactttttgtacatccttaaaagcagggtcccatttcctttgaaatttagcaattcattcagggcatgtgtagcagggaagtttgcctgggtacctcttttgtcaaacattcttgaaagtccccccagattgggcttcaaggttcctggggagctgtgggggtgggcatgagggaccccaaggaaagggccacagaggcatccaagcccgacttgcttgcacagaggcagggggaaggtcacatttttatcctttttttttcagattacatcccgatattttcatcttacctttctttacaaaggagctcaagggggccatcattttttggacctttttcaagccctcacaacatcccctgtgaaggtagacaaaattcagaaacacctccatggccctcactggggaaaagatctaagaaaagcagcctttaccccctccccaaagccccacagcccaagtccagggcccccagccctattagtaacaatttgaaaaactttccacaaccctcggaaaagaaagatggaccccaacctttgtggccgcaaaagtggcctcttgcccccctcttttccagaagcccatcctaggatgacagtggtccatgtactgaatattgtaggagagcaaggaggtttaaaagctttgaggacatggctcatataggacccccaaaaaaggtcctctacaaaattgccctggggaaattctgggaattggctgatgcaaagaagaagagaaaaaaaggtacatcagaaacagaaacgtgcttactatccagggcaactgagcttttgccaaaggggaagaggcattgtcgggggatcttgtaagtcatttgtctcctggtactgtcaagtgtgtaatcaccgcacaagtgcatggcaagagacagcaacagaaagctctatgtaggctagagtgaaatgaaatctattatgtggggctccagtatctgatccttggtaggagcaaaatgctctctaaggagtttccaagatctatgatctaaccctggaggaaaagtgataacccaggtcatttgccagacataatacaaacccagaagggaactctaaactcaaataaaataaaggaaccaataggattttcagagtccagtgactcgacatgattgactggaatagcaactcttctccagtgtcctccatcacagaacaaaatacaagacgtaaactgattttaagaggttccttccaggccaggtgtggtggctc

SEQ ID NO: 140765 - DNA, 983 bp, Homo sapiens
cagggaagcctcttcgtatctggtgaaatggactggggatgaaatatctcagctactatgggaagagtgtttcagggccctagattttctctatgtctggatctttcctggccactattgactttctccttttgcaagcagatgtcttcaggatccttgcttaggtcagctccaaggaaggaccctttcttactgggataccaggactactggtcagccccagagacctgaattgtgaggaccagcgaagatgagggggagggtgtctctagtcagtcctcccccgctgctgacctgtgccctgcccaccaggacagcataggacttaggattgcatctttctttacttcataggagcagaagtcagaagaggaaagagggctttttaaatgaggtagtggcagaactgacaagggggtatcagaatgagagtgcacacaagagtctaagttgggaaagtgacagggtgaagctggaggggctggtaggccatgaggcatgctgttcagaggctctggtgcatgtaggagaggaggcaggacaggaggctctggtcatgcatgggagaggcagcactgagattagagatggaaagatttcaggggatgagtttcgaggtgtggccacaaatacggtcaactgatgtgaatgtgggcgatggacatgggagatgaggaagcaaggcactgtgaagctcatccacagtgacttgattaatcacttagatgctgaacttcacagtggtaaagtgtgcatttttaaagaaggtaccgaagtaaaccaggtgctgagggatttctttgaggagtacatggccccatggatatgcatggaaagatgttgatagagtgtaagtggtgtctaaaagcagagagcagaacagtgggacaggaggtatatcaaggtcagaagaaaatgccaacatttctaccttcctcttcccaaattcttcagttggtccaaaactatacctgtttgtgatg

SEQ ID NO: 140766 - DNA, 890 bp, Homo sapiens
atgctatttaccaaagaaagaggatcccctggggaccagaggacaaggcagagaccttcgatttgggagggcgacgcagacaagcggcgcaggatgtctgggctggaggggacaaaagccaagttctcaatacctttggcgctcttcatgtctggatgggttctcccgactccggtgcttcagagcagcagagccaggtccctctctggctcctcccacaggcaggtgacagcgcccccgtgcgggaagcttcccgcctcctggccctccagcctccagcgcactctccgccaccgcctgaaccttcctactccagctcgcagctgtctggagcgcagatcgagtgcgtgaggcgttacgcccagcgctgtgggattggcgctcagctgtgcctcacccgtcgcctcaaggaccaaccggatagcgcggcgtgggcgtgcacccggcggcggcgagtagagggggcgagagttctcaccccacagccttcgaccggagtccgcctccgcccaagcccctgcggatctgacctgagccttcagcccgcagcggcctcccttgagcccaagcactgggaacacacagacgcagtgggagacactggccataagccccccttgggtgctgacatgaaacctgtaaacagttgcatcaggagattgttcaggagactatcttgcgttttcttcctttgctgcttaccaaagcagtctaggcttggactccaagaatcaagacgtcagaggtatactttggttcatgagcatcttgataagactcttgcctgtcatcctgttactggtagaaggtgtccaggttcttggcatcttgaagaaagaattgaagaaaacgcacaaacaaagcaaggaaggaatgaaggggtttattga

SEQ ID NO: 140767 - DNA, 819 bp, Homo sapiens
ttacttgtcttccaagttcatcagtgcctgcactgcaaactcttgtaacttcttacgttcctctaggttatactgaagcttttctagcaactcaaaatatcggaagagtgagtctctgggccaaacacggtcatcctgatccatttccattagcccgggcagattttcgtgcacaagagtctcccagtccaaacgacccatcatggctactatgatacttcgaaagataatggagccaagcaacaaccaaaggatgaaatagatgctgctgaagatgcgactgacttcaggcaccttccagacgtcctgaagcagtgcataccaatgatccaaggtgaagagaatgaacactgttaccagggaattcgggaggtccgagaagaacacatggtactccaggtcctgacgaggtgaacgggtgtactctgagaagacgtagacaccagtcacagcaaaaatgtagaagaagatgagcagcaacatcaagaggaaggtcatgctcaacatggtaacaacaaagtcaaagacattccaggcactcttccagaaaacagaaaagttggatagccacttaagaaggatctccaggatgaaaataagcaagataaaccaagctgccacctccaaggtcagcttcaatggccatagtttggtatttgtggattccagcaattcaagtaactccctgatagtgtgccgcggcacagcttggctcaagccttgcaaatgctcaatgagagagaaagtatcgatgagacgtgaacgaatggcatcagctcggggaagctgcatctgctcttcttgttggtaagcggccat

SEQ ID NO: 140768 - DNA, 698 bp, Homo sapiens
gcaggggctagggccgggtcccggggtgagccgaaacctgggggtcgggcggggcgggaaatggggcgcagtgaggctgggagccggccctgagctcgtcctgcgtaggggtagccgggctcagggggcgcctgagctggaggtggaagcgtgaagtcaggactgagtgggcgaagagaacctgggctgagacatggccgcttaccaacaagaagggcagatgcagcttccccgagctgatgccattcgttcacgtctcatcgatactttctctctcatcgagcatttgcaaggcttgagccaagctgtgctgcgacacactatcaggagttacttgatccttcccgccagaagaaacttatgttgggagatcaacaccagctagtgggcgtctctataaagcctcaacgtatagaacagatttcacatgcccagaggctgttgagcaggcttcatgtgcgctgcagtcagaggccacctctttctttgtgggccggatgggtccttgagtgtatcctttcatgtcactcatttttatcctggctgttgatcatctgcctaatgacttattttttgcttcccaaactccattgtctcattctcactgcttatgttattgctcttattatttcagctgcataaatcagaaagaactccactctgtatgtttccttaagagacaacaggtcctctcttca

SEQ ID NO: 140769 - DNA, 2301 bp, Homo sapiens
ccattttgctttgcccatggctgcccgtggttcctcaggcccaagtcctgggtctcctgcaaatagtgtcaggcagtccttaaagtctgagagctccatctcagcaatctgggttgcagagcaggctgctgggaatgtccctcgtacatctgcacaatttggcacaggttctggaagatcctcagcagctggtcgcaccacccctgctaccagggctgctttcttggcagcaagctgtggctccctacacagctgtccaactctgctctgctcccagctctgctgcttttctagaagccgctccagggtctctggacccaaggcctccctggggatcaaggaaattgcctcagtagacagagtgaatactaggcgtccagcttgctctacttcatcctggctccacaactctggtttcctggggtcctgcattcgttcccggatctggtgggtgaggttttcgatcagggcaaatacctgatcacagaccttcacaggattctggatgatagtcatggagttgagcagggaagtacttctggtgggagccagctccacagagaactcctggtatggctggatgacctcctcagggatctcttcagctgagctgccaacttctacaagggtttcctggaccaagctaccaaccccattgccatggttctccaggcattgctgtctgatgtcagggaccttctgacatggctggctgagcgcctcagaaatgtcctggcatggctgactgatgttaaggaccttctgacatggctggctgacctcctcagatggctggctggttaccataggtggcacctgtggagactgatttggttcaaaaagctcttgctccccttctatggagagctcttgtgctccactctcaggtagctgctggagcagcccaaggccttgatgttcttcagacacgtgtgaatttagggagggttgatcactgaagccaaattgagagttaccatctacctgagcagatagatcaaatgctgcaatgtcggtgcccgactctagagtgatccccgggatcatgagaagcagaggcaggaaataacagggcttcagacttgggtgcagaatggaggtggaggacacagcacagatggcataagaattaatatttccttggttcctcccagggagtcctttctcaactttgtaaggcgtgcacagaggtggcaaggaagcaccttgctcctcttcctggctctctttgaggcctcggcagaatctttcaaacactctcttcatgttaccacccttgtccatggagatcacccgtgtatgatcctcctcattcacccagatcaggaagctcttctcattgatgtgccaaaatccacgagcatatggccagactcgagccattcctgctgcagtcagcaacggggacacatgcttatcaaacagaaagtggttatcaataagctgctgctgttcagcctctgtcatctcactgagcctatagtaacgtccagccaggtcacccttcaggccactcagtgcatccaccacaacacgttgcacctctcgtcgctctgctcgagtgcaagctggaggcagactgagtcctcggatgcttacgccagttctgactttaatctctctttcacagctggtctcccagtagtgcttctttaactggttgctacttctcagattaaagagttgccattgagggatgccttgggccttggcttttggccaggaaggcacatcaaactgcccatctcggtgcttcagactggcaggtggtagctttttgccatggctgcgggcgtagtcctgaagattcggggcactggaggagccacccagcactgtggtgctgaacagccctgtgcactgtgagccctgtatatcaattcgagctcggtacccatctaggggctcagacactatctgggtgggatgtgtgtgttttgggggttgtgtattgggcccttgtgggcattgtaaaaattctgtttcatgtttctgttttgctttgcccatggctgcccgcagttcctcaggcccaagtcctgggtctcctgcaaataatgtcaggcagtcctcaaagtctgagagctccatctctgcaatctgggttgcagaccaggctgctgggaatgtccctcgtacatctgcacaatttggcacaggttccaacttaatcgccttgcagcacatccccctttcgccagctggcgtaatagcgaagaggcccgcaccgatcgccctttccaacagttgcgcagcctgaatggcgaatggcgcctgatgcggtattttctccttacgcat

SEQ ID NO: 140770 - DNA, 1667 bp, Homo sapiens
caagaatgaaatgacacttgatgcttacattttcttagcagacatggccgcttaccaacaagaagagcagatgcagcttccccgagctgatgccattcgttcacgtctcatcgatactttctctctcattgagcatttgcaaggcttgagccaagctgtgccgcggcacactatcagggagttacttggtcagcagcctatttcttcactaatttaaatttaagactcctatccacatcctctacatttaagagtggaaaattctggggaggccggtttagttgctggtttaccaaacttgataaatcaagggcttgtaaataaaactaaggagatagaatccacgtctttcacttttaggcctaggatagccactagccgtggatgatacggaacagtttctgtcaaagactcttaaaactttgagagtgaacctgctgcttttgtgggcatggacagtgttggtcataagcaatacatttgctctcactccaaacagaattcttagttgctgaaagatcctcagcagctggtcgcaccacccctgctaccagggctgctttcttggcagcaagctgtggccccctacacagctgtccaactctgctctgctcccagctctgttgtttttctagaagccgctccagggtctctggacccaaggcctccctggggatcaaggaaattgcctcagtagacagagtgaatactaggcgtccagcttgctctacttcatcctggctccacaactctggtttcacactgtcgttggctaacagggatggtgggaagcgcatcaggtcagagacagccaagaaagggatgagtggtgacaggtcaatgaagagctgggaggtgaggcgtgggtaccgctggagcagcagggctgtcaggcgacccagggcctgctcctcggatggtggtacccattttgctttgcccatggctgcccgtggttcctcaggcccaagtcctgggtctcctgcaaatagtgtcaggcagtccttaaagtctgagagctccatctcagcaatctgggttgcagagcaggctgctgggaatgtccctcgtacatctgcacaatttggcacaggttctgagtccgcgaacacagctgcgcgactgatagagaaactacttcgggctgagctagataaaccggaaatacgtgacgagaggattgtgggatggtggacgacgtttgggcgcccacagctaggaagtcgagtcggtttctgcgcatgctcattggctgcccgcatgtcctctacgtcgcagaatttggaagcagcttttggcgggaaattttgcttcctttgggctttgctgttaggactggacgacactttcgagagtcgcatctccgacacgggctctgcgggcctcatgctcgtcgagttcttcgccccctggtgagtccattctgagtccgcgaacacagctgcgcgactgatagagaaactacttacggctgagctagataaaccggaaatacgtgacgagaggattgtgggatggtggacgacgtttgggcgcccacagctaggaagtcgagtcggtttctgcgcatgctcattggctgcccgcatgtcctctacgtcgcagaatttggaagcagcttttggcgggaaattttgcttcctttgggctttgctgttaggactcat

SEQ ID NO: 140771 - DNA, 452 bp, Homo sapiens
  misc_feature (1)...(452): n = a,t,c or g
ctctgtgagacaaaccacagccacatctccagcacacaagaactccaaacgcctgatccgcagctgccaggggttcctccagaacctcctcccacaggagcttgctacaagtgcccacagcccaggattcctcatgagccatgtcccatctgtacaggaccccactgaaaattggactgttcaactcacatggcagccacttccagagcccctggaactctggcccaaggccgtctgactccttcccagatcttcttggcttagcagatgaagactggcactgccgatcgccttggaagcatacaggaccatcacagacactataagtaactctcacagtggaaagtaagtccatcccctttttagtcaatacggaggcaccctccccgttagtttgaaagggctgtccctgcttnntccnngnntcncaagtatcaggtctagtnntaccc

SEQ ID NO: 140772 - DNA, 357 bp, Homo sapiens; identical to SEQ ID NO: 114504

SEQ ID NO: 140773 - DNA, 627 bp, Homo sapiens; identical to SEQ ID NO: 129181

SEQ ID NO: 140774 - DNA, 1464 bp, Homo sapiens
tcaggaaatataactagatgtatcatttaccttggaccagatgacagacggtttgggatttccacttgctttgcatggtaaagttactggaatgccttcaattgtactgagtatctgctgcccatgctgaatggttggcagaacatgcacaaccacagaggtagttttgttattggtcccagcaacgttactggccacacaagtatattcaccaccatcctgaagctgaactctttcaatatggaggctcccatcactgcgcacagtgatgtaaggattttggagcaacatagctgaattcttaatccaccgacgttctggaatgggatttccagctaacagagtacagggcaaagtaagctgctgtccttcaataacattggccactgaagggctgattccaataagtggagcaacaagtccggtcactgttactgttgtctctgactggatctttccaaactggttttcagcttcacaaatataggttcctttatcacttgcccataagtttaaaataaagagagctcctgttcttagttggctgatggaactaactgaaaaaggtcttgagaaaattggcatgttgtctaatcttcgccatttgattgttggttctggataaccctgaacataacaaggtaatgtcacatttgagccaatttccatagacacatcagcaggttcttgtatgaaaactggaggtgagccaacatccagagttatcttgccagttgctcttccagcctcattgatggctacacaggtataatcgccagcatccagatcttgtgtttcttgaatcttcaaaagtcccaagagagggtcaataatgaggaatgttgagggcctcaactcaagatctcctttgaaccatttaacttgaggtggaggaataccagaggttttgcattccataacggttatatccccaagggcaaccaagagctcactctgaactaccatcaacttaggggcttttgctaggcaaccatagatccctgcatctttgggagctgcatttttgataaataaggtaccatctgaggtcatcctatacctgtgtgaacccacgataaacatatcgttaacggtccaggcaatctttggtttgggataacctgttgcagaacacatgatggagacctcagaccctcctgtgaaagactgattcttgggcatcacagtgactttgggtggttcaatttcaaatccagtaagtggcctctttttactctcttctccaacctccctatccttcaacctctttctcctttcaatcttggcgccacacttcaatctctcccttctcttaatttcaattcctttcattttctggtattttctggcagccactcccagagcccctggaactctggcccaaggctctctgactgactccttcccagatcttctcggcttagcggctgaagactgacactgcccgatcgcctcagaagcccc

SEQ ID NO: 140775 - DNA, 411 bp, Homo sapiens
tcatgggcctctggattggtcatgtggcatcccaaccactagactgagtggggatagctgccacagcaagccccaaccagactggtccttgtgcccatgtgtgggtatgtgagcatttggctgctttactactggagtgggcagagttactgacagtgatgggcccttgtacactggtccttgggcccctggcagccactcccagagcccctggaactctggcccaaggctctctgactccttcccagatcttcttggcttagcggctgaagactgatgctgcccgattgcctcggaagtccccataaaatcttccttcagcttaatgtctcccactctaggttcccacaccgcccctaatcccgctcgaagcagccctgagaaacatcgcccattatctctccataccat

SEQ ID NO: 140776 - DNA, 696 bp, Homo sapiens; identical to SEQ ID NO: 132717

SEQ ID NO: 140777 - DNA, 1046 bp, Homo sapiens; identical to SEQ ID NO: 140756

SEQ ID NO: 140778 - DNA, 1107 bp, Homo sapiens
tcacagaaggcttgctgtctgtaagccttgtaagtcacctgtcccaacatcttcagttttgttagtgatcagaatctctaatgcccctggagtgagggtggggagacagcagatggtaaaggcaaataagatagaaggtctgccagaagcatagaatacaatagtggtttccaggggttggggactgggaaagtggagagttgttgttcgatgggtgtaaaattttagttctgctcgatgattaagttctagggatatttccctcaagagagaacctgttgggatgatgactgttagctgatggccttcatctgccacacccctggaaatcacttgtgtcctcttggtggccacagtgtcttcaggctcatgtaccatgtcatcagaatctttctcaacacagccacacagactgccactgcaagttgtgaggaaaacatttttgccatccagaacacaatgatcattcactcttcctcctagatctatattcttttctttgtctttcatgatgttgaaattgtgggcaaacacaagccatttattttgcaaagtgtcctttaatatggatttgtctgatgtttccttgtgcttagattcagactgtgcatttgtaacaggaatatcacagagtgatactatatctttccttccagccttctgccatgggatgaccctcaccagatgccagtgccacgctcttgaacttagcagctctagaactatgagctgaaaaaaactttcttttctctgtaaattacccagtctgcggtattcagctatcataatagaaaatggactaacatagcaggccatgggccttccctggcagccactcccagagcccctggaactctggcctaaggctctctgactccttcccagatcttcttggcttagcggctgaagactgacactgcccgatcgccttggaatcgccctcttcagtgcttctttcagcgctatgaagtaaaaccaggtactgtgagtgttcacctgatttttggttcttatgaaggtgcttggctgtgtatagataattgttacattggtgtcgttgtggggaagacaatcagtggagacttctattctgccatcttgctccat

SEQ ID NO: 140779 - DNA, 433 bp, Homo sapiens; identical to SEQ ID NO: 135219

SEQ ID NO: 140780 - DNA, 679 bp, Homo sapiens
atggacacatatagaggaacaacagacactggggcctacctgaagacacgcatgaaatttggtgccgtgactcagatcgggggacctcccttgggagatcaacccctgtcctcctgttctttgctccgtgaaaaagatccacctacaacctcaggtcctcagacccaccagcccaaggaacatctcaccaattttaaatccggagcttgctacaagtgccagaaatctggccaccaggccaaggaatgcctgcagcccaggattcctcctaagccgcgtcccatctgtgcgggaccccactggaaatcggacttttcaactcaccttggcagccactcccagagcccctggaactctggcccaaggctctctgactccttcccagaccttcttggcttagcagctgaagactgaagctgcccgatcgcctcagaatcccccttttcctcctctgtgctctacctctagacacaatgcactcaagacctggcatgtctgctaccttgctcagcaccttgcagagaatctgtccatgcaactcttgcctttcacctccacgctgctgaaaccttgccacattcccaagctgtggcttgttttgcagctgtttcaaatggggatgccatactgagaagtaatacctctgagctgccttgtgctttttctctgacccgatcat

SEQ ID NO: 140781 - DNA, 2477 bp, Homo sapiens
tgctctgagtatgaggactcctccccagctccagtaccagccacagatctcagctcaacactctcgagctctgtaccacaaccccaggatacagggaccagccagcagcttcatcccctggacccttggcatgagctgcttcgtgcccaggagctccaaggtgccaccaaccacaagggctacagccatgcagagcatgagcatgcaggcctaggtgtccagggtgggaatggggctctggctttttcgaacagtgggcacaggcatgctgttcccaccatcagctcaggcactggcaggaggaggactccaagttcttcggcttttggactcttgaacttacaccagtggtttgtcagtggctttcaagccttcagcgacagactgaaggctgcattgtcagcttccctacttttgaggtttggggactcagactggcttcctagctcttcagcttgcaaatgtcttatgctgggacttcactttgtgattgtaggtaacatctgtgctacactcaaggagaaatactcctcaatgctccatttagatgtgaccatgaagaaaaatggggagaaaagaacaaggctccaaaaaagaaagaagggaatgcctccacatccggcttatgaggacctaaacatagctgccatcactctccctgccaatgttgtccttcatcagccaagtggcttcagaacttcagggcagctggaccccgtttggtggtctcttgacacggacgcgcatgaaatttggtgccaagacccgggacttggatcaggggacttcccttgggagatcactcccctgtcctcctactctttgctccatgagaaagatccacctacgacctcaggtcctcagaccgaccagcccaagaaacatctcaccaatttcaaatccaagacaaaggagacaggttttatccatggacccaaaactccggcaccggtcacggactgggaaggcagccttcccttggtgtttaatcattgcagggacacctctctgattattcacccatgtttcaagggtgtcagaccacgcagggatgcctgccttggtccttcacccttagcggcaagtcccgcttttctggagaaggggcaagatttaattaacctcgccttcaaggtgtacaataatagaaaaaagttgcaattccttgcctccactgtgagacaaaccgcagccacatctccagcacacaagaacttccaaatgcctgaaccgcagcggccaggcgttcctccagaacctcctcccacaggagcttgctacatgtgccggaaatctggccactgggccaaggaatgcccgcagcccgggattcctcctaagccgcgtcccatctgtgtaggaccccaccgaaaatcggactgttcaacttacctggcagccactcccagagcccctggaaatctggcccaaggctctctgactgactccttcccagatcttctcggcttagcggctgaagactgacactgcttgatcgcctcggaagccccctgggtatattgcatgatgttgaggtttggggtatgattgattctgtcacccagatactgagtatagtacacaatagttaatttttcaattgtctcttctccctctctccctccatagtagtccccagtgtcttttgttgccatcagcagctgtatgacactgtccccaggtctcatgtctgtataaacatacacatcataggatatttcagggaaggttggcgtgttatcatttgcatccatcacttgaatattgacgatgactggctcactttcttgtacaccatcaaatgctgttatcgaaaaggtgtaagtttgctgttcttccctgtccactggttgaagtaaggtgaggtagcgagtaataccagtctgtgtgacggtgaagactgaggtgtagtcattcagaaaaaggtgaagctctgggtcttttgtatcttctatgtccttgtccagagctactattcttaaaggtgaagtcaaattgagactgtccgaaatggttgctcccactggggcagattccaggatatagccttgataactgggcattgtaaaatatggactttgattgttttcatccagtatttcaatgtgtagaccggcaaaggcaggaagaggatgaccattgtcttgttcagccttaataaccaaatcaaatttctggtgaaagtctctgtttactggctccaggagactaagttctgctgtcctaggatgcatatggaaaaatcgtgggtaatcctcaggagtccctttgctccagttaccaacaagttcctcatctctatctgagaccacctcagcctggttttcatcattaatatcattatcagcattttggtcaaagccattcggtaagtctctagagagttccaaactttctcgcatcttcctatcttctacagagccctgcaaactgttccaatctctgcctgttacccagttccaaagtcgtttctgcat

SEQ ID NO: 140782 - DNA, 380 bp, Homo sapiens
tcttgagtgtccggaagaagaaaggctagaaacaggcaagtgtggacagatgctggctgaggagaaagaggagttgaatgtggtcccagccatttggatgatggagacttatcggggtgaccaagtggaattgccttgggctgctgtagacaggagcccaaggctggcagccactcccagagcccctggaactctggcccaaggctctctgactccttcccagatcttctcagcttagcggctgaagactgacgctgccggatcgcctcggaagcccccagaccatcacggatgccgagcttcgggtaactctcacagtggagggtaagtccgtccccttctgggctgtactgccgcaaagcttcacagacagcccccat

SEQ ID NO: 140783 - DNA, 774 bp, Homo sapiens
ttattttattctctttgtagcaattgtgaatgggagttcacccatgatttggctctctgtttgtctgttatttgtgtataggaatgcttgtgatttttgcacattgattttgtttcctgagactttgctgaagttaattatcagcttaaggagattttgggctgaggcgatggggttttctaaatatacaatcatgtcatctacaaacagagacaatttgactttctcacttcctatttgaataccctttatttctttctcttgcctgattgtcctggccataacttccaacactatgttgaataggagtggtgagagagggcatccttgtcttgtgcctgttttcaaagggaatgcgtccagtttttttccattcagtatgatattggctgtgggtttgtcagaaatagctcttattattttgagatatccatcaatacctagtttattgagagttttcagcgtgaagggctgttgaattttgtcgaaggccttttctgcatctggcagccactcccagagcccctggaactctggcccaaggctctctgactgactccttcccagatcttctcggcttagcggctgaagactgacactgcccgatcgcctcggaagcccccacccctcaaaaggccccattgtgtgttgttccccctcaggggtccatgtgttttcatcattaagctcccacttataagtgagaatacacagtgtttggttttctgttcctgcattagtttgctgaggataacggcttccagctacatccat

SEQ ID NO: 140784 - DNA, 357 bp, Homo sapiens
ctagtgagttttatatgctgatttatatcctgcaattgactcaattagtttatccattctaacagttttttggtggtctgtacgtttagctatatttaagattatgtcatcatcaaaaagggacaacttgacttgctcttttccaatttggatgccttttatttctttttcatccctgatttctctagctaggacttgtggtactggcagccactcccagagcccctggaactctggcccaaggttctctgactccttctcagatcttcttggcttagcagctgaagactgacgctgcccaatcgcctcggaagcccctgggctgtactgccgcaaggcttcacagacagcccccat

SEQ ID NO: 140785 - DNA, 1156 bp, Homo sapiens
atggcatcatctgctcagcttctggggagctctcaggaaacttacaatcatagcaaaaggcaaagagggggtgagatgtctcacatggctggagctaggaggaagagagagagaggagagatgctacacacttttaaacaaccagatctcatgaggtggtcttcagtatgtcggaagaacaaagagaaggttggaaattccaggaaaagaagaaatgttagatattgtttctccagaaagttcaatggcactagtaaagttttcgagagctggcaagtggtggtggtgggtgaaataaacagccatgttgctcacacaaagcctgttcggtggtctcttcacacagacgcgcatgaaatttggtgccgtgactcagatcggcggacctcccttgggagatcaatcccctgtcctcctgttctttgctccatgagaaagatccacctacaagctcaggtcctcagaccgaccagcccaaggaacatctcaccaattttaaatcggagaaaaaggagacacgttttatccgtggacccaaaactccggcaccggtcatggactagggaaggcagccttcccttggtgtttaacctttgcagggatgcctctctgattattcacccaggtttcagaggtgtcagaccacgcagggacacctgccttggtccttcacccttagcagcaagtcccacttttctgggggaaggggcaagagcttgctacaagtgccagaaatctggccaccaggccaaggaatgcctgcagcccaggattcctcctaagctgtgtcccatctgtgcgggaccccgctggaaatcggactgtccaactcacctggcagccactcccagagcccctggaactctggcccaaggctctctgactccttcccagatgttcttggcttagcggctgaagaccgatgctgcccgatcgccttggaagccccctcaatgcgttctccaaatgcatgaattacaaccaggaaaaaaagaaggttttgatatcctgaactctttgctggtttaacatgtatgtttctgtcacatgtttcaggtgggacagggacagtacccgtgtaacgcagaagaggagcaccaggatggagaaactctagcctcaccgactgtttaggttgtgagagcacacggggcat

SEQ ID NO: 140786 - DNA, 648 bp, Homo sapiens; identical to SEQ ID NO: 116079

SEQ ID NO: 140787 - DNA, 2006 bp, Homo sapiens
ctaccccacagcagtccccagagtgtgatgttccccttcctgtgtccatgtgttctcattgttcaattcacgtctgttgtttcctgactttttaatgatctccattctaactggtgtgagatggtatctcattgtggttttgatttgcatttctctgatggccagtgatgatgagcattttttcatgtgtcttttggctacataaatgtcttcttttgagaagtgtctgttcatatccttcacccactttttgatggggttgtttgttttcttcttgtaaatttgtttgagttccttgtagattctggatattagccctttgtcagatgagtaggttgtgaaaattttctcccattctgtaggttgcctgttcactctgatggtagtttcttttgctgtgcagaagctctttagtttaattagatcccatttgtcaattttggcttttgttgctgttgcttttagtgttttagacatgaagtccttgcccatgtctatgtcctgaatggtattgcctaggttttcttctagggtttttatggttttaggtctaacatgtaagtctttaatccatctcgaattaatttttgtgtaaggtgtaaggaagggatccagtttcagctttctacgtatggctagccagttttcccagcaccatttattaaatagggaatccttcccccatttcctgtttttgtcaggtttgtcaaagatcagatagttgtagatatgtggcattatttctgaggtctctgttctgttccattggtctatatctctgttttggtaccagtaccatgctgttttggttactgtagccttgtagtatagtttgaagtcaggtagcgtgatgcctccagctttgttcttttggcttaggattgacttggcaatgtgggctcttttttggttccatgtgaactttaaagtagttttttccaattctgtgaagaaagtcattggtagcttgatggggatggcattgaatctataaattaccttgggcagtatggccattttcacgatattgattcttcctacccatgagcatggaatgttcttccatttctttgtatcctcttttatatcattgagcagtggtttgtagttttccttgaagaggtccttcacatcccttgtaagttggattcctaggtattttattctctttgaagcaattgtgaatgggaattcactcatgatttggctctctgtttgcctgttattggtgtataagaatgcttgtgatttttgtacattgattttgtatcctgagactttgctgaagttgcttgtcagcttaaggagattttgggctgagacaatggggttttctagatatacaatcatgtcatctgcaaacagggacaatttgacttcctcttttcctaattgaataccctttatttccttctcctgcctaattgccctggccagaacttccaacactatgttgcataggagtggtgagagagggcatccctgtcttgtgccagttttcaaagggaatgcttccagtttttgcccattcagtatgatattggctgtgggtttgtcataggtagctcttattattttgagcagctcctccttgtacctctggtagaattcggctgtgaatccatctggtcctggactccttttggttggtaagctattgattattgccacaatttccgatcctgttattggtctcttcagagattcaacttcttcctggtttagtctggcagccactcccagagcccctggaactctggcccaaggctctctgaccgactccttcccagatcttctcagcttagcggctgaagactgacactgcccaatcgcctcggaagcccccagctctctggtcccatcatgaaagggtgatggattgagggtattaactactggaaatcgcaggggaccaaagacaccagttttgtggaataaagtaagtttgagataaagcgcagtacagacggtcaaggtaatgctgccttttgcttcaccttcagaag

SEQ ID NO: 140788 - DNA, 631 bp, Homo sapiens
cctggtgatcaccaaccatatgcggggaacccacaacaggcatatttcagcccacctatatcagccgtcgtctgctccatctatatggggaaacgaacaggcatcattcagccacttcatgcgctgtatctccacaacaatgccaacaccacagaaggggacgggcttaccttccactgtgagagttacccgaagctcggcgtctatgatggtctgggggcttccgaggtgatcgggcagtgtcagtcttcagccgcataatgtagaattggtagaaactctgaagtgtgttccctgtaactggacagtcccactgtccctcaaccactttctcctttccactcttcaatctcttccttctcttaatttcaattcctttcattttctggtagagacaaaggagacacgttttatccgtggacccaaaactctggcgccagtcatggaccggcagccactcccagagcccctggaactctggcccaaggctctcagactccttcccagatcttcttggcttagcggctgaagactgacgctgcccaatcgcctcggaagcccccctgacacccactaggctcagcaaattacctaggctgtactgccgcaaggcttcacagacagcccccat

SEQ ID NO: 140789 - DNA, 1074 bp, Homo sapiens
aaggcggaggtttcagtgaccgagatcgcaccatcgcactccagcctgggcaacaaatatggatgtggggaataggcaagcaggtaggtggatgtggctggctgcgtggaaagaacagggtggtgggggcagccaaggatcaatcaggcactggtgagaagttctacttcatcccgaaggcaatgggagccatggagggctctggacagaggagaacattgccagacccaggtgctcacaggaacccttctgggggctacagcgcaacagattgtgaagggagccggcctgcaccaggtgaaataaacagctttattgctcacacaaagcctgtttggtggtctcttcacacggacgcgcatgaaatttggtgccatgactcggatcgggggacctcccttgggagatcaatcccctgtcctcctgctctttgctctgtgagaaacatccgcctacgacctcaggtcctcagaccgaccagcccaaggaacatctcaccaattttaaatcaggagcttgctacaagtaccagaaatctggccaccaggccaaggaatgcctgcagcccaggattcctcctaagctgcgtcccatctgtacgggaccccactggaaatcagactgtccaactcacctggcagccactcccagagcccctggaactctggcccaaggctctctgtctgactgactccttcccagatcttctcggcttaacagctgaggactgacactgcacgatcgcctcggaagccccctacaccattcacggatgccgagctttaggtaactctcacagtggaagcccctggcccacagcctggtaccctggagctccataaatacctgttgagtgaatgagaggatgaaggcttctgcagagagagagtggaagaaaagtggcgtcttttgacttcggacttggctttccttgcagaggcctcagggaggaacaacacggaaacaaagatggccttgtcctgggcccttccctccctgccccactgtcctcctctgcatcctacagcagcctggggggaggtggaaatgggcccctttgttctgcttccataa

SEQ ID NO: 140790 - DNA, 367 bp, Homo sapiens
tggcgactgctttgggaagtcctgctggcgggcactgtgcccctgggggggtgcaaagagttgtccagttaccttgatcttctcacagcctcctccccagggcaccgggagagaccaggattggaggacggcaaagaacacacttcccagaggattcttggaggtggcttcctccaggcagtaaatctacagcccaggctccctgcatcttatggctccaatcactttggatctcatcgtcgcctgcacattgccatacacagggaaggagaagagatggagaaggcaaagactttctgaaagccgcggctaaaagctgggcatgtgtcacatcagctcacattccattgtagagacggagtttcac

SEQ ID NO: 140791 - DNA, 232 bp, Homo sapiens
atggatgaagctggaagccatcatcctcagcaaactaacacaggaacagaaaaccaaacactgcatgttctcactcgtaagtgggagttgaacaatgagaacacatggacacaccagtctgatgattgcaatgatctgatcgtagaataccacaagcctaaccaagctgcggccctgctacagctgccaaacagagcagtattgttgctaaagcagattattaaaacctcag

SEQ ID NO: 140792 - DNA, 322 bp, Homo sapiens
atggatggagctggaagccatcatcctcagcaaactaacacaggaacagaaaaccaaacaccacatgttctcgctcataagtgtgagctgaacaatgagaatacatggacgcaggaaggggaacaacacatacggggtctgtccttgctggtgagggcaggactcaaggttttattccccaagcagcaaggaatgctgtggacaaggcagccctcagctgtcagttcctttcaggaatttcctcagttgaagagagattccttgcctaaggtgacagtccctttctggggtggtctacatccaatcactggtcaatgcagag

SEQ ID NO: 140793 - DNA, 759 bp, Homo sapiens
atgaagccagagccaatagggtcagctttgtcccttgacatgtgtaaaacactgccccaggaactagggcatataactaggagagcttttgaagaaggtgtaagatctaggaacagcagaaaagatttggatattactgtaaatgtgagattagtcttgaaagatgaaagagttcatgaagaaaagcagcagaacaaaagataccagacaacaggaacaagtactggaaccactattcacaatagcaaaaacatggaatcaacccaaatgcccatcaacgatagactagataaagaaaatgtggtacatatacaccatggaatactatgcagccataaaaaggaacaagatcgtgttctttgcagggacatggatgcagctggaagccattatcctcagcaaactaatacaggaacagaaaaccaaacaccacatgttctcacttataagggggagatgaacaatgagaacacatggacacagggaggggaacaagacatactggggcctgtcgaggtgaatgcaaaaccttcatcctctttagttcaattcctagcccaagtattcctggaaattcctgtagcttcatcgggaatgtggaaggaatcagaaaagaacttccccagactctcaccgctgtatttgcatactctgctgacctgccagttaccattgatgaaccgtccattgtcctgtgtaaagccagcccctcaagatgtgcactggatttcatgcccttttgcatattccaggacctag

SEQ ID NO: 140794 - DNA, 2556 bp, Homo sapiens; identical to SEQ ID NO: 136363

SEQ ID NO: 140795 - DNA, 1343 bp, Homo sapiens
atggcaaagaatcctccagagaattgtgaagactgtcacattctaaatgcagaagcttttaaatccaagaaaatatgtaaatcacttaagatttgtggactggtgtttggtatcctggccctaactctaattgtcctgttttgggggagcaagcacttctggccggaggtacccaaaaaagcctatgacatggagcacactttctacagcaatggagagaagaagaagatttacatggaaattgatcctgtgaccagaactgaaatattcagaagcggaaatggcactgatgaaacattggaagtgcacgactttaaaaacggatacactggcatctacttcgtgggtcttcaaaaatgttttatcaaaactcagattaaagtgattcctgaattttctgaaccagaagaggaaatagatgagaatgaagaaattaccacaactttctttgaacagtcagtgatttgggtcccagcagaaaagcctattgaaaaccgagattttcttaaaaattccaaaattctggagatttgtgataacgtgaccatgtattggatcaatcccactctaatatcaggaacatttgcaaagcagttgcatcacaactttgcatttattatcttagtttctgagttacaagactttgaggaggagggagaagatcttcactttcctgccaacgaaaaaaaagggattgaacaaaatgaacagtgggtggtccctcaagtgaaagtagagaagacccgtcacgccagacaagcaagtgaggaagaacttccaataaatgactatactgaaaatggaatagaatttgatcccatgctggatgagagaggttattgttgtatttactgccgtcgaggcaaccgctattgccgccgcgtctgtgaacctttactaggctactacccatatccatactgctaccaaggaggacgagtcatctgtcgtgtcatcatgccttgtaactgggacatggatggagctggaagccattatcctcaacaaactaacgtgggaacagaaaaacaaacactgcatgttctcacttataagtgggagctgaacaatgagaacacatggacacagggagaggaacaatacacactggggccttgttgggggtgcagcaggaggagaggatcaggatcaatagctaatacatgtgagacttaatacctaggtgatgggttgatagatgcagcaaactaccatggcacatgtttacttatgtaacaaacctgcatgtcctgcacatgtatcctaagaaacttaaaattaaatttttttaaaagatacaattccacataccccctttaaaagtatacagttcctgggatttt

SEQ ID NO: 140796 - DNA, 1029 bp, Homo sapiens
atgcacgcagacatgcatacacaaacatctatccccacatccacatccacacacactggcacagaatcggatgcctctgagactgaacgtcttgatggtgcactatttattcccccggtttacttcttgcctcagagtgctaatattaggcactgcatcttagcagacacggctgaggccctgataccagctgctcagatccccccagggccacagcatgaaaacaatactgatgcctatgagcagaagcttggcgagattcggaatagaaactgtcttcacttggctagtaatgcaactgtaatgggagtaatacagttgatgatggtactcttgggactgccaactagtaactccctggaggccaagaataatacctggtcctcttgggacatggatggagctggaagccattatcctcagcaaactaacacaggaacagaaaaccaaacaccacatgttctcactttgaagtgggagctgaatgatgagaatacatggaaacatggaggagaacaacacacactggggcctgttgggagttatactggagagctttgccagtccaagattgattactgcatcctagacccatgcagaaatggagcaacatgcatttccagtctcagtggattcacctgccagtgtccagaaggatacttcggatctgcttgtgaagaaaaggtggacccctgcgcctcgtctccgtgccagaacaacggcacctgctatgtggacggggtacactttacctgcaactgcagcccgggcttcacagggccgacctgtgcccagcttattgacttctgtgccctcagcccctgtgctcatggcacgtgccgcagcgtgggcaccagctacaaatgcctctgtgatccagaatgggggctgagcccagattcgaatgccggtgtccctggttttgctgctccagtgcctggcctggaacttccaaagggcatgtctcatactcaacgaataactcaacaagttactgagaaatgcaatttggcacttgaatggtgttga

SEQ ID NO: 140797 - DNA, 1103 bp, Homo sapiens
atgcccggacctgcccggcccgaactaggcaaagtccagcgaataggtgaagaggcggaagcccccaaagtatcagcgccgcttcgtggagcctggcgactgctttgggaagtcctgctggcaggcactctgcccctgggggtgtgcaaagagttgtccagttaccttgatcttctcacagcctcctccccagggcaccaggagagaccaggattggaggacggtaaagaacacacttcccagaggattcttggagacctggagaccccgcactcagggcgttcaggaactccccgacccaccaggagcctctcctggtgtctcccagggattgtcaatagttccattttccttgaagaacttgttttcaggtcgtctttacatccccaaccacgttacaaggtggatgtgatgatccctgttggtgaggacacgggagctcagggaagccagcccaaggctacagagccagcattgcacagtcagatatcagtggagtacggcactggttcagaggaaactgtagcagcctctctgggggcagttacattgagaagtcccttcctgctggaggttctcagcctgaatctgctattccagtggcttgactgtcatgctgtcatcatggctggatctgatacggccaccgtggaccttgaggtgacctcgggaatggagacagtgcatgggagagaatcacattggaaggggcctgggtttctgaagaccctggacatggatggagctggaagccattatcctcagcaaaccaacacgggaacagaaaaccaaacactacatgttctcacttataagtgggagctgaacaatgagaacacatggacacagagagaggcacaacatacaccctatggactgtttgggggtgtgtggtgggggaaaggagagcatcaggaaaaatagctaatgcatgctgggattaatacttaggtgattggttgatagatgcagtaagtcaccatggcacacgtttacctatgtaacaaacctgcacatcctgcacacgtaccccacaatgtaaaatgaaattaaaaagcaacaataaacaaacagaatcatgggctcataaaaaaaaaaaaaaa

SEQ ID NO: 140798 - DNA, 571 bp, Homo sapiens
tagggattcagtgattgtacaagagcagtgggggtttctggacaaagtagagaaaatcatttgtgtattgttatgcaaatagcttacagaactattaataattttgttttctttaatttgtaatttcttatgtaactagtccatttgctttcacccagtgatgagcatcttacctgcttcactcggtagcgctccattcctaatctttttaagggacaaattcatcaacttgggcggttaaaagtctatcagtaacatgatcccagctacttctccaggattcctcttgaggctgtccttactacatgtggcactacactggcaggccacactgtgtgacttattccctggggtttctattgtttctgccttgcttttctcatcctttagatattagcattattggctgggcacagtggttcacacttgtaatcctagcactttgggaagctgaggcaggcagatcacttgagcccaggaattagagaccagcctgggcaacaaaaatgtcggctgcagtgagctgatactgctgtccaccctgggcaacagggtgtgagacctcatctca

SEQ ID NO: 140799 - DNA, 765 bp, Homo sapiens
  misc_feature (1)...(765): n = a,t,c or g
ggcaccgccccggaattcccgggacgacgatttcgtcctggatggatgcatggggaaggttagaagcacggtacatgtcatacctacattcaaggagaggggaccatgcgtaggataaactgcagagagacaacagatttgcatcccagacacattcacactgggccaagagcagctgccattgcagattcgagtcacgtccttttttccttccttctccttcttggagttacaacagaagctggggaggtgagagtgcagaaaggacgtggatgaagcagagaggcacgtgcctgtctcattcgcctctggatctgctgcatccaggactgtgccagcacaaagtgggagcccgataaatatttattgaagaaatgaaaggtgacaaaaggcagaaggagggagaccccaaaaagagttccagaggctgggaagtccaaggtcaaggcaccagcagattcagtgtctgatgaaggctctctctttgcttccaagatggcggctcttactgcatcttcacatggcgacacagcattcaacccctctggaggaagtagcatttaaggcaccatcttggaagcagggaccagagcctctccagatactaaacctactggcaccttgatcttggacttcgcagactccagaaccgtaagcatagatttctgttctttataaattactcagtctcagcaggaatggactaagacaaccaggaataattcttcgattngtacagaaatgaagcagataggttggttgatt

SEQ ID NO: 140800 - DNA, 381 bp, Homo sapiens
agcggccgcccttttttttttttttttttttttttttttttttttagtgtaaaggttttttaattgggtatatgtagcattagacaaaattatttaaagtcaataaattgttattcgaggaattccatgttgggatttcttccactgtccatcaagggcactttagatcctttaaagagctggagtcaaaagatttatcttcaagtttgcccataattactttggcttctgtcatctcgttttaatatggatatactgatgaagacttcaaaattcacctttttactgtaggtggtggggatctacctggttctcaatttgacaccctctcaacatgaatgagttcaaatcacattcattcctttgacattcatgatcctg

SEQ ID NO: 140801 - DNA, 444 bp, Homo sapiens
gcaacacatcttgaagataacgaatgtgatatcaaattggcaggggatagtttcatagtaagttctgaattccctgtaagactgagtgtatacttagaagaagaggatattactgaagaagctgctttgtctaaaaagagagctacaaaagccaaaaatactggacagagaggcctgaaaatgtgacaggatcatgaatgtcaaaggctttttcttgagaacatggtgtctggagttaaagggctgacaggacaactggatcagtttcattaaaaagggcaaacttgaagataaatcttttgactccagctctttagaggatctaaagtgaccttgatggacagtggaagaaatcacaacatggaattcctcgaataacaatttattgactttaaataattttgtctaatgctacatatacacaattaaaaaacctttacacta

SEQ ID NO: 140802 - DNA, 202 bp, Homo sapiens
tttgtttaacgtggacaaagacttacagataggtgcaaaaaataaatcctcttttgcaacccagaactcattgttcagtatgagttttgatacatataagaagggatattatgatacctgagacagttgattgatgggagtattgatagccataaaggttggttccaggccaggtgcaatgggtcaagcctgcaatccccac

SEQ ID NO: 140803 - DNA, 669 bp, Homo sapiens
tttttttttttttttgactttctagaaatagtgtaaaggttttttaattgtgtatatgtagcattagacaaaattatttaaagtcaataaattgttattcgaggaattccatgttgtgatttcttccactgtccatcaaggtcactttagatcctctaaagagctggagtcaaaagatttatcttcaagtttgccctgaagaagagaaattttgattaaccataattactttggcttctgtcatctcgttttaatatggatatactgatgaagacttcaaaattcaccaagaatctttgggatctaatttcttcaaccaatttactttagggtcctttttactgtaggtggtggggatctacctggttctcaatttgacaccctctcaacatgaatgagttcaaatcacattcattcataagcgatcactcaagaatggtacagatgtgtggagtatgccaatacctaaggtaaaaaagtagattatctggtttttcataacgtttagcaaccgtctttttcaaacttttagcaactgtcttgtaattccttcccacagatctaacaatagtcctgtgagtaaagtaaaaccacagagttactctatgaggcgtttccaacgatgtgcaggctacaggaaaagccccatcgggctcgtgcaatcactct

SEQ ID NO: 140804 - DNA, 943 bp, Homo sapiens
gaaataaggaataaaattcatgtctctgaaaattctcaaatcaaaacagttaaagagaaaccatctataagttcatctgtgagtcgtctaaagggcgtgaataaagtcagagcatcttttcctgaagacagaaaagactacacaggctctaaggcaccaaaggggtcttaaggttatacaatcaactagctgaagtgaaacaacaaaaggaagaaaaaacaaaacaagaagcttatgcccaaaacagagcaagggcaaaagaattccataaggtgagtataactgagggggaaggacttaatttttcaagcatgaagtacacaactgaaactcaaatttttattccttccacagaaaacactagagaaacttcgagccaaaaatacatgctgactttctagaaatagtgtaaaggttttttaattgtgtatatgtagcctcaccccaaaattatttaaagtcaataaattgttattcgaggaattccatgttgtgatttcttccactgtccatcaaggtcactttaggatcctctaaagagctgggagtcaaaagatttatcttcaagtttgccctgaagaagagaaattttgattaacctttaaaactctcacatggcaacaatcatggattattacgttttatatctcctcaggaaaacatagcacccaaacattaggagggctatagggcttcctatagagaacttccatctttggtcacagcgttaagagctctgggtttcacagcctcataagccctctttgaaatgaacccatacaaatgtcttttctaatgcatacatacctttttaatgaaactgatccagttgtcctgtcagccctacataacaatagtataaaagtaaattttacatttccagagatgagtgtacagtgagtgaacatgaatgagtccctagaacgagcctgagttaactcta

SEQ ID NO: 140805 - DNA, 3543 bp, Homo sapiens
  misc_feature (1)...(3543): n = a,t,c or g
aacaagcgcctcagacttcagtgtaagtctaacactgaatggagggaagtaccaatgggtagacccctcttagacagccatgcagtataagaaatgttcagcaagaacccgtggggagattctcaggaacaggcctgccactgtcagtggctaggagcagcccatgggaagcatggcctcagtgcaaatggagatttcagaatgcaggagattaagatatccgccagcccgaccgcgggcagggcccacggcctgcggagcctgagaaacgcgagccgtacctgcgttcgcaacaaggcgccttcctgggatcccattcctccggaatacaatcccagctcttgggcctcggggagtcatgctcctacggggcgactgggaagccagtgcatccctgactcacctgagaacccggggcctggacacagtaaccgcagctcagagcaagccagcctgattttgcagtctgggtcatgggggttaaacatcaggaatcaaaggattaaaaatggggggtggggatgggaagttgctgacacgatcagatctggctgcacagtggggaaaaggtcagagagagtgaagacagaaggccgtatactactacagaaagtgaaagataatagcaatgagaatggagagagacccagacctctaggctaccggggtaggcatgtgacccagactggacaaatcgcagttcttgtttccattgccattgtgaccaaccgaggtacagctgaaggaatctgttgttgaaaatcatgcagtgttaagttatgctgtggaggaagaacatgcatatttgggtccaactgtgaagccagatgataaggctaaaacactgtcttatgaaccattatcttcagcaactgtttccactgggagccttttaagttatgaaaacacagatttgagccttacagatccagagtcattttcagagcacatggatgatagcaagcaagaatctaccaccagtaaagaagaggaaacaaatattataagttccataggtccttcaacacaagatatttattagcgtcagaactcttcagacgttcataaatctctgttgcctgcagaggaggaaactacatggggccacactcactttcagcagatgatagacaagtacattagtgaagcagatttgatacctgaaaaaacagatttgcaagaattggaacacatttttcctaatttgcatcatcagctgtgttaaacccttacaaccacatccagattttgacttatcatcatcatcctctgggatttctccagacaacagagacttttaccaggaggagagccagcatgctgatctaccaagtatttttagcattgaagcaagagattcttcccaaggcatgaaaaatcagaactatccctctgaagaacatactgaaatattacaaaacaagaaaaaaattgttcatttccagctttctataggaaacttacatatcactctacttaccatctgatgaggctacttacttcgatcatgtgaatgtactctatagcactccatgtggttctaactctagtgagtgctcaacaaaacaccaactagaaagcagaaaggaaagtatgggctttgaagaactatcaaaaagaggggttgttacaatgttacaaagtcccggactcattgaagataataaaaatgaaacctgtacggttttagacataaatccacaggtagaggaaactgactctcgattatgtgtaagaacagtggagatgggaacttcaattcaggcaccatattccttaactactcaaaatgaaaaatattttgagaattcagctgaaacagacattccaaaaatcaccaaaaaactatctcaactaggagaatcagagctttttgcaagttctggatcattttcattacagagctctataccagtctgggaaaccagaaactggccatggtataatggaagaaccagaacttactttaataagcaccactgataccagtattgctgaaatggattttgcaaatttaacccctagaagagaagagcgagaatgaagcaaaatgcttctttcaggtgagtgtgtttctgcctcttgtatcagcaacagaagcctcagattatccagctgtatcagaactttccatagaaaaaccaaggacagcatctacagcagaaaccccctcgcaggcttacacctgtaccagggagcttacaagaagcatttataaagaggaaaaaatcatttatggagagatcccaccagaggcagaaagaaataaggaataaaattcatgtctctgaaaattctcaaatcaaaacagttaaagagaaaccatctataagttccatcctgtgagtccgtcctaaagggccgtgaataaagtcagagcatcttttccctgaagacagaaagacctacacaggctctaaggcacccaaaggggtctaaggttatacaatcaactagctgaagtgaaacaacaaaaggaagaaaaaacaaaacaagaagcttatgcccgaaaacagaggcaagggcaaaaggattccataagaaaacactagagaaacttcgagccaaaaatacatgctgactttctagaaatagtgtaaaggttttttaattgtgtatatgtagcattagacaaaattatttaaaagtcaataaattgttattcagaggaattccatcgttgtgatttcttccactgtccatcaagggcacttttagatcctctaaagagctgggagtcaaaagatttaaccttcaagtttgccctttttaatgaaactgatccagttgtcctggtcagcccattaaatcactttgggcttctggtcaatcttcgttttaaatatgggatatactggatngaagacttcaaaaattcaccaaagaatctttggggatctaatttcctccaaccaatttaactttaagggtcctttttactggtaggggggtggggggatctaccctgggtttctcaatttggacaccctctcaacatgaatgagttcaaatcacattcattcctaagcgatcactcaagaatgggtacagatgtgtggagtatggccaatacctaagggaaaaaagtagatatccttaactccagacaccatggttctcaagataaaagctttcttgcctaggctggtcttgaactcatggtttcaagcaatactcccaccttggtgtggggattgcaggcttgacccattgcacctggcctggaaccaacctttatggctatcaatactcccatcaatcaactgtctcaggtatcataatatcccttcttatatgtatcaaaagctcatactcgaacaatcgagttctgggttgcaaaagaggatttattttttgcacctatctgtaagtctttgtccacaagttaaacaaaaacatacataagtgcagtcccaaaatgcactacatagcagagtagtcagctctatcgtggtgatcaaaataatgaacatcggggtaatgactggttctccccaggtatacatgttgaataaatgtgtatgccttttcttgaactaataa

SEQ ID NO: 140806 - DNA, 2038 bp, Homo sapiens
  misc_feature (1)...(2038): n = a,t,c or g
gatctgtccacgaggaagagaaaatggctttacctttaggacaatctcattgtggactgctttatttatattattagtaacgctgttttaagtgttattctttttattgtattttatttataaaaaatgcctttatatattgaaatatataaatatatataaacacacacacacacacacacacacacacacacatatatatatatatatataattgcctttatatttaggcggtatgagttctccctaagcgtgagttggctctgccctgcacaggcacccaaacagtcctacctaatgtcacttcaccaggaaatgagaggacatggtacagtgtgggagacagcactaacacgtgctgaataactactgtgtaccaggcaactggtgctcggtgcttgttactgttaactcatttaacccccacaactcatctacaaagttggcattaaaatccccaagtcactcagtgagccatgggacctgaatccgaacctagtttatctggagccataatctggggctcctcccatttttccatactgctttccaaaagctttgcgggtttcactctttgggatgggaaccagtcccgtttccgtatggctgtgattctattccctggccgtgggaattcctccgaggctccaactccgcagccggagaagctgctctctggcctccgcgggcagagctctgcttaatacttcgtcttccagaggtccacatttctccccttgacgccccctgtctaccacctccacctggaaatttgatctttactgtgctcagtgatcacgaaattggtcaagcctattcatgttccttctcatctagaattctgtgtgattgttttagcataaactgccccggctcccactgtatccatttccacgatctccttttaaatgtttttctttccagttttgccactgaccagtctggtgaacaggtgctgccaaggggtgccaagttaccattgcaaatggttctaaaacccttttgaaagtgttcttagcaaaagcctttctttctgggtgtttttgtcgaatgagtctatgaagacctcaatgcatcccatcttgggctgatcatgccacagatctcattcccagcctatagtactgcccaagaagtgaagtttatcattgaattttacctgtgttgctctcttttaaagtaatgactttgagatgcatgctttgtatcatatctgaaaagtatgttttattttccttaaagttgtaatattgtgtgtgaaactgtacatattttaaatgatgtagctttggcaggttttatttggttgatatgattttatattaaaagagaaggctgctttcatataggcatagcccctgaaggtggggaatactccctgtttgtacaacggctgcttattagtttgtggattgggggtgggccgaatgtcttcctctgaaattctttggggaaccccccacccctgtccctcccctggaaactcccctgtggcacacccctctgttcctggactgcaggaggattcaagggccctgaagggagcagggatcttgggggcaagtgtttttggggggacgctgtggaacataccttgacccctggggggcgatgtgggaggcagnccccacctccctcggggcaactttgccgtttcccttggagggaagggaggtggggtaggagaggagcttggggaggatgaggaggagcggtccccgccctcacacattgtcctatttttacccattaaccgagcgcccacatgtttatgaacttcaggatagaaatttagcctccttgtgaaaacgttttgttttactgccctaagaaaatacacatctctaggcttgtctgaccagaaagccagcaaagtcttttgcatcgggtgtggcccttttgtattttatttcccatatttaaataagccttccttaaaccctagccccagtcctgagagctttgagggtagccgaaaccccttatctaataaagtctaactctgtgagaaccacagaatcttcttaagcttctcaaa

SEQ ID NO: 140807 - DNA, 4944 bp, Homo sapiens
agtgggatcattttggcagtaattttgagactctgtccgtctggataactgagaaagaaaaagaactcaatgccttggaaacttcgtcatctgccatggacatgcaaatcagccaaattaaggtgacctgctcacacattaaaagtaagctcagcagcattgtaggattagaagaagaagcccagtcttttgctcagtttgttaccactggagaatctgctcgaattaaagccaagttgacacaaataagaagatacggggaagagcttcgagagcatgcacagtgtctggaaggaacaatcctgggacatttatctcagcagcaaaagtttgaagagaaccttagaaaggtaagaattgatccacctaaatttgaagataaacttgctgttccaattaaaatatgttcttcagctacagaaacatacaaagttcttcaagaacatatggtaagagtatgcttcaacaagtcactgagcagcgcgatcactgccttctcagccagtgccaggaaggttgtgaacagagattcctgtgttcaggaggctgcggctctacagcagcaatacgaggacatcctaaggagggcgaaggagagacagacggcgctggagaatctgctggcccactggcagaggtgagcagcacttttcctttcctttttgacctggttagagcggggtgaagctaaagccagttccccagaaatggacatttctgcagacagagtcaaagtggaaggtgaacttcagttaatacaggcaagttcaaggaagtgtgaggaaggaaaaaataagaaaatgatgaaactacatttggagcagttggatgagagatggagagatttaccacagatcattaacaaaaggttggttctaaaagataaagtggttgctgaacaccagcaatttgatgagctgctgctttccttttctgtctggattaaactgtttctcagtgaattacaaactacctctgagattagcataatggaccatcaagtagcccttactcggcataaggtaaagtggttttttttttagagcaaaaagggcgaattgcagagtctgcagggtcacttagcaaagttgggttctctgggccgtgctgaggacctccacctcctgcagggaaaggctgaggactgcttccagctgtttgaggaggccagccaggttgtggagaggcggcagcttgccctgtcccatttggcagaattcctccagagccatgcctctctgtccggcattctccgccagctgaggcaaacagtggaagcaaccaacagtatgaataagaacgagtctgatttgatagaaaaggacctcaatgatgctcttcaaaatgctaaagcattagaatctgctgccgtcagtctggatggcattctttccaaagcccaataccatctgaaaatcgggagctctgagcaaaggacttcctgcagagccacggctgatcagctctgtggagaggtagagaggatccagaaccttctgggaaccaagcagagtgaggcagatgctctggcagtgttgaaaaaagcattccaagaccagaaagaggagcttctgaaaagcattgaggacattgaagaaaggactgacaaagagcgattgaaagaacctacccgccaagctcttcagcagaggtaaataggaaactgtcacctagaagatgaattgaattctcacgagcatgaactatgttggttgaaagacaaagccaagcaaattgcccagaaagatgtagcttttgcacctgaagttgacagggagataaaccgcttagaggtcacctgggatgataccaaaagactaattcatgaaaagtaagtcaaaacccacccacttattgacttaatgagagaatatcagaacctgaaatcagctgtatctaaagtcttagaaaatgccagcagtgtgattgtaaccagaactaccataaaagatcaggaggatcttaaatgggctttttccaaggtaaaattcaaaatgtgttaaatgaattacaaacagaaagacttggataactttaccagcaaaggaaaacacttgttatctgagctgaagaaaattcacagtagtgatttcagcttggtgaaaacagacatggagagcaccgtggacaaatggctggatgtaagataatcacctgggaaaaacatggataggctgagagtaagcctgtccatttgggatgatgtactgtcaactagagatgagattgagggatggtcaaacaactgcgttccacagatggcagaaaacatcagcaacctggataaccacctcagagctgaagaactgcttaaagaatttgaggtaaattgactgtgttgaccattgagattggaagaactgcattccaaagttaatgatctgaaagaattaactaaaaatctagaaacaccgccagaccttcaggtaagcattttgtaataactgcagaaactggagcatgccaaagaaataactgaagtagcaaaaggaaccctgaaggatttcacggctcaaagtacacaagtggagaagtttattaatgacataacaacatggttcacaaaagtggaagaatcgttgatgaactgtgcccaaaatgagacttgtgaagcattgaaaaaagtcaaggtaggtaataaactatcataaagtcaacaaagcaacatcagctctacccaagaaaatctcaatagcttgtgccgcaagtaccactcagctgagttggagagcctgggccgtgcaatgactggtctgataaagaaacatgaagccgtgagccagttgtgctccaaaacccaggccagcctgcaggaatctctggaaaaacacttcagtggtgagttctgaggggccttagaatggtttttgggagcaaaggcagcagcaaaagaatcatcagatcgcaccggtgacagcaaagttctagaagcaaagctccatgatcttcaggtatagaagctgacatcctgtgatgggcagagcaaacttgatgcagtgactcaagaaggacaaactttgtatgcacatttgtctaaacaaattgtcagtagcattcaagaacaaatcacaaaggccaatgaagagtttcaagcatttctgaaacaatgccttaaagataagcaggctcttcaagactgtgcttcagaacttggaaggtaggttagtttaacaaacaaactgaacttatggatccatgaaatggaagaaaggttcaatacggaaaacttgggagagagtaaacagcacattcctgagaagaaaaatgaagttcataaagttgaaatgtttttgggagaactgctggctgcaaggtatggtccagaaatggaatcccagagagggcagcttctgagtgaagaaggccacggtgctgggcaggagggccgcctgtgttcccagctcctcacaagccaccagaacctacttagaatgaccaaagagaaactccggagctgccaggtggcccttcaggagcacgaagccctggaggaagcactgcaaagcatgtggttctgggtgaaggccattcaggacagactggcctgtgcagagagcactcttgggagcaaagacaccctggagaaacggctgtcacaaatacaggtacatgcgacaccagccagtgaaggggaagttaagttgaatatggccattggcaagggggaacaggccttgagaagtagcaacaaagaaggtcagagggtgattcagactcagttagagacccttaaagaagtgtgggctgacatcatgagctcctccgtccacgctcaaaggtacagaacctatttttagagccaatggaatgactatgtagagaggaaaaaccagttggagcagtggatggaatcagtggatcaaaaaatagaacatcccttacaaccacagccaggtctgaaagagaagttcgtcctgcttgaccacctccagtccatcctgtctgaggcagaagatcacacgagagcccttcaccgtctaattgcgaagtccagggagctctacgaaaagacagaggatgagtctttcaaggacacagctcaagaggagctgaaaacacagtttaatgatataatgactgttgccaaggttagtgctttatattgaaaagagattgtgaaagatcatctaatgtatttagatgcggtccacgagttcacagattggctccattcagcaaaggaagaacttcaccggtggtcagatatgtctggagattcatcagccacccagaaaaagttatcaaaaattaaggtcaggaaatgaacagatgagattggtgcaagccgtctcagcagagtggagtcgctggctcccgaagtgaaacagaacacaactgccagtgggtgtgagctcatgcacacggagatgcaggccctgcgtgccgactggaagcagtgggaagacagtgtattccaaacgcagagctgtttggagaacctggtcagccagatggccctttcggagcaggaattctcaggccaagtggctcaactggagcaggccctggaacagttcagtgcccttctgaaaacctgggctcagcagttaaccctcctggaaggcaagaacacggatgaggagatagtggaatgctggcacaaaggacaagtaagttggcttcctgtttaaaaagcagagcctagaacagaggatctcaagtctcagctgaatgaactttgtcgattttccagagacctgagtacctacagtggaaaagtttctggcttgattaaagagtataattggtgagcatgaaccttattgaagggctgccagaataaagaacagattttacagcaaagatttcgaaaggccttcagggatttccagcagtggttggttaatgcaaaaatcactaccgccaagtgttttgatatacctcaaaatataagtgaagtttcaactagtcttcagaaaatacaggtaagggtgttatcaatta

SEQ ID NO: 140808 - DNA, 556 bp, Homo sapiens
ttgagattcataccaagacatatagacatggagagaagctaatcatcacttgtcatgaaggattcaagatccggtaccccgacctacacaatatggtttcattatgtcgcgatgatggaacgtggaataatctgcccatctgtcaaggctgcctgagacctctagcctcttctaatggctatgtaaacatctctgagctccagacctccttcccggtggggactgtgatctcctatcgctgctttcccggatttaaacttgatgggtctgcgtatcttgagtgcttacaaaaccttatctggtcgtccagcccaccccggtgccttgctctggaagtctgtccactacctccaatggtgagtcacggagatttcgtctgccacccgcggccttgtgagcgctacaaccacggaactgtggtggagttttactgcgatcctggctacagcctcaccagcgactacaagtacatcacctgccagtatggagagtggtttccttcttatcaagtctactgcatcaaatcagagcaaacaaggccctacacccatgtatt

SEQ ID NO: 140809 - DNA, 731 bp, Homo sapiens
tcccaagaatgggtttcagggccccccagcggagggggttttcctttaaaggctctgtagcccgatttccactgccaagacgggattcaagttaaagggcgttacaaaaagactgtgtttgaagcattttaatggaacctaaggctggatcccaagtgataattccatctgtgtgcaagaagattgccgtatccctcaaatcgaagatgctgagattcataacaagacatatagacatggagagaagctaatcatcacttgtcatgaaggattcaagatccggtaccccgacctacacaatatggtttcattatgtcgcgatgatggaacgtggaataatctgcccatctgtcaaggctgcctgagacctctagcctcttctaatggctatgtaaacatctatgagctccagacctccttcccggtggggactgtgatctcctatcgctgctttcccggatttaaacttgatgggtctgcgtatcttgagtgcttacaaaaccttatctggtcgtccagcccaccccggtgccttgctctggaaggaggaagacctgaacatcttttccctgtcctttatttcccacacatcaggttggcagctgctgtgctttatttttgccctgtgttaaagtcctctcccaccccagcacctacctgttcctcaactagcaccaccacatctctgttctaaatgttgttctcctgcaataaaggacgtttgaattaaa

SEQ ID NO: 140810 - DNA, 1394 bp, Homo sapiens
gctgcctgagacctctagcctcttctaatggctatgtaaacatctctgagctccagacctccttcccggtggggactgtgatctcctatcgctgctttcccggatttaaacttgatgggtctgcgtatcttgagtgcttacaaaaccttatctggtcgtccagcccaccccggtgccttgctctggaagtgaaaatccctgtgtctggtgctgttcgtgttactatcaccttgcctgtgaccctgggacatcctaacgtagtgactcagagatggaaagcaggggcttcagacaaaggtgagcttgtggttctgaaacttttattctcccctactgcccaagtctgtccactacctccaatggtgagtcacggagatttcgtctgccacccgcggccttgtgagcgctacaaccacggaactgtggtggagttttactgcgatcctggctacagcctcaccagcgactacaagtacatcacctgccagtatggagagtggtttccttcttatcaagtctactgcatcaaatcagagcaaacgtggcccagcacccatgagaccctcctgaccacgtggaagattgtggcgttcacggcaaccagtgtgctgctggtgctgctgctcgtcatcctggccaggatgttccagaccaagttcaaggcccactttccccccagggggcctccccggagttccagcagtgaccctgactttgtggtggtagacggcgtgcccgtcatgctcccgtcctatgacgaagctgtgagtggcggcttgagtgccttaggccccgggtacatggcctctgtgggccagggctgccccttacccgtggacgaccacagccccccagcataccccggctcaggggacacggacacaggcccaggggagtcataaacctgtgacagcgtctcaggctcttctgagctgctccaaaggctgtattcacctcccaggtgccaagagagcacccaccctgcttctgacaaccctgacataattgccagcacggctgaggaggtggcatccaccaacccaggcatcgacattgcagatgtagacagcagcaacatcaagctgcctgactggcagaccaagtacagggttgcctctccagcccgcagcacttgtgaagacaggtccggggcacccgtaggcacccatgagtcactgttcttctccatcccatcatcagctcgccaggactgggctcccctggactcccagttggaatcaccccagtgcaggctgccaaccctccagagggacttccttgtggaccctcaggctgagagaccagtccctcttgaccctgaacttactgaaatctggtgtcctaacaaaaacaggatagagcgccacatggagcactcaggcattgaggcatga

SEQ ID NO: 140811 - DNA, 2086 bp, Homo sapiens
atgagggtgtgcgcgcgcgctcggcgagcccgggttctttgtgtgtccgagcccatgcgcgcgatgggtgatgctgagagctgcctgctcagacaacagacacgcgaggtcaggaagaagccgcttataaattaccgcttccttcgcgccgccgccaacgccgagccccgaggaccgcaagcccagaggacaagctgcgccaagagggagtgcggagcgttcacccagcgggggtcagccctccacaaggcagtccgggctctggggactctgttttctaacctgaacttgtccgcctgtcagtttgtcaaaggatttgggaggtgtacttctctgaaagtctttccaaaagtcctgaatgataagaaacttatccagaaccagaaccacagcccttctgaggagctcccaaacccctgccggcttcgtgacctggaggagtcacagaactaccctgagcctcaggtgagaaaactggggctcaggaaggcagtgagaaactggaagtcagccacgtgtcaggacaggagcctggatttagcccacatctttggctttggttttgcacacagctgctgctgggagctggggccagggcaggcagaaataatcctgggctctgcagagcctgtttcaggctcatggtctaccctaccccgcccccatttccggcaaaaccaggctgagggctgggctgctagcgaagctgacagcaagagtgacagccctgtcctgtcgctgcaacaggaaaacaaccccaaaaccccagccttaagagcaagtccaacagtgcgcgactccccaggtcaggagaagccccgatgtgtgcagaatctgcagatggggctgctctcggccctgcctctggctgtggaaacaggcctccaagtacccaagagccgagcttctgggtttgaatccagctgtatgaccctgggcaagtggctttacttctctgggcctctttccatcatccgggctggtgaggaaattcactttcactacgaccagaatatttttgctcattgtttcggctttgttccgggcaaaacaatgcctggcttcctggatgacctcaccgggacaagccatcagggctgtaggccagcctggtcagcatctccgcacgagcccattcttccctttgccacggccaccttagtcaagcccctgcttgtcaccggcctgcctgggacccttggagcagccctcctgtcccacgactttaccccaaagagctctctagtctgcacccctgtctctgattcatcacccaacatccatcaggttggcagctgtaacaaacagtcccaggtctcagggctcaacacaaggaagaggcagccgctgctgctggttgtcgtgtgtctggtccagagacactctaaacatcgtttacacaaatgggagcgtgtgatgctgcccgcaccccagattcccttacatggaggccccgctggctatttcgcaacacccactggcattcacttagggcgctctgatctctcgctgaagcaaaccatgctggtgaactcccttgcctgtgtgtcatttcacatgtcggaaaaatcacctgaaaggaatggaaaacttatgcctacacaaaaagtgcatgtggatgtctacagtagctttttccataattgccaaaacctggaagcaaccaagatgtccttcagcagcgccaagctggaaacaacccacacatctaacaacaggagactgggcaaatggcctggggtagttttctacaagggaatatgtgacagcatgagagcgaacgaaccagagcaaaccagacacaaccacctgggtgaatctcacagatgtgcagttgagcaacagcagccaagcaccaaggggtgtttccactactctgcagttcccagtgttggggacagtggacaagtctggtgttaccatgaccttttgggtttaaaatggcagcatagcccagtggtcaagggcatagcttggtgccagctgtgtcctctcagtgagtcctcaacttcctcgttgcttcagctggaagatgcagaggccaaagttcagcaagccgagggacctgccttgggtctcccagctg

SEQ ID NO: 140812 - DNA, 500 bp, Homo sapiens
cgacgagcttggcgcctgcagcctctgcggggcttggcgccgccgtccgtgagcacccaggccgggtccccacatccccaggccagccctgaccgcggcggcccctccgccgggattcctttccgagagtctgagaagccaactggggccaaacaagttttagaacctctactggctgatgccaacatcatcagagatgaactgttcttaccagaaacttctctgctcctgacaccccacctctccccagaagagaagaaggagagtggccacgttgattcagccaagcacctccaggaggtcccctctggatgtcccatgaggctgcccctcagccacagcccagagcacgtggagatggctttgctcagcaacatcctagcggcctattcctttgtctcagaaaatcctgagcgagcagctctgtactttgtttctggcgtgtgcatcgggctggtgctgaccctggctgctctggtgataaggatctcttgccacac

SEQ ID NO: 140813 - DNA, 536 bp, Homo sapiens
  misc_feature (1)...(536): n = a,t,c or g
cgggacaggaatgagaggatggatgctgtcaggggcttggagcttctgcggggcttggcgccgccgtccgtgagcacccaggccgggaccccacatccccaggccagccctgaccgcggcggcccctccgccgggattcctttccgaggtactggtgccggcccaagacccgggcagcgctttgtcgtgtccgccccttcaatgatcagctccgggtccccctgctcggccccgcgcgccccaagcgcagtccccggaagtgcgcgccggggccccagcaaagaataaaagaaggagagtggccacgttgattcagccaagcacctccaggaggtcccctctggatgtcccatgaggctgcccctcacccacagcccagagcacgtggagatggctttgctcagcaacatcctagcggcctattcctttgtctcagaaaatcctgagcgagcantctgtaatttgtttctggcgtgtgcncgggctggttgtgacctggctgctttggtgataaggatctcttgcncacagatgca

SEQ ID NO: 140814 - DNA, 539 bp, Homo sapiens
tttttttactgcaagagatacatatttattttttaaaaaaaaggaggggagaggggaggctgaggctgaggctgaggctttcccccaacctggggcagggcagggagcaacaaaatggtctgtaggaactgaagaatgatgcttcacccaaaaggagacttaacttctagtctcaaagattgattgccagccaaggaggaagaagggcattccaaaaagtcaggacctttgctggggccccggcgcgcacttccggggactgcgcttggggcgcgcggggccgagcagggggacccggaagctgatcactgaggggcggacacgacaaagcgctgcccgggtcttgggccggcaccagtacctcggaaaggaatcccggcggaggggccgcgccgcgggtcaagggctggcctggggatgtggggtcccggcctgggtgctcacaggacagcggcgccaagccccgcagaagctccaagcccctgccagcatccatcctctcattcctgtcccgtcgcctgctttgagcctgtattcag

SEQ ID NO: 140815 - DNA, 441 bp, Homo sapiens
gatgaaaacagggaattgcttgggggagctggatggaatcgatgtgcttcttcagcagttatccgtgtttaaaagacacaatcccagcacggctgaggagcaggagatgatggagaatctgtttgattccctctgctcctgtctaatgcttagttccaatcgtgagcgcttcctgaagggcgagggtcttcagctgatgaatctcatgctcagggaaaagaagatctcccggagcagtgccctggaaagtgctgggaccatgccatgattggccccgaaggcacagacaactgccattaagtttgtttgacattcttggctttacggaaccatctttcccctctttatgaaatctcccaggaagatcaagaaagtgggaaccactgagaaggaacatgaagagcaatgctgttcgatcctggcttccctcctgcggaacct

SEQ ID NO: 140816 - DNA, 2406 bp, Homo sapiens
atggagagaatggccatagcagatctgggcaaagtggcagtgatatttaatcatcacttcagaccatctgcaactgttttgcagaagcacatcaagtttatagattctaaagcttcctacaagttaccaggtgctgaggacttgaatggaatgtttcctaaggataagcaaagaaagtggcttctagagataaactctactcctagtgaagatgctgtggacattgttgaaatgacaacaaaggatttagaatattacatgaacttagatgataaattggcagcacagtttaagagaactgactctaattctgaaaaaagttctactgtggtaccattatggtttagagttctttcacttgaagttcacagagaaaagaattataatgtccattttcccatttgggacataaggttcaaatgggaaggttatgggcccaaagttgaaccagaccccaataggggcacaaaacgtccccgggatgatgaagaggaggagcagaagatgcgtcggaaacaaactggtactcgagaacgcggccgctatcgggaagaaaaaatgactgtggtggaggaagcggatgatgacaaaaaaaggctgctgcagattattgacagagatggggaagaggaagaggaagaggctcctggaaggaaagcagctgttcagtgccccgggctgacaaagcagcaaccttatcacttagggaacatttcaaaagccaaattcctggctgccagcctagggccagcctttgcccaaagaagactgatcgtgcctgccgttagtgatagctttactgtggagatcatttcagaggctctgaagttagacagatattggttcatggaatccgagctggacctaaatgacatcattcaggagatgcacgtggtggccaccatgccagacctgtaccaccttctggtggagctgaatgctgtacagtcgcttctcggcttgctcggacacgataatacagatatcctttcagatctgacctcagtaggagagctgacatgtactagaattcatcgtgatatatctgttcatacattaacagctttacttttcaggatctggattggaaggccccttatgggggcaaagccagacagatttgaatgtgtaaatctaggcatctttctgctgactgatggtccagtggagttgagactagagatagtgaaccatgctgtggtcgatttgcttcaggaattaacagatatagacaccctccatgagagtgaagagggagcagaagtgctcatcgatgctctggtggatgggcaggtggtagcactgctggtacagaatctggagcgcctggatgagtctgtgaaaaaggaggcagatggcgtccacaacactctggctattgtggaaaacatggctgagttccggcctgagatgtgtacagagggtgcccagcagggtcttctacagtggctgttgaagaggctgaagttagtattgtctaatagagtaaatgagaaaaagaagaggcaagagctcctctcagaacagtttggaccaaaggcaaagatgccttttgatgccaacaaactgtattgcagtgaagtgctggccatattgctccaggacaatgatgaaaacagggaattgcttggggagctggatggaatcgatgtgcttcttcagcagttatccgtgtttaaaagacacaatcccagcacggctgaggagcaggagatgatggagaatctgtttgattccctctgctcctgtctaatgcttagttccaatcgtgagcgcttcctgaagggcgagggtcttcagctgatgaatctcatgctcagtcattcatcagacagttgtgaaatgcccacatggagaggtggcagtatggagcagggtggaagaatgggcctgggacttgtaagtgtgggtttggaacatgctcttttacttactagctctggatatttggcatgcaagcttggcactggccgttgttttacaacggcggagactgggaaaaaccggggcggtaccccaaacttaatatggccttggcagcacaattccccctttttcggcaaggttggcggtaatatagcgaaagaagcgccccgcacccggattcgcccttcttcccacaaccaagttggcccccaggccttgaaatgggggcgaaatggggggcctcggaagcgcggctccaggcggaagcaaccctgttccaaatgcagcgcgctttacggcggcgcgtccttttaccgcggtgtggccggctcgcttgtcgctcgcacttttgccctattggctctgcggctccgctcgccgcactttacggcagtgtggctggagccgcggctgacgggcccgcggtctgggcgagggtcattgcgaggagcagtagagctgcactgccgaatgtcgtag

SEQ ID NO: 140817 - DNA, 1317 bp, Homo sapiens
tcctatttccccataggcaaagatgccttttgatgccaacaaactgtattgcagtgaagtgctggccatattgtttttttcccctttagaaaacagggaattgcttggggagctggatggaatcgatgtgcttgtttttgcttgacaggtgtttaaaagacacaatcccagcacggctgaggagcaggagatgatggagaatctgtttgattccctctgctcctgtctaatgcttagttccaatcgtgagcgcttcctgaagggcgagggtcttcagctgactttactttgactcagtcattcatcagacagttgtgaaatgcccacatggagaggtggcagtatggagcagggtggaagaatgggcctgggacttgtaagtgtgggtttggaacatgctcttttacttacatatggtttatatcagaggttaccccctcagccccagaatgcacagccctcttttgttcacagggaaaagaagatctcccggagcagtgccctgaaagtgctggaccatgccatgattggccccgaaggcacagacaactgccataagtttgttgacattcttggcttacgaaccatctttcccctctttatgaaatctcccaggaagatcaagaaagtgggaaccactctgccacccctgccagctgctgccactcctacaaaccggccttcggccatgaatggcagagtgagaatggaggcagagcagagcagtgcgcactgtgcagggtttctctgaccttccctataggcaaggccaccctgtgacaagcacctaggggtagcccagctcctaggtggaacactgaggcctgggaatcagctcgccagtccagaagctctagagagctaccccacactcttccctttctttcttgtgaagcttcagcgcttgtcactgttgtccacaagagcaccaggatggctaattactgtgcttattagtatcatgctagagaataaatctgtattttctgcttcctgtgccagcgtgtgtctaactctaccacacgtagtttctagaggctaccagggtgatgtcagaggctgcctaggagcaggaagaattcctgtggccgtggtgtgggtgtcttccctgaacagagaagatgacatggccaggctgaggggagttatggaatactgctgccagcaaggacacactgctgctgatttgcagccatgcccagcatctgccttggctgcccgtcattcccttttaccaaatatttatgatgaagcgggctggagagctctttccttgggaatgcatcttggattccatagtggcagacaagtagaatt

SEQ ID NO: 140818 - DNA, 1917 bp, Homo sapiens
atggcagaaggtgaaaggggagcagacgtgccacatggcctcggggcctggctggccgacgtggcgttggcggcgctgcgcgcgggagggcagggcaggagggacagaggcgggggcgggccggaaagtttgtccggcggcagcggcgttggggactccggcgggggatgcgcgcccggcccctcagcgcccccagcacgccgccgagtcccgctcgccatggggcccaggaatttgctgattgattggatctggatcatggacaccaccctggggctgggcactgagggtggaggccactccccacctgtcctgcctttgtgtgcctctgtgtctttgctgggtggcctgacctttggttatgaactggcagtcatatcaggtgccctgctgccactgcagcttgactttgggctaagctgcttggagcaggagttcctggtgggcagcctgctcctgggggctctcctcgcctccctggttggtggcttcctcattgactgctatggcaggaagcaagccatcctcgggagcaacttggtgctgctggcaggcagcctgaccctgggcctggctggttccctggcctggctggtcctgggccgcgctgtggttggcttcgccatttccctctcctccatggcttgctgtatctacgtgtcagagctggtggggccacggcagcggggagtgctggtgtccctctatgaggcaggcatcaccgtgggcatcctgctctcctatgccctcaactatgcactggctggtaccccctggggatggaggcacatgttcggctgggccactgcacctgctgtcctgcaatccctcagcctcctcttcctccctgctggtacagatgagactgcaacacacaaggacctcatcccactccagggaggtgaggcccccaagctgggcccggggaggccacggtactcctttctggacctcttcagggcacgcgataacatgcgaggccggaccacagtgggcctggggctggtgctcttccagcaactaacagggcagcccaacgtgctgtgctatgcctccaccatcttcagctccgttggtttccatgggggatcctcagccgtgctggcctctgtggggcttggcgcagtgaaggtggcagctaccctgaccgccatggggctggtggaccgtgcaggccgcagggctctgttgctagctggctgtgccctcatggccctgtccgtcagtggcataggcctcgtcagctttgccgtgcccatggactcaggcccaagctgtctggctgtgcccaatgccaccgggcagacaggcctccctggagactctggcctgctgcaggactcctctctacctcccattccaaggaccaatgaggaccaaagggagccaatcttgtccactgctaagaaaaccaagccccatcccagatctggagacccctcagcccctcctcggctggccctgagctctgccctccctgggccccctctgcccgctcgggggcatgcactgctgcgctggaccgcactgctgtgcctgatggtctttgtcagtgccttctcctttgggtttgggccagtgacctggcttgtcctcagcgagatctaccctgtggagatacgaggaagagccttcgccttctgcaacagcttcaactgggcggccaacctcttcatcagcctctccttcctcgatctcattggcaccatcggcttgtcctggaccttcctgctctacggactgaccgctgtcctcggcctgggcttcatctatttatttgttcctgaaacaaaaggccagtcgttggcagagatagaccagcagttccagaagagacggttcaccctgagctttggccacaggcagaactccactggcatcccgtacagccgcatcgagatctctgcggcctcctga

SEQ ID NO: 140819 - DNA, 648 bp, Homo sapiens
catgagagagaggtttattgtctattttgttcattgctgaagctctaacccctatatcaatgtctggcacgtagtaggtgctcactcaagaatcaacgactgatccttcgaggcttctgaatgcagagagaaaaatagagccctagtcccgagtggcaacaaagccattccccacgcgtcccaccccaatgctgtgttagaatctccttctctgtcccctctctgcagaatcacgtccagaggagggggttcgtctgttttgttcgcagtttcgttcgcgacagcgtccccaggcccacaagagcgcctggggcacaaccgcgctcagcgaatcgatgaactgctttgcttctttcggagcctccatttcttcatctgcagaccaggaacagctgcacttgcctggggctgtcggatcagggcgcccgggagagtgcctgggcccgagtgggcgctgcagcaagtgaggggccacttttccggggcagaaaggaagatggaaggaagcgcgaccgagccccgtcccagcccccgccgcaggcctgcagtctcgggctggccacccgagaggcggtatccggccggggcggccccatggcgagcgggactcggcggcgtgctgggggcgctgaggggccgggcgcgcat

SEQ ID NO: 140820 - DNA, 780 bp, Homo sapiens; identical to SEQ ID NO: 125568

SEQ ID NO: 140821 - DNA, 757 bp, Homo sapiens
  misc_feature (1)...(757): n = a,t,c or g
ttttcactgaaacaaggaatctttgcctttattgtagatatttcaatgaaaatgtcaacacgttgcaaattggcatactttgggtttgccaatatgtgataaagaactttttcaatggaaactttccctcttttcagggccgaaaagacgctctgcaactatacttaagtatcctaggcaactttattcattcaaaaacatcagagcggagtcaaaagcacaaatccatgaattgggcggcgaagtctgactccagagattacggctgaactgggtttggaaagactgaacccgcgccggtgctcctcctgtttgcttggacttaagtttgagtaccacaactctaacctgccacttcagctgcacgggcaggcttgtggggacccaacaaactccgtccagagagcggctgagtcagccagccgtccccacggttttgggcagccgccgaaggctcctgctaggcccggctggctcaccgggaagttccctgcctccgtcccgtcagcctccaggagggcgccgccggccgccgtgacttcagcaaggcactactatctccgtcagccgccgcctcggccatcttcctgcccggagtgcaacacaatccggctctggccagccttccagctgacgccactctgccagggccctgcagcctcggagcgggatagaaggaagccgcagaaaagacgctgaaagttggcgctcgctgacgcnccgaccggacgcgtggtcgaccgggaattcggacgcg

SEQ ID NO: 140822 - DNA, 861 bp, Homo sapiens
atgacatattgcctcacacctgataagacagctattataaaaaccaaaaagccatcttgtgaagaaagtgtctgcttccccaacagccatgattgtaaatttcctgaggccttaccagccatgtggaacttgttggaaattctggccagggcaatcaggcggaagaaagaaataaagggtattcaattaggaaaacaggaagccaaattgtccctgtttgcagatgacatgattgtatatttagaaaaccccatcatctcagcccacagtctccttaagctgacagagagccaaatcatgagtgaactctcattcacaatagcttcaaagagaataaaatacctaggaatccaacttacaagggaagtgaaggacctcttcaaggagaactacaaaccactgctcaatgaaataaaagaggacacaaacaaatggaagaacattccatgcttatggataggaagaatcaataccgtgaaaatggccatactgcccaaggtaatttatagattcaatgccatccccatcaagttaccgatgactttcttcacagaattggaaggaactactttaaagttcatatggaaccaaaagagagcccacattgacaagacaatcctaagccaaaagaacaaagctgcaggcatcatgctacctgacttcaatctatactacaaggatacagtaaccaaaacagcatggtactggtaccaaaacagagatatagaccaatggaacagaacagagccctcagaaataataccacacatctacaaccatctgatctttgacaaacctgacaaaaacaaaactggggaaaggattccctatttaataaatggtgctgggaaaactggctag

SEQ ID NO: 140823 - DNA, 1335 bp, Homo sapiens
  misc_feature (1)...(1335): n = a,t,c or g
atgaggnacaagttgctgtgctcggttatcacagccatgctgaagttttggtggcccctcctcaatcccagtaacccaaattccatcacgaaagggagaatacaaagtgctcatttcacttcccatctggggcatgttgaaacagtccaaacatctgaaaggaggactagagagaaagaaggctcacctcggaaaaaaccacacaaaaacaaaaagcggccgccaacaaaaacagggagcccaaaccaaacgtcacgtgacgcggaagggggaacagggcataaacccaccgctccacaaaaagcccaaaaaaaggcagaaaacactcagctaaagctaaggccacggcacaaacacaccagcgatagctcaaaccacagcaagagccaacgcagaaacccccttttatttactcttgaaatacaaactaccatcagagaatactacaaacacctctatgcaaataaactagaaaatctagaagaaatggataaattcctcgacacatacaccctcccaagactaaaccaggaagaagttgaatctctgaatagaccaataacaggctctgaaactgtggcaataatcaatagcttaccaaccaaaaagagtccaggaccagatggattcacagctgaattctaccagaggtacaaggaggaactgagaataaagtacctagaaatccaacttacaagggatgtgaaggacctcttcaaggagaactacaaaccactgctcaaggaaataaaagaggacacaaacaaatggaagaacattccatgctcatgggtaagaagaatcaatatcgtgaaaatggccatactgcccaagagaataaaatacctaggaatccaacttacaagggatgtgaaggacctcttcaaggagaactacaaaccactgctcaacgaaataaaagaggacacaaacaaatggaagaacattccatgctcatggataggaagaatcaatatcatgaaaatggccatactgcccaagcacaagcaggacgatatggaagtaaagacagagaaccgtagagggcaacagaaaaaaatggccaaacccatccccgaaaaaggagatataaggaggagacgcctctatcctccaatcggagagctgagcacctccggaggtgagggtttctttttctccagcaggtggttttcgcagagatctgttatatctgaagttccgccagagaaggccactgtcatcactcaccttgacgactgcagacgactcctaacgattcgactgtcagtctttcccacttctaatctagcaatggctcattcaacaaatacctgctgtgtgcctactatgtaa

SEQ ID NO: 140824 - DNA, 1089 bp, Homo sapiens
atggcttcaaagagaataaaatacctaggaatccaacttacaagggatgtgaaggacctcttcaaggagaactacaaactactgctcaatgaaataaaagaggatacaaacaaatggaagaacattccatgctcatgggttggaagaatcaatatcctgaaaatggccatactgcccaagttcatatggaaccaaaagagagcctgcatctccaagtcaatcctaagccaaaagaacaaagctggaggcatcacgctacctgacttcaaactatactacaaggctacagtaaccaaaacagcatggtactggtaccaaaacagagatatagatcaatggaacagaaaagagccctcagaaataatgccgcatatctacaacaatgtgatctttgacaaacctgagaaaaacaagcaatggggaaaggattccctatttaataaatggtgctgggaaaactggctagccatatgcaggaaactgaaactgcatgtcttccttacaccttatacaaaaattaattcaagatggattaaagacttaaatgttagacctaaaaccataaaaaccctagaagaaaacctaggcaatactattcaggacacaggcacgggcaagaacctcatgtctaaaacaccaaaagcaacggcaacaaaagccaaaattgacaaaagggatctaattaaactaaagagcttctgcacagcaaaagaaactgccatcagagtgaacaggcaacctacaaaatgggagaaaatgttcacaacctactcatctgacaaagggctaatatccagaatctacaatgaactcaaacaaatttacaagaagaaaacaaacaaccccatcaaaaagtgggtgaaggacatgaacagacaattctcaaaagaagacatttatgcagccaaaaaacacatgaaaaaatgctcaccatcactgaccttcagagaaatgcaaatcaaaaccacggtgggaattgaacaacaggaacacatggacacaggaaggggaaaatcacactctggggactgttgtggagtcggggaggagggagggatagcattaggagatatacctaatgctaaatga

SEQ ID NO: 140825 - DNA, 1392 bp, Homo sapiens
atggtaaagggatcaattcaacaagaagagctaactatcctaaatagatatgcacccaatacaggagcacccagatccataaagcaagtcctgagtgacctacaaagagacttagactcccacacaataataatgggagactttaacaccccactgtcaacattagacagatcaacgagacagaaagttagcaaggatatccaggaattgaactcagttctgcaccaagcggacctaatagacatctacagaactctccaccccaaatcaacagaatgtacattcttctcagcaccacaccgcacttattccaaaattgaccacatagttggaagtaaagcactcctcagcaaatataaaagaacagaaattataacaaactgttgctcagaccacagtgcaaccaaactagaactcaggattaacaaactcactcaaaaccgctcaactacatggaaactgaacaacctgctcctgaatgactactgggtacataatgaaatgaaggcacaaataaagatgttctttgaaaccaatgagaacaaagacacagcataccagaatctctgggacacatttaaagcaatgtgtagagggaaatttatagcactaaatgcccacaagagaaagcaggaaagatctaaaattgacaccctaacatcacgattaaaagaactagagaagcaagagcaaactttacattcaaaagacagcagaaggcaagaaataaatgcagaaaaggcctttgacaaaattcaacagcccttcatgctaaaaactctcaatacactagatattgatgaaacgtatctcaaaataataagagctatttatgacaaacccacagtcaatatcatactgaatgggcaaaaactggaagtattccctttgaaaactggcacaagacagggatgccgtctctcgccactcctattcaacataatgttggaagttctggccagggcaatcaggcaagagaaagaaataaagggtattcaattaggaaaagaggaagtcaaattgtccctgtttgcagatgacatgattgtatatctagaaaaccccatcatctcagcccaaaatctccttaagctgataagcaacttcagcaaagtctcaggatataaaatcaatgtgcaagaatcacaagcatttctgtacaccaataacagacaaacagagagccaaatcatgagtgaactcccattcacgattgctgcaaagagaataaaatacctaggaatccaacttacaaaggatatgaaggacctcttcaaggagaactacaaaccactgctcaacaaaataaaagaggacacaaacaaatggaagaatattccatgctcatggataggaaaaatcaatatcgtgaaaatggccatattgcccaag

SEQ ID NO: 140826 - DNA, 990 bp, Homo sapiens
atggataaattcctcgacacatacaccttcccaagactaaaccaggaagaagctgaatctctgaatagaccaataacagactctgaaattgaggcaataattaataggttaccaaccaaaaaaagtccagggaacagacagattcacagccgaattctaccagaggtacaaggaggagctgtgttggaagttctggccagggcaatcaggcaggagaaggaaataaagggtattcagttaggaaaagaggaagtcaaattgtccctgtttgcagacgacatgattttatatctagaaaaccccatcgtcttagcccaaaatctccgtgagctgataagcaacttcagcaaagtctcaggatgcaaaatcagtgtgcaaaaatcacaagtgttcttatacaccaataacagacaaacagagagccaaatcatgagtgaactcccattcagaattgcttcaaagacaataaaatacctaggaatccaacttacaaggtatgtgaaggacctcttcaaggagaactacaaaccactgctcaacgaaataaaagatgacacaaacaaatggaagaacattccatgctcatggataggaagaatcaatatcgtgaaaatggccatactgcccaaggtaatttacagattcaatggcatccccatcaagctaccaatgactttcttcacagaattggaaaaaactactttagagttcttatggaaccaaaaaagagcccacattgccaagtcaatcctaagccaaaagaacaaacctggaggcatcacacttcctgacttcaaactatactacaaggctacagtaaccaaaacagcatggtactggtaccaaagcagagatatagaccagtgcaaaagaacagagccctcagaaataataccacacgtctacaactatctgatctttgacaaacctgacaaaaacaagaaatggggaaaagattccctatttaaaaaatggtgctgggaaaactga

SEQ ID NO: 140827 - DNA, 336 bp, Homo sapiens
agaataaagtacctagaaatccaacttacaagggatgtgaaggacctcttcaaggagaactacaaaccactgctcaaggaaataaaagaggacacaaacaaatggaagaacattccatgctcatgggtaagaagaatcaatatcgtgaaaatggccatactgcccaagagaataaaatacctaggaatccaacttacaagggatgtgaaggacctcttcaaggagaactacaaaccactgctcaacgaaataaaagaggacacaaacaaatggaagaacattccatgctcatggataggaagaatcaatatcatgaaaatggccatactgcccaag

SEQ ID NO: 140828 - DNA, 359 bp, Homo sapiens
agctggctgaaaacggaatcacagagagcagcagcccagacgtaggctccaggggcagtgaagaagacatggtttggaaagaagggaagggaaagggagaaacaagagagaaggtgaagacagctgggaaaagagaatgaaaatatagtggctctgcagctgataagaactgaccaggaatactggcgacatcactcttggcactttttcctctctgctgctgcctgccaacccgagttgttcttattaaaacacacagccaaaaacaacagaagaatcagagtttcccagaaatggaagtaagcaacataatcagagttttataaatctactaaatagctcccatcaattgtgctaga

SEQ ID NO: 140829 - DNA, 1842 bp, Homo sapiens; identical to SEQ ID NO: 114618

SEQ ID NO: 140830 - DNA, 816 bp, Homo sapiens
atgacgcttctgaaattggcatcatccagccgcagctcagcagaccctctgaccgtcctgagcatttcctcctctgtcctcctgctcaacctggaggagacctggaaaggggacttcttcttcttctccatcccctcaagaatgagatgtggtcccttctccaccccctgggaaatgagacaaggaggtgaagtcctctgcttcctgcctccaggacagcaggcagatttgtctacacagctggctgaaaacggaatcacagagagcagcagcccagacgtaggctccaggggcagtgaagaagacatggtttggaaagaagggaagggagaggggagaaacaagagagaagaacaatcagcccacagtcagaaccaattcccagaccagagacacttttttcaaaacttaggatctattttaacgtatgccttcttgggaactgccatctcctgcatcgtcataggcttcaaagacaataaaatacctaggaatccaacttacaagggatgtgaaggacctcttcaaggagaaatacaaaacactgctcaacaaaataaaagaggacacaaacaaatggaagaacattccatgctcacgaataggaatcatcaatatcatgaaaatggccatactgcccaagtcaggaccctcagctgcacgtctgttggagtttgctggaggtccactgcagaccctgtttgcctgggtatcaccagaggaggctgcagaacagcaaatattgccgaacagccaaagttgctacctgatccttcctctggaagcttcgtctcagaggggcagctggctgtatga

SEQ ID NO: 140831 - DNA, 3137 bp, Homo sapiens
atggtaaagggatcaattcaacaagaggagctaactatcctaaatatttatgcccccaatacaggagcacccagattcataaagcaagtcctgagtgacctacaaagagacttagactcccacacattaataatgggagactttaacaccccactgtcaacattagacagatcaacgagacagaaagtcaacaaggatacccaggaattgaactcagctctgcaccaagcggacctaatagacatctacagaactctccaccccaaatcaaaagaatatacatttttttcagcaccacaccacacctattccaaaattgaccacatagttggaagtaaagctctcctcagcaaatgtaaaagaacagaaattataacaaactatctctcagaccacagtgcaatcaaactagaactcaggattaagaatctcactcaaagccgctcaactacatggaaactgaacaacctgctcctgaatgactactgggtacataacgaaatgaaggcagaaataaagatgttctttgaaaccaatgagaacaaagacaccacataccagaatctctgggacgcattcaaagcagtgtgtagagggaaatttatagcactaaatgcctacaagagaaagcaggaaagatccaaaattgacaccctaacatcacaattaaaagaactagaaaagcaagagcaaacacattcaaaagctagcagaaggcaagaaataactaaaatcagagaagaactgaaggaaatagagacacaaaaaacccttcaaaaaatcaatgaatccaggagctggttttttgaaaggatcaacaaaattgatagaccgctagcaagactaataaagaaaaaaagagagaagaatcaaatagacacaataaaaaacgataaaggggatatcaccaccgatcccacagaaatacaaactaccatcagagaatactacaaacacctctacgcaaataaactagaaaatctagaagaaatggatacattcctcgacacatacactctcccaagactaaaccaggaagaagttgaatctctgaatagaccaataacaggctctgaaattgtggcaataatcaatagtttaccaaccaaaaagagtccaggaccagatggactcacagccgaattctaccagaggtacaaggaggaactggtaccattccttctgaaactattccaatcaatagaaaaagagggaatcctccctaactcattttatgaggccagcatcattctgataccaaagccgggcagagacacaaccaaaaaagagaattttagaccaatatccttgatgaacattgatacaaaaatcctcaataaaatactggcaaaccgaatccagcagcacatcaaaaagcttatccaccatgatcaagtgggcttcatccctgggatgcaaggctggttcaatatacgcaaatcaataaatgtaatccagcatataaacagagccaaagacaaaaaccacatgattatctcaatagatgcagaaaaagcctttgacaatattcaacaacccttcatgctaaaaactctcaataaattaggtattgatgggacgtatttcaaaataataagagctatctatgacaaacccacagccaatatcatactgaatgggcaaaaactggaagcattccctttgaaaactggcacaagacagggatgccctctctcaccgctcctattcaacatagtgttggaagttctggccagggcaatcaggcaggagaaggaaataaagggtattcaattaggaaaagaggaagtcaaattgtccctgtttgcagacgacatgattgtttatctagaaaaccccatcgtctcagcccaaaatctccttaagctgataagcaacttcagcaaagtctcaggatacaaaatcaatgtacaaaaatcacaagcattcttatacaccaacaacagacaaacagagagccaaatcatgagtgaactcccagttcacaattgcttcaaagagaataaaatacctaggaatccaacttacaagggatgtgaaggacctcttcaaggagaactacaaaccactgctcaaggaaataaaagaggatacaaacaaatggaagaacattccatgctcatgggtaggaagaatcaatatcatgaaaatggccatactgcccaaggtaatttatagattcaatgccatccccatcaagctaccaatgactttcttcacagaattggaaaaaactactttaaagttcatatggaaccaaaaaagagcccgcattgccaagtcaatcctgagccagaagaacaaagctggaggcatcacactacctgacttcaaactatactacaaggctacagtaaccaaaacagcatcggtactggtaccaaaacagagatatagaccaatggaacagaacagaggcctcagaaataacgccacatatctacactattctgatcctttggacaaacctgagaaaaacaagcatgggggaaaggcatccctaatttataaaatggctgctggggaaaactggctagcccatatgtaggaagctgaaactggatcccttccttacaccttatacaaaaatcaattcaagatggattaaagatttaaacgttagacctaaaaccataaaaaccctagaagaaaacctaggcattaccattcaggacataggcacgggcaaggacttcatgtccaaaacaccaaaagcaatggcaacaaaagacaaaattgacaaatgggatctaattaaactaaagagcttctgcacagcaaaagaaactaccatcagagtgaacaggcaacctacaaaatgggagaaaattttcacaacctactcatctgacaaagggctaatatccagaatctacaatgaactcaaacaaatttacaagaaaaaaacaaacaaccccatcaaaaagtgggcaaaggacatgagcagacacttctcaaaagaagacatttatgcagccaaaaaacacatgaaaaaatgctcatcatcactagccatcagagaaatgcaaatcaaaaccactatgagataccatctcacaccagttagaatggcaatcactaaaaaatcaggaaacaacagggacatggatgaaattggaaatcatcattctcagtaa

SEQ ID NO: 140832 - DNA, 666 bp, Homo sapiens
tcaatatcgtggaaactttggttcacagaattcactctttttaggttcttccagccctctgtctctgccgtcccggtctccaccctggctgttgtactgggcttgaaaactctttccctcctcttctctcatagctttccgggacgacacagttgggcgctccgtgctatttcgctgctcccctcctttctctatactagctctcttatgaacagcttttcttacactgtccacctttatctcggcggtttgctccggctgtgtggctcccgcgacccccatgcctgcggcttcccagaaggctctcccctgccttcagggtcagcagcttaaccctttatctggggcatgcgcaagccgagctgtgtcctggctccctcctgttccagacgggacagctttggctgtctctctttctctgggcaccagtgcctgcacaagagccatgttggaagccccagtggcccccaagagcgcctgtacaacgggtagcagggcaattataccttttacagacaacagtggctcagagccaaggatgtacttacacaaacaggttatataacaagtgggggtgtgcgcctgcacgccaaactcgctgagtcatgcaggcctggatatccaccttggcctacctccatgtaccttttcatgtgattacacact

SEQ ID NO: 140833 - DNA, 1064 bp, Homo sapiens
ttagcggtgggccctcatactaccatcattgtccctatcaaaagtggtcactgccccactgcccaagtgcaagacgtaaggcttggcacaaagagaattaacagtccggtctgggcccatccatcctgtcaaactaggtggcccttcctcagacatcaggaccatcttctggcatctgccatcctggaaaccctcttcctccaaatagaaatttgccaccccatccaagtctcctccagggtgagtgacatcctcacgtgggccttcctggccttgggtatctggaattgtctgcaggttcgcatgtgtgatcccccagccagggcatgtgtgtctggtcactgtgattttaatacaggggttatctgagaggtgagtgcttcccttgaaaggcactgtgctgtgaacctgcggcttatttacagacgtgtccaaatccgttctctggtcctgcgtgcagtggccacgcccttcatagtctgaacgtgggtgactgtgtatacctgatatgccccagatatcctcctctgaggcgggcaggaaagccacgagacacaggtatagaaggaagaactttgagctcaggtggaccatctgtccacagttcctttcacagtgcagtacttttcccatacacatcaaagttgctttggatcgagaggcgaagaccagcagggcagagctaagcaggccacagacatctttccccagaaaagctgtccccactgcaattcccacagctggcatcgtcagcctctccgtgacagtggagttagacctcacgtttgcaggaatttgtgttttaattcccaggcagagctcgggcctcatcatgggaactaaaaagtcctaggtcaaggagccacatctgttgcggaccgtcttgctgatctttttacatacatactctgcggagtcatcacgcacctcagggcattacatgacaagtcggctgatcatgctaagcttaggactgctttccttttataaagcgcccagatcctctcccgcgatgaaccattaattcatttacccattaagctatgaatggattaatctattcc

SEQ ID NO: 140834 - DNA, 867 bp, Homo sapiens; identical to SEQ ID NO: 135873

SEQ ID NO: 140835 - DNA, 516 bp, Homo sapiens; identical to SEQ ID NO: 121217
  misc_feature (1)...(516): n = a,t,c or g

SEQ ID NO: 140836 - DNA, 948 bp, Homo sapiens
atgaaactcatggaaacacttaaccagtgcataaacgctggtcatgaaatgacgaaggctatcgccattgcacagtttaatgatgacagcccggaagcgaggaaaataacccggcgctggagaataggtgaagcagcggatttagttggggtttcttctcaggctatcagagatgccgagaaagcagggcgactaccgcacccggatatggaaattcgaggacgggttgagcaacgtgttggttatacaattgaacaaattaatcatatgcgtgatgtgtttggtacgcgattgcgacgtgctgaagacgtatttccaccggtgatcggggttgctgcccataaaggtggcgtttacaaaacctcagtttctgttcatcttgctcaggatctggctctgaaggggctacgtgttttgctcgtggaagtgactggcgatgctgtcggaatggacgatatcccgcaagaggcccggcagtaccggcataaccaagcctatgcctacagcatccagggtgacggtgccgaggatgacgatgagcgcattgttagatttcatacacgggtcaccgtcgacagcgacacacttgcatcggatgcagcccggttaacgtgccggcacggcctgggtaaccaggtcgatactgcaagcaacttgaactctggtaaagaggaccactccgaaagcagtaatacagagaacagaagaactagtaatgatgataagcaggaaagctgctctgagaaaataaaattggctgaagagggatcagatgaagatctggatttggttcaacatcagataatctctgagtgttcaggatttttctccttcttcagtggaacaggatggctaaagtgggctggagttgaagagcccattcctccttccacgtggaaaggtagacctgactggaacttgctatttctctttccccaagtcaattaa

SEQ ID NO: 140837 - DNA, 750 bp, Homo sapiens; identical to SEQ ID NO: 140474

SEQ ID NO: 140838 - DNA, 567 bp, Homo sapiens
tcaagggcaggatatgaccatgtcgtggaacctgtagaacgaggtacctccggtgtgcgttggtatgcctgctgtggattgatggtgtgtcctgctaatccccaacattttgcgcacggttatggggcaaaatacctggttacccagcccgtgccggcacgttaaccgggctgcatccgatgcaagtgtgtcgctgtcgacggtgccccgtgtatgaaatctaacaatgcgctcatcgtcatcctcggcaccgtcaccctggatgctgtaggcataggcttggttatgccggtactgccgggcctcttgcgggatatcgtccattccgacagcatcgccagtcactatggcgtgccgttctcggagcactgtccgaccgctttggccgccgcccagtcctgctcgcttcgctacttggagccactgcaggaagcggcggcggaagtcaggcatacgctggtaactttgaggcagctggtaacgctctatgatccagtcgattttcagagagacgatgcctgagccatccggcttacgatactgacacagggattcgtataaacgcat

SEQ ID NO: 140839 - DNA, 257 bp, Homo sapiens
ctgaacactcagagattatctgatgttgaaccaaatccagatcttcatctgatccctcttcagccaattttattttctcagagcagctttcctgcttatcatcattactagttcttctgttctctgtattactgctttcggagtggtcctctttaccagagttcaagttgcttgcagtatcgacctggttacccaggccgtgccggcacgttaaccgggctgcatccgatgcaagtgtgtcgctgtcgacggtgacc

SEQ ID NO: 140840 - DNA, 567 bp, Homo sapiens
atggacgatatcccgcaagaggcccggcagtaccggcataaccaagcctatgcctacagcatccagggtgacggtgccgaggatgacgatgagcgcattgttagatttcatacacgggtcaccgtcgacagcgacacacttgcatcggatgcagcccggttaacgtgccggcacggcctgggtaaccaggtgcatgcacagcttcaccaggtgtctactgttaaagtgacagcattaactgaaaaagaatgggaccctgcaacttggaatagggatgtttgggaggaccctgatggagctggagacactgagcttgtaaactctgttgaacctttctttccagaagaaacagcttccctattcccagtaatggcaacatcccctccgcaacccatgctgccatttagccttccacctttgtctaaagagataaaccctgtggtgcctgaggcagcagtgattgcctcgcctgaggcggttgcctggaaagataatggtgattctcctcagcaaacgacacctctgtttgcttctagacctatgactgaagtgccagcaggcccctag

SEQ ID NO: 140841 - DNA, 543 bp, Homo sapiens
atggacgatatcccgcaagaggcccggcagtaccggcataaccaagcctatgcctacagcatccagggtgacggtgccgaggatgacgatgagcgcattgttagatttcatacacgggtcaccgtcgacagcgacacacttgcatcggatgcagcccgattaacgtgccggcacggtctgggtaaccaggacgatgtcacttatgcaataaagcccacttgcttttcggagcttgacattattccttcctgtctggctctgcaccgtattgaaactgagttaatgggcaaatttgatgaaggtgaactgcccaccgatccacacctgatgctccgactggccattgaaactgttgcttatgactatgatgtcatagttattgacagcgcgcctaacctgagtatcgttacgattaatgtcgaatgtgctgctgatgtgctgattgttcccacgcctgctgagttgtttgactacacctacgcactgcagtttttagatatgcttcgtgatctgctcaagaacgtagatcttaaagggttctag

SEQ ID NO: 140842 - DNA, 636 bp, Homo sapiens
atgtcaggtaaaatgtccagtgatcgagctttgaggaagcagcaacagttgaacaaccttgtctatgtggtaacaaatcaggccaaacctggtgacagaattgtggatttctgcagcggaaccgctgctcaacatacgcttgcatgcctgcaggtcgactctagaggatccccggattgctgctgtgtcctgcttatccacaacattttgcgcacggttatgtggacaaaatacctggttacccaggccgtgcgcacgttaaccgggctgcatccgatgcaagtgtgtcgctgtcgacggcaggcaccgtgtatgaaatctaacaatgcgctcatcgtcatcctcggcaccgtcaccctggatgctgtaggcataggcttggttatgccggtactgccgggcctcttgcgggatatcgtccattccgacagcatcgccagtcactatggcgtgctgctagcgctatatgcgttgatgcaatttctatgcgcacccgttctcggagcactgtccgaccgctttggccgccgcccagtcctgctcgcttcgctacttggagccactatcgactacgcgatcatggcgaccacacccgtcctgtggatctacccactagtcaattcaccatcttgttga

SEQ ID NO: 140843 - DNA, 859 bp, Homo sapiens
tgactggcgattctgtcggaatggacgatatcccgcaagagcccggcagtaccggcataaccaagcctatgcctacagcatccagggtgacggtgccgaggatgacgatgagcgcattgttagatttcatacacgggtcaccgtcgacagcgacacacttgcatcggatgcagcccggttaacgtgccggcacggcctgggtaaccagttgaactacaaagaagatgaatacttcgagaacataattcaaaatttgaaattcagccaaagtaaacaactgaagaagctccgagaaaagaaccggtttacgcagtttcggcttagtgaaacaaaagaaatcaccaatccgtatgccatgcgtttatacgaatccctgtgtcagtatcgtaagccggatggctcaggcatcgtctctctgaaaatcgactggatcatagagcgttaccagctgcctcaaagttaccagcgtatgcctgacttccgccgccgcttcctgcaggtactcaccaaggaaatccagtttttcgatatgcttcgtgatctgctcaagaacgttgatcttaaagggttcgagcctgatgtacgtattttgcttaccaaatacagcaatagtaatggctcttattccccgtggatggaggagcaaattcgggatgcctggggaagcatggttctaaaaaatgttgtacgtgaaacggatgaagttggtaaaggtcagatccggatgagaactgtttttgaacaggccattgatcaacgctcttcaactggtgcctggagaaatgctctttctatttgggaacctgtctgcaatgaaattttcgatcgtctgattaaaccacgctgggagattagataa

SEQ ID NO: 140844 - DNA, 741 bp, Homo sapiens
accccggtgaatggcaaactggtcgttagccagaacgcgcaagctgatgtgcgttttagtgccgacgccagcgatctgctgatgattgcggcgcgtaaacaagatccggatacgctcttcttccagcgtcggctggtgattgaaggcgatacggagctggggctgtatgtgaaaaacctgatggacgccattgaactggagcaaatgccgaaagccttacgcatgatgctgctgcaactggcggattttgttgaggcgggaatgaaaaccgcgcctgaaaccaaacagacatcgaacccctccacacattttgcgcacggttatgtggacaaaatacctggttacccaggccgtgccggcacgttaaccgggctgcatccgatgcaagtgtgtcgctgtcgacgtcaggcaccgtgtatgaaatctaacaatgcgctcatcgtcatcctcggcaccgtcaccctggatgctgtaggcataggcttggttatgccggtactgccgggcctcttgcgggatatcgtccattccgacagcatcgccagtcactatggcgtgctgctagcgctatatgcgttgatgcaatttctatgcgcacccgttctcggagcactgtccgaccgctttggccgccgcccagtcctgctcgcttcgctacttggagccactatcgactacgcgatcatggcgaccacacccgtcctgtggatctacccactagtcaattcaccatcttgttga

SEQ ID NO: 140845 - DNA, 897 bp, Homo sapiens
ctagcggattccggccctccatatagggtaatcccccagtgcggcacaccccttggccaagggcagccagaggtgtttgttaagcagttctggatcttgggcctccgactgggagagaccccccacaggggtcaccagatccttattcaggggcattcctgctagcatcatgtggggcccctctgggacagagatcccagaggaaggagcaggcagccatctttgctgttctgcagcttctactggtgatacctccaggtgtgggagggacccagacaaatagggtctggagtggattcccagcaaaccatggcaaccctggttacccaggccgtgccggcacgttaaccgggctgcatccgatgcaagtgtgtcgctgtcgacggtgaccctctggtggaattcggctgtgaatccatctggtcctggactttttttggttggtaggctattaattattgcctcgatttcagagcctgttattggtctattcagggattcaagttcttcctggtttagtcttgggaggatgtgtgtgtccaggaatttatccatttcttctagattttctagtttatttgcatagaggtgttgatagtattctctgatggtagtttgtatttctgtgggatcggtggtgatatcccctttatcattttttattgcatctatttggttcttctctcttttcttctttattaatcttggtagccgtctatcaattgtgttgatcttttcaaaaaaccagcccctggattcattgattttttgaagggttctttgtgtctctatctccttcagttctgctctgatcttagttatttcttgccttctgctagcttttaaatgtgttggagttcttctagagtcccagtgcaagcatgcaagcctagccat

SEQ ID NO: 140846 - DNA, 531 bp, Homo sapiens
atggaagatatcccgcaagaggcccggcagtaccggcataaccaagcctatgcttacagcatccagggtgacggtgccgaggatgacgatgagcgcattgttagatttcatacacgggtcaccgtcgacagcgacacacttgcatcggatgcagcccggttaacgtgccggcacggcctgggtaaccaggtattttgtccacataaccgtgcgccaactgctgtggataagcaggacacagcagcaatccacagcaggcatacaaccgcacaccgaggttactccgttctacagaaatgccatgtgtacagtagaggagaacctgtcttagtttattacccacggtcaaaagtagaacttaaaggcatacctaaagaatttccagatcctcttcagtctgctattggatttactaaagaatttgcattaaatattctcatttgtgaccccagattctctgattcatgtaaattggttcacctgttagcatcagaaagcaaagccaaagataggatagtaaaagcaaattag

SEQ ID NO: 140847 - DNA, 519 bp, Homo sapiens
ttattggtacggggcccggttacctttggtatggtcggtctcattgtagtttggagccacggtcccgctgggatggtgggtctgagtatagtctgggaccggggtcctacttgtatcgtggtctgattgtgagtcgggggccacgatccattcggggtgtcggtctgattccggtctggaccacggttcccacttgtatggtcggagcagactagcagcgtgagagtacgattccatcgaggcctgtagaacggagtaacctcggtgtgcggttgtatgcctgctgcggattgctgctgtgtcctgcttatcgacaacattttgcgcgcggttatgtggacaaaatacctggttacccaggccgtgccggcacgttaaccgggctgcatccgatgcaagtgtgtcgctgtcgacggtgacccgataggcgagggaccgagcgggtttcagcccgtaaacatgtgtgttttgttgtcgtgtctctgttcgtcgctgcgtgtcgaccgccgcttcgcgcat

SEQ ID NO: 140848 - DNA, 606 bp, Homo sapiens
atggacgatatcccgcaagaggcccggcagtaccggcataaccaagcctatgcctacagcatccagggtgacggtgccgaggatgacgatgagcgcattgttagatttcatacacgggtcaccgtcgacagcgacacacttgcatcggatgcagcccggttaacgtgccggcacggcctgggtaaccaggtattttgtccacataaccgtgcgcaaaatgttgtggataagcaggacacagcagcaatccacagcaggcatacaaccgcacaccgaggttacttccgttcttacagttacgacgacatgaagaatcccccattgccaaatcaagaattttactaccacaagccaattcaatccaatttaatttataaaaatatttctcatatgcccaccatgtatcatcgctatgtagctgtagatcttcttcactcccttatcacacacacgcacataccacactgccttatgaccaccacctcctcatcagtctcctctcacatcatcaccctgacagaatctgtaccctattcctacctcacttcatccaaatcatcagcattcttccggactcactggactctttcactagccttcacctag

SEQ ID NO: 140849 - DNA, 1059 bp, Homo sapiens
atggagaaaaaaatcactggatataccaccgttgatatatcccaatggcatcgtaaagaacattttgaggcatttcagtcagttgctcaatgtacctataaccagaccgtggagctggatattacggcctttttaaagaccgtaaagaaaaataagcacaagttttatccggcctttattcacattcttgcccgcctgatgaatgctcatccggagttccgtatggcaatgaaagacgatcccctcctatgtcctagagacatgcacggcagagaagaacaaagctctgcccttggcaggattctgggtcgtgatgcacgagaaagttccctggtggtccgcgggaggaaggatgttccggtggcccgaccgattgttcgccgttcgcgtagcttttcggcctgtgcttttgccgggtttgacggtttcactcttcctggcggggcccttagtttttggcgggcggcgggttggatttacctcttccgggccaagtccgggggaccttgcgggcacgccatagtgactggcgatgctgtcggaatggacgatctcccgcaagaggcccggcagtaccggcataaccaagcctatgcctacagcatccagggtgacggtgccgaggatgacgatgagcgcattgttagatttcatacacgggtcaccgtcgacagcgacacacttgcatcggatgcagcccggttaacgtgccggcacggcctgggtaaccagaaccggtttacgcagtttcggcttagtgaaacaaaagaaatcaccaatccgtatgccatgcgtttatacgaatccctgtgtcagtatcgtaagccggatggctcaggcatcgtctctctgaaaatcgactggatcatagagcgttaccagctgcctcaaagttaccagcgtatgcctgacttccgccgccgcttcctgcaggtctgtgttaatgagatcaacagcagaactccaatgcgcctctcatacattgagaaaaagaaaggccgccagacgactcatatcgtattttccttccgcgatatcacttccatgacgacaggatag

SEQ ID NO: 140850 - DNA, 3288 bp, Homo sapiens; identical to SEQ ID NO: 128489

SEQ ID NO: 140851 - DNA, 1390 bp, Homo sapiens
atggacgatatcccgcaagaggccggcaggtaccggcataaccaagcctatgcttacagcatccagggtgacggtgccgaggatgacgatgagcgcattgttagatttcatacacgggtcaccgtcgacagcgacacacttgcatcggatgcagcccggttaacgtgccggcacggcctgggtaaccagggttccgatttagtgctatacggcacctcgaccccaaaaaacttgatttgggtgagggttcacgtagtgggccatcgccctgatagacggtttttcgcctttgacgtttggagtccacgttctttaatagtggactcttgttccaaactggaacaacactcaaccctatctcgggctattcttttgatttataagggattttgccgatttcggaaccaccatcaaacaggattttcgcctgctggggcaaaccagcgtggaccgcttgctgcaactctctcagggccaggcggtgaagggcaatcagctgttgcccgtctcactggtgaaaagaaaaaccaccctggcgcccaatacgcaaaccgcctctccccgcgcgttggccgattcattaatgcagctggcacgacaggtttcccgactggaaagcgggcagtgagcgcaacgcaattaatggattttgccgatttcggaaccaccatcaaacaggattttcgcctgctggggcaaaccagcgtggaccgcttgctgcaactctctcagggccaggcgaacgttcagcagtttatcgatgaaggcaattatacatccggcgacaaccatacgctgagagaccctcactacgttgaagacaaaggccataaataccttgtattcgaagccaacacgggaacagaaaacggataccaaggcgaagaatctttatttaacaaagcgtactacggcggcggcacgaacttcttccgtaaagaaagccagaagcttcagcagagcgctaaaaaacgcgatgctgagttagcgaacggcgccctcggtatcatagagttaaataatgattacacattgaaaaaagtaatgaagccgctgatcacttcaaacacggtaactgatgaaatcgagcgcgcgaatgttttcaaaatgaacggcaaatggtacttgttcactgattcacgcggttcaaaaatgacgatcgatggtattaactcaaacgatatttacatgcttggttatgtatcaaactctttaaccggcccttacaagccgctgaacaaaacagggcttgtgctgcaaatgggtcttgatccaaacgatgtgacattcacttactctcacttcgcagtgccgcaagccaaaggcaacaatgtggttatcacaagctacatgacaaggggatcctctagagtcgacaaagcagggctgc

SEQ ID NO: 140852 - DNA, 679 bp, Homo sapiens
ttatagcttggagtctagtaggttttctttcatgtgcatgcatataaacttctgccagatccttcttaatacagtggactgagagctagacacacagtctagcctgagaatgtactggcataaagtatttttattaaaattcagtttttcaactttcaaagatgtcaaagggtgttcagaagtaccttgagaacctcctgtcctgcctgaaggattttcaagtgcaaagcagacttgctgctgtacgacatgcttgtgtatgtcacactctggatacacagagctgtcacctacacacatcgggtaccgaaccactcgtatcgccggtctaatattaagtctgaaaccacggttcccactcgtatcgtcggtcctgtagaacgcagtaacctcggtgtgcggttgtatgcctgctgtggattgctgctgtgtcctgcttatccacaacattttgcgcacggttatgtggacaaaatacctggttacccaggccgtgccggcacgttaaccgggctgcatccgatgcaagtgtgtcgctgtcgacggtgacccaaaccagccccgcttcctggaagtccacaacacttatgtagtcaccagccacatctggctcaaaggaaaactggccaatgtttcctacagggacattgctttcctgaaaagaactggggtactgttg

SEQ ID NO: 140853 - DNA, 946 bp, Homo sapiens
atggaccaaatcccgcaagaggcccgccagtaccggcataaccaagcctatgcctacagcatccagggtgacggttccgaggatgactatgagcgcattgttaaatttcatacacgggtcaccgtcgacagcgacacacttgcatcggatgcagcccggttaacgtgccggcacggcctgggtaaccaggtattttgtccacataaccgtgcgcaaaatgttgtggataagcaggacacagcagcaatccacagcaggcatacaaccgcacaccgagggattacatttcaacatgagatttgggcagggacaaatatccaaactagatcaatccccaacctaaggggatcctctagagaaaaaccggcatgtcatgccagcaatgagactaatattcggccgccgattcgagtgggaccagggttgctttcccaaccaaagttttgggccattcagacatcagccttgatcttccggacaaaacttgagaaaggaagtactcgccgagtggaacgggcaatgaggcagacacaggctttgcagaacttccagcggtataccggcatacagcatgtgcatcgcataggaatggcggaacgtatgtggtgtgaccggaacagagaacgtcacaccgtcagcagcagcggcggcaaccgcctccccaatccaggtcctgaccgttctgtccgtcacttcccagatccgcgctttctctgtccttcctgtgcgacggttacgccgctccatgagcttatcgcgaataaatacctgtagaacggagtaccctcggtgtgcggttgtatgcctgctgtggaaggatgctgtgtcctgcttatccacaactttttgcgcacggttatgtggacaaaatacctggttacccaggccgtgccggcacgttaaccgggctgcatccgatgcaagtgtgtcgctgtcgacggtgacc

SEQ ID NO: 140854 - DNA, 1272 bp, Homo sapiens
atggctggcaaactgggcactcaaagctggtcacagccaggtcagccttggatttttcccgatttcggaacacccatcaaccaggattttcgcctgctgggccaaaccagcgtggaccgcttgctgcaactctctcaggcccaggcggtgaagggcaatcagctgttccccgtctcactggtgaaaagaaaacccacccctggcgcccaatacgcaaaccgcctctccccgcgcgttggccgattcattaatgcagctggcacgacaggtttcccgactggaaagcgggcagtgagcgcaacgcaattaatggtcaccgtcgacagcgacacacttgcatcggatgcagcccggttaacgtgccggcacggcctgggtaaccaggttcgcgggctttcccggtcaagctttaaatcgggggcctcccttaagggttccgatttagtgctttacggcacctcgaccccaaaaaaacttgatttggtggactcttgttccaaactggaacaacactcaaccctatctcgggctattcttttgatttataagggattttgccgatttcggaaccaccatcaaacaggattttcgcctgctggggcaaaccagcgtggaccgcttgctgcaactctctcagggccaggcggtgaagggcaatcagctgttgcccgtctcactggtgaaaagaaaaaccaccctggcgcccaatacgcaaaccgcctctccccgcgcgttggccgattcattaatgcagctggcacgacaggtttcccgactggaaagcgggcaaaggaagtaccctgggtgtcgtttgtatgcttcctgtgaattgctgctgtgtcctgttaatccacaacattttgcgcacggttatgtggacaaaatatcctggttaccgcagccggtgccggcacgttaaccgggctgcatccgatgcaagtgtgtcgctgtcgacgtcaggcaccgtgtatgaaatctaacaatgcgctcatcgtcatcctcggcaccgtcaccctggatgctgtaggcataggcttggttatgccggtactgccgggcctcttgcgggatatcgtccattccgacagcatcgccagtcactatggcgtgctgctagcgctatatgcgttgatgcaatttctatgcgcacccgttctcggagcactgtccgaccgctttggccgccgcccagtcctgctcgcttcgctacttggagccactatcgactacgcgatcatggcgaccacacccgtcctgtggatctacccataa

SEQ ID NO: 140855 - DNA, 1531 bp, Homo sapiens
atgaatgcagatggggatggagaccacgttgatgagcgaacaatatgcaatggaattgccccagaaaaagatgtagatggatttcatattatcaatattggaagattgtgccttgatcagcattctctcatacctgccactgccagtgctgtttgggaaataataaaaagaacaggcccttatttgcattttccaagtgaaggaattcccggaaaccggaggtcatattctgggtttaaccaacagggccggaggggcttcccccaggcatttttgctgctcagtcaggataaaaccctgcaacaggcatgtgcatgtttgatgaaaggaaaggaagaaaaagaactagacatactagacaatctcttgatgcaagcccccacaggccagcagacactttttggtggagcagaacctccttctctcagctatgaaggttcagttattaggtccctcgactatagggtcaccgtcgacagcgacacacttgcatcggatgcagcccggttaacgtgccggcacggcctgggtaaccagtgggatgaaacatgggatgaaataccatgcgttcaagcatttttgctgctcagtcaggataaaaccctgcaacaggcatgtgcatgtttgatgaaaggaaaggaagaaaaagaactagacatactagacaatctcttgatgcaagcccccacaggccagcagacactttttggtggagcagaacctccttctctcagctatgaaggttcagtagtggccatcgccctgaagacgtttttcggccttgacgttgaagtccacgtctttaatagtgactcttgttccaaattggaacaacactcaaccttatctcgggctattcttttgatttataagggattttgccgatttcggaaccaccatcaaacaggattttcgcctgctggggcaaaccagcgtggaccgcttgctgcaactctctcagggccaggcggtgaagggcaatcagctgttgcccgtctcactggtgaaaagaaaaaccaccctggcgcccaatacgcaaaccgcctctccccgcgcgttggccgattcattaatgcagctggcacgacaggtttcccgactggaaagcgggcaggtcaccgtcgacagcgacacacttgcatcggatgcagcccggttaacgtgccggcacggcctgggtaaccaggcatacaaccgccaccggagggtactccgttctacaggttacgacgacttgtcaatacttgcccttgacagcattgatggaaatgtaatctcacgttgttgtctgatcgacattcaaggggaccgtgggcccgaaccgtattcagacccacacacgagtgggatcgtggtcccgactataattcgaccgacaatcgaggggaacgggggccagaaaaaaatcaacttaggtatacgaactaatttggggtaccgagctcgaattcgtgggggtggtcatagctgtttcctgtgtgaaattgttatccgctcacaattccacacaacatacgagccggaagcataa

SEQ ID NO: 140856 - DNA, 2285 bp, Homo sapiens
ctatcctgtcgtcatggaagtgatatcgcggaaggaaaatacgatatgagtcgtctggcggcctttctttttctcaatgtatgagaggcgcattggagttctgctgttgatctcattaacacagacctgcaggaagcggcggcggaagtcaggcatacgctggtaactttgaggcagctggtaacgctctatgatccagtcgattttcagagagacgatgcctgagccatccggcttacgatactgacacagggattcgtataaacgcatggcatacggattggtgatttcttttgtttcactaagccgaaactgcgtaaaccggttctgtaacccgataaagaagggaatgagatatgggttgatatgtacactgtaaagccctctggatggactgtgcgcacgtttgataaaccaaggaaaagattcatagcctttttcatcgccggcatcctcttcagggcgataaaaaaccacttccttccccgcgaaactcttcaatgcctgccgtatatccttactggcttccgcagaggtcaatccgaatatttcagcatatttagcaacatggatctcgcagatggggatcctctcctgtcccacatcctctccaaaatgcagacaagaaaagccattagaaccttgattagataagtaggtctccaaggtggtatttgtgcccagaagtgcaacaaacctgacattgcaaccagcgtacccgtgtgcgaccacgatgtctgagtgtctggcacccgtcaaatgatagacagcatagtaggctcttgtagcaaagaccgcagtgagggagaagaagcactcgaatttgtcttcaatcaggacaccaccattccgctggttacccaggccgtgccggcacgttaaccgggctgcatccgatgcaagtgtgtcgctgtcgacggtgacccgtgtatgaaatctaacaatgcgctcatcgtcatcctcggcaccgtcaccctggatgctgtaggcataggcttggttatgccggtactgccgggcctcttgcgggatatcgtccattccgacagcatcgccagtcactatggcgtgaacattttttagaaccatgcttccccaggcatccgatatttgctcctcaatccacggggactgagagccattactattgctgtatttggtaagcaaaatacgtacatcaggctcgaaccctttaagatcaacgttcttgagcagatcacgaagcatatcgaaaaactgcagtgcggaggtgtagtcaaacaactcagcaggcgtgggaacaatcagcacatcagcagcacatacgacattaatcgtgccgatacccaggttaggcgcgctgtcaataactatgacatcatagtcatgagcaacagtttcaatggccagtcggagcatcaggtgtggatcggtgggcagtttaccttcatcaaatttgcccattaactcagtttcaatacggtgcagagccagacaggaaggaataatgtcaagccccggccagcaagtgggctttattgcataagtgacatcgtccttttccccaagatagaaaggcaggagagtgtcttctgcatgaatatgaagatctggtacccatccgtgatacattgaggctgttccctgggggtcgttaccttccacgagcaaaacacgtagccccttcagagccagatcttgagcaagatgaacagaatctgcagggatacaactatgcaaggatttcttgatctggccaacgaacagatacagcatacgtttttgatcccgggagagactatatgccgcctcagtgaggtcgtttgactggacgattcgcgggctatttttacgtttcttgtgattgataaccgctgtttccgccatgacagatccatgtgaagtgtgacaagtttttagattgtcacaccaggtcattttgcactggggggatcctctagagtcgacctgcaggcatgcaagatttaaacgcagtacctccggtgtgcggttgtatgcctgctgtggattgctgctgtgtcctgcttatccacaacattttgcgcacggttatgtggacaaaatacctggttacccagcccgtgccggcacgttaaccgggctgcatccgatgcaagtgtgtcgctgtcgacggtgccccgtgtatgaaatctaacaatgcgctcatcgtcatcctcggcaccgtcaccctggatgctgtaggcataggcttggttatgccggtactgccgggcctcttgcgggatatcgtccattccgacagcatcgccagtcactatggcgtg

SEQ ID NO: 140857 - DNA, 3873 bp, Homo sapiens
  misc_feature (1)...(3873): n = a,t,c or g
tcaaccagatgaaactaggcgagccctggagcccatacagttgtggacataaggccccgggaagaccaccttggcagtgcagggcagcccaactgccctgagaatggctgtctgcagggttttcacacaggcttggcctatcctgagcaccatccctgcatctgaaagacactgtagaccggagtaacctcggtgtgcggttgtatgcctgctgtggattgctgctgtgtcctgcttatccacaacattttgcgcacggttatgtggacaaaatacctggttacccaggccgtgccggcacgttaaccgggctgcatccgatgcaagtgtgtcgctgtcgacggtgacccgtgtatgaaatctaacaatgcgctcatcgtcatcctcggcaccgtcaccctggatgctgtaggcataggcttggttatgccggtactgccgggcctcttgcgggagggtaccgagctcgaattcgtaatcatggtcatagctgtttcctgtcgtgccagctgcattaatgaatcggccaacgcgcggggagaggcggtttgcgtattgggcgccagggtggtttttcttttcaccagtgagacgggcaacagctgattgcccttcaccgcctggccctgagagagttgcagcaagcggtccacgctggtttgccccagcaggcgaaaatcctgtttgatggtggttccgaaatcggcaaaatcccccagcttttttctgctcatgaaggttagatgcctgctgcttaagtaattcctctttatctgtaaaggctttttgaagtgcatcacctgaccgggcagatagttcaccggggtgagaaaaaagagcaacaactgatttaggcaatttggcggtgttgatacagcgggtaataatcttacgtgaaatattttccgcatcagccagcgcagaaatatttccagcaaattcattctgcaatcggcttgcataacgctgaccacgttcataagcacttgttgggcgataatcgttacccaatctggataatgcagccatctgctcatcatccagctcgccaaccagaacacgataatcactttcggtaagtgcagcagctttacgacggcgactcccatcggcaatttctatgacaccagatactcttcgaccgaacgccggtgtctgcaggaagcggcggcggaagtcaggcatacgctggtaactttgaggcagctggtaacgctctatgatccagtcgattttcagagagacgatgcctgagccatccggcttacgatactgacacagggattcgtataaacgcatggcatacggattggtgatgtttttctnctggttacccaggccgtgccggcacgttaaccgggctgcatccgatgcaagtgtgtcgctgtcgacggtgaccctatatcgaggagggggtttctnntgaatcgccagcggcatcagcaccttgtcgccttgcgtataatatttgcccatggtgaaaacgggggcgaagaagttgtccatattggccacgtttaaatcaaaactggtgaaactcacccagggattggctgagacgaaaaacatattctcaataaacccgtcttttattgccatacggaacctccggtgaacattcatcaggcgggcacagatgtgaattaaggccggataaaactgggcttttttttcttttacggcttttaaaagccgtaatttccactgcccgctttccagtcgggaaacctgtcgtgccagctgcattaatgaatcggccaacgcgcggggagaggcggtttgcgtattgggcgccagggtggtttttcttttcaccagtgagacgggcaacagctgattgcccttcaccgcctggccctgagagagttgcagcaagcggtccacgctggtttgccccagcaggcgaaaatcctgtttgatggtggttccgaaatcggcaaaatcctttggtgggccgatcatgtccgcagaatcccgcgttggcgtcactacaaacggaatgaccctgtatgctcgttttaggtgttttggcgtgtcacctgtccttgctcggcgctttgcgcgctgaggagcgtagacccggggtgtacgttggtgttgatcgtccttcgtccttttaaagcgtgtctgcccttctagtccgaggttgctgaatgacgttttccgtgtttttcgcttgtacgctgtccacgccgtggcacgcggcgtctgagccagatgctttttcccggattctgtaccccccttgtgctttgcgggcttggtgggagctctgagggtcttctcttgggtttcattccgcgtggtccgcatggctgtgcagggccgtgcccctggtgcttgggggtcgccggttcggcgttgctgatgccgtcgttccggcgtttcggttgattcttcgcttcgggccacgcgggcgcgtcgggcttctgttggtgtgggcggtgttccccgctttgtcgggcctttccgcggttccgcccttttgcgtcgcttgcgtatctgtttacgcttattccggtttcccttgttcccgcctccgccgttcccgcaattttcttcacaccccgattccccggccatcacgttcaatatctggttacccaggccgtgccggcacgttaaccgggctgcatccgatgcaagtgtgtcgctgtcgacggtgacccgtgtatgaaatctaacaatgcgctcatcgtcatcctcggcaccgtcaccctggatgctgtaggcataggcttggttatgccggtactgccgggcctcttgcgggatatcgtccattccgacagcatcgccagtcatgtttgtctccacctgctggaatgtaaatttcatgggacatttttctttgctctgtttatcagtgtttggggggggcgtagaacaggactgcccgctttccagtcgggaaacctgtcgtgccagctgcattaatgaatcggccaacgcgcggggagaggcggtttgcgtattgggcgccagggtggtttttcttttcaccagtgagacgggcaacagctgattgcccttcaccgcctggccctgagagagttgcagcaagcggtccacgctggtttgccccagcaggcgaaaatcctgtttgatggtggttccgaaatcggcaaaatcctgcccgctttccagtcgggaaacctgtcgtgccagctgcattaatgaatcggccaacgcgcggggagaggcggtttgcgtattgggcgccagggtggtttttcttttcaccagtgagacgggcaacagctgattgcccttcaccgcctggccctgagagagttgcaacaagcggtccacgctggtttgccccagcaggcgaaaattctgtttgatggtggttccgaaatcggcaaaatcctgcccgctttccagtcgggaaacctgtcgtgccagctgcattaatgaatcggccaacgcgcggggagaggcggtttgcgtattgggcgccagggtggtttttcttttcaccagtgagacgggcaacagctgattgcccttcaccgcctggccctgagagagttgcagcaagcggtccacgctggtttgccccagcaggcgaaaatcctgtttgatggtggttccgaaatcggcaaaatccattaattgcgttgcgctcactgcccgctttccagtcgggaaacctgtcgtgccagctgcattaatgaatcggccaacgcgcggggagaggcggtttgcgtattgggcgccagggtggttttttttttcaccagtgagacgggcaacagctgaatggccttcaccgtctggccctgagaaaagtgcagctagcgggccacgctggttttgccccaccaggcgaaaattcctgttttgagggtgggttccgaaattgggcat

SEQ ID NO: 140858 - DNA, 3643 bp, Homo sapiens
atggcccgagctccgtgcggcgtgtccccggtgctcccggcctcgggctgcccgcggcccgccgtcaatatcgagggccgtgtcgggcgggggctcaccctcactcacgaccctccgatcatatccacccgcttcctgcaccactccttgcgcagccggtcaacgattcacataaggaaacaaggaggagaaaggcaactaagggtcaccgtcgacagcgacacacttgcatcggatgcagcccggttaacgtgccggcacggcctgggtaaccaggtcctcgatatagggtcaccgtcgaagcgacacacttgcatcggatgcagcccggttaacgtgccggcacggcctgggtaaccagactaataatcagaccgacgatacgagtgggaccgtggtcccagacttaatatcagaccgacgatacgagtgggacccatggtccccagactaataatcagaccgacgatacgaggtgggaccgtggtcccagtcttgttttcagaccgacgatacgagtgggaccgctttgcagaactttcagcggtataccggcatacagcatgtgcatcgcataggaatggcggaacgtatgtggtgtgaccggaacagagaacgtcacaccgtcagcagcagcggcggcaaccgcctccccaattccagtcctgaccgttctgtccgtcacttcccagaccgcgctttctctggccttcctgtgcgaccgacccccacagtagctgaatacatctgctatcacgttgtgtttgctcttgcgggaagcccgaaagacgctgatgacacatcaatctacatgttttatcaaaaggtcggcgacaactcaatcgacagctggaaaaacgcgggccgtgtctttaaagacagcgataagttcgacgccaacgatccgatcctgaaagatcagacgcgagagtggtccggttctgcaacctttacatctgacggaaaaatccgtttattctacactgactattccggtaaacattacggcaaacaaagcctgacaacagcgcaggtaaatgtgtcaaaatctgatgacacactcaaaatcaacggagtggaagatcacaaaacgatttttgacggagacggaaaaacatatcagaacgttcagcagtttatcgatgaaggcaattatacatccggcgacaaccatacgctgagagaccctcactacgttgaagacaaaggccataaataccttggtattcgaaagcccacacggggaacagaaaacggataccaagggcgaagaatctttatttaacaaagcgtactacggcggcggcacgaacttcttccgtaaagaaagccagaagcttcagcagagcgctaaaaaacgcgatgctgagttagcgaacggcgccctcggtatcatagagttaaataatgattacacattgaaaaaagtaatgaagccgctgatcacttcaaacacggtaactgatgaaatcgagcgcgcgaatgttttcaaaatgaacggcaaatggtacttgttcactgattcacgcggttcaaaaatgacgatcgatggtattaactcaaacgatatttacatgcttggttatgtatcaaactctttaaccggcccttacaagccgctgaacaaaacagggcttgtgctgcaaatgggtcttgatccaaacgatgtgacattcacttactctcacttcgcagtgccgcaagccaaaggcaacaatgtggttatcacaagctacatgacaaacagaggcttcttcgaggataaaaaggcaacatttgcgccaagcttcttaatgaacatcaaaggcaataaaacatccgttgtcaaaaacagcatcctggagcaaggacagctgacatcgatagtggctccaagtagcgaagcgagcaggactgggcggcggccaaagcggtcggacaagctgtctgcgaggacgggtgcgcatagaaattgcatcaacgcatatagcgctagcagcacgccatagtgactgccgatgctgtcggaatggacgatattcccgcaagaggcccggcagtaccggcataaccaagcctatgcctacagcatccagggtgacggtgccgaggatgacgatgagcgcattgttagatttcatacacggtgcctgacgtcgacagcgacacacttgcatcggatgcagcccggttaacgctgccggcacggcctgggtaaccaggtattttgtccacataaccgtgcgcaaaatgttgtggataagcaggacacagcagcaatccacagcaggcatacaaccgcacaccggaggttactccggttctaccgggttacgacgacatggccatactttgccccttgacagggcattgatgaaatcgatagtctcacgcatgatagtctgatcgacaatacaagtggggaccactcccccccgtggatggaggagcttattcgggatgcctggggaagcatcgttctaaaaaagttgtacgtgaaacggatgaagttggtaaaggtcagatccggatgagaactgtttttgaacaggccattgatcaacgctcttcaactgatacttcgttatcgacaccagctgccccgatggtggattcgttaattgcgcgcgtaggagtaatggctcgcggtaatgccattactttgcctgtatgtggtcgggatgtgaagtttactcttgaagtgctccggggtgatagtgttgagaagacctctcgggtatggtcaggtaatgaacgtgaccaggagctgcttactgaggacgcactggatgatctcatcccttcttttctactgactggtcaacagacaccggcgttcggtcgaagagtatctggtgtcatagaaattgccgaggggaagtcgcctcgtaaagctgctggacttacccgaagtgatttccgggtcctggttggcgagctggatgatgagcagatggctgcattatccagattgggtaacgattatcgcccaacaagtgcttatgaacgtggtcagcgttatgcaagccgattgcagaatgaatttgctggaaatatttctgcgctggctgatgcggaaaatatttcacgtaagattattacccgctgtatcaacaccgccaaattgcctaaatcagttgttgctcttttttctcaccccggtgaactatctgcccggtcaggtgatgcacttcaaaaagcctttacagataaagaggaattacttaagcagcaggcatctaaccttcatgagcagaaaaaagctggggtgatatttgaagctgaagaagttatcactcttttaacttctgtgcttaaaacgtcatctgcatcaagaactagtttaagctcacgacatcagtttgctcctggagcgacagtattgtataagggcgataaaatggtgcttaacctggacaggtctcgtgttccaactgagtgtatagaagaaattgaggccattcttaaggaacttgaaaagccagcacctgaggaacggagtaacctcggtgtgcggttgtatgcctgctgtggattgctgctgtgtcctgcttatccacaacattttgcgcacggttatgtggacaaaatacctggttacccaggccgtgccggcacgttaaccgggctgcatccgatgcaagtgtgtcgctgtcgacggtga

SEQ ID NO: 140859 - DNA, 2370 bp, Homo sapiens
atgctgctgtggggggtagcgctgatcgtacggcggatgccggggcgcttctcggcgctaatgttgattgtgctgtcgctgaccgtttcttgccgttatatctggtggcgttacacctctacgctgaactgggacgatccggtcagcctggtgtgcgggcttattctgctcttcgctgaaacgtacgcgtggattgtgctggtgctcggctacttccagacgcctttcttggccagagccacacggaagtgtgcgttcgagccaggaagtgtaccatcttgttgcgcccatgttcgttgttggccctgtacaaatgccaatattatgtcgttgggtggcattgcgattgccgtcggggcgatggtcgatgctgctatcgtcatgatcgagaatgcgcataaacggctggaagagtggcagcaccagcatcctgacgccacgctggataataaaacgcgctggcaggtgatcaccgatgcgtctgttgaagtggggccggcgctatttatcagtctgctgattatcacgttgtcgtttatcccgatcttcaccctggaagggcaggaagggcgtctgtttggcccgttggcgttcaccaaaacgtatgcgatggcgggtgcggcgctgctggcgatcgtagtgatcccgatcctgatgggctactggatccgtggcaaaattccgccggaaagcagtaacccgctcaatcgctttttgattcgtgtttatcatccgctgttgctgaaagtactgcactggccgaaaaccacgctgctggtggcggcgctttcggtgctgacggttctctggccgctcaataaagttggcggggaatttttaccgcagatcaatgaaggcgacttgttgtatatgccatcgacgctgccggggatttccgcagcagaggcggcgagtatgctgcaaaaaaccgacaagctaattatgagcgtacctgaagtggcgcggaaaaatgctgactgcacaagtttcagtgagctggtggagaactttaagaagaccttgagccacactgacccaatggtctcggatgatttgggcactagcttacccttcatcgatatctacttttccactctggactaccaggacacaactgtccacaaggcttcaccaagttgggctggacacgtgcccgaggagaatgccggggcgatgacgacatgccgatgggccaggactgtcatggaaaacctgaatatggatctgctgtacatggctgccgctgtgatgatgggtctggcggcaatcggtgctgcgatcggtatcggcatcctcgggggtaaattcctggaaggcgcagcgcgtcaacctgatctgattcctctgctgcgtactcagttctttatcgttatgggtctggtggatgctatcccgatgatcgctggaaaccacgccgaggccttcgcgagcggcggcttcagcggcttctacgacgcggcgggcgtgatccacttctttctgggtcggtgcgtagaggttgtgcagcagatcaatctgacgcgggttgatcagcgatttgccgtcaaagcccagctgtttgatgtgggcggcttcttgcagaaatccggcttcgttgttagcgtcggaatagacgacgcggcgcgtctggcgggccttcacgtcctgcgcttacttaacgaaccgaccgctgcggctatcgcatacgggctggattccggtcaggaaggcgtgatcgccgtttatgacctcggtggcgggacgtttgatatttccattctgcgcttaagtcgcggcgtgtttgaagtgctggcaaccggcggtgattccgcgctcggcggcgatgatttcgaccatctgctggcggattacattcgcgagcaggcgggcattcctgatcgtagcgataaccgcgttcagcgtgaactgctggatgccgccattgcagccaaaatcgcgctgagcgatgcggactccgtgaccgttaacgttgcgggctggcagggcgaaatcagccgtgaacaattcaatgaactgatcgcgccactggtaaaacgaaccttactggcttgtcgtcgcgcgctgaaagacgcgggtgtagaagctgatgaagtgctggaagtggtgatggtgggcggttctactcgcgtgccgctggtgcgtgaacgggtaggcgaatttttcggtcgtccaccgctgacttccatcgacccggataaagtcgtcgctattggcgcggcgattcaagcggatattctggtgggtaacaagccagacagccaaatgctgttgcttgatgtgatcccactgtcgctgggcctcgaaacgatgggcggcctggtggagaaagtgattccccgtaataccactattacggtggcccgcgcttag

SEQ ID NO: 140860 - DNA, 680 bp, Homo sapiens
atggatctgctgtacatggctgccgctgtgatgatgggtctggcggcaatcggtgctgcgatcggtatcggcatcctcgggggtaaattcctggaaggcgcagcgcgtcaacctgatctgattcctctgctgcgtactcagttctttatcgttatgggtctggtggatgctatcccgatgatcgctgccatcgcgtttgtcctgttcgttctgttctgcatgaagtacgtatggccgccattaatggcagccatcgaaaaacgtcaaaaagaaattgctgacggcctttcttccgcagaacgagcacataaggaccttgtacttgcaaaggccagcgcgaccgaccagctgaaaaaagcgaaagcggaagcccaggtaatcatcgagcaggcgaacaaacgccgctcgcagattctggacgaagcgaaagcttgaggcagacaggaacctctggtgcaggtctttctggaatctgcaaggaaaaggtgaccaatggcaaaggatctgtggcctccacagcagggttctccaagctaaggtcttctgcagtaactatgcagggaaggtacgagatgggggcagctcttctcactctcacaacagtggcaatgggggcagcaatggcagcagcaggtgcactgacaatttctgtttacagagactacaactggcagatgtga

SEQ ID NO: 140861 - DNA, 2511 bp, Homo sapiens
caattcttcatctctggggatcaaatcagtcttaacatggcattttttttctcttctaaaggccccagggcctggagggatggtgggccatagggctggaggggcttacagggaaagccctggcctggtgaatcacggttcctggtgttcgtggacttcagtggtcaccaagattctttcttacatagatccggaccctgctctgcaaggtccttggagtgctgttcagtgtggctggaggtaagaagggtccaacttgtatccttcaaatactcaaagggcagagacgacaagaagcatgatgtatttcagttatggctgagagggtgtgggcctctgggcaggcctagtgggaggtctggttacactgggccaaatccattgattggtttcttttttggaaacaacatgttcatgcgctgcgggtcagactcgacacttgcttgttcagtctagaggagggttcgtccttctggaaccaagggctcacgtggaaagtggtgaggaggaccttcagtgaaagcattaaccacaccccccgaattacactgggtgtcccttactcggtacatggaatccagctccctggattgctgaactttggcgagtttaaggtatgttttgtcctttccccaaggatttttaatttgacccatgaaaatttcctctcaagtgaaggaccagagagaaggggcctcctgggagccacattcaactgtctgaacaagaggcttgcaaagtaccgtatgcgaaacgtgcacccgaaacctaagctcgtcaggtatctgcacagtcgcctcccccccgagcctgctgcggctccctgagcttggtgtgggccgcgccatctctcccgacgacagatgtcctcttcgagtcaaatcggtaatgactcattccagctccaggtaaccccagtgcacctgctacctttatcccataccacgaggaagaatccagaaatgtatgaccttcctctgttgatcttcaacccgcaggagtctgccatcctccagctcttccaccaggatggtgagtgtctgcactgcagcccaatcgtgggtgattggtgtcatctcggacacagccaggcttgcccttcattccatgttccaagtggcctttttgtgccttctctgctgtgtggagctgcttttggacgtttagttgccaatgtcctaaaaaggtactctgtgtgtgtgcgtgtgtgtgcgcatgtgcatgtgtgtgcacgtgtgcgtgtgtatgcatgtgtgtgcgtgcgcatgaccatcagcctcacggtcatcctgatcgagtccaccaatgagatcacctacgggctccccatcatggtcacactgatggtgagcacactccctccaggcccctgtcaggctcagggccacgtccgccccacaggacctatttttaggtctttgctggaatgggagacagaggtggaaatggacaagtaaggccatgattttgctcatgtcctagtttcagaatgtataagctctgaggcctaaggaatgttgttattagggggagggccagacaggagtttattttcaactttccgggctgtatggtctctgtcacgactactcgactctgtcattgcagcaggaaagcagtaagcgtgacggacttgatcagtgggctacagtttgctgtgccctgatctaaagggggacccaagtgctgtgtttatcctgcgcaccacggtccaccatgccttcccggtggtcacagagaaccgcggtaacgagaaggagttcatgaagggcaaccagctcatcagcaacaacatcaagttcaaggtaaagaaaacggcatgagaggaaaggcaggtgagagacaagcggtcccgtctcacacggcttagtgctttgcccatacggaacatgtgtgatgagcacatcgcctctgaggagccagccgagaaggaggacctcctgcagcagatgctggaaaggaggtgagagcctggcggggcccccactgcccgcagggctacacagcggtggggtgagcctttggctcagatgttgtgactgaccttccacggcctgatccttcggtcgcagcttgtcaccctgcttgtccgaggagtttgttactctgaaagccagtcggtaagtctctccgaggcagaaatcagccaggccagacctgacgaagctcgaggggttgggcgctgccggcgggccgacctgacgctgctcaacccgcgcatgatcgtggtgagaagggctgccccggcctgtcccatgcggagctgcctcttcatgccgttggcgtctcaggcagtcagtgacatcagaacgatgggcctgcgccacctgcccgtggtgaacgctgtgggagaggtgagcgaggccccggccctgcccccacctttgagagaggatcccctagccaggtgctgtttgtgcacccaggctttctgacagcccagcccaccctctcctggtgctgcctggggaggcaaatcatgctcactccggcgggcacagctggctgggg

SEQ ID NO: 140862 - DNA, 457 bp, Homo sapiens
  misc_feature (1)...(457): n = a,t,c or g
actggaggaaggaatgtacatcntgggaggcctctaagctccccagactcaaatgccagcagctcgccaagcgcaagcacttggcccctaacctgagcctgagggaacctgattctactctgcctcccaaagtgggtgatcctcgtgcaggggaggacagcatcggagatcacactgcttcacagagggatcttcagctgcaaggtcactgctgtactggggccacccttcctaagacagagagtccccagggccaggaggcacctgggaacccaaatggggctccacagaatacacgagcctccaaaaagtttagtattatgaagcatctgaatttttttctcttccagaatggctttaaaaagtagactcaggcccagagtcctcaggacatatcagaaaagctttgagagtgtcctgatccctgcaaagcctctaataaattggtcaattgggc

SEQ ID NO: 140863 - DNA, 371 bp, Homo sapiens
  misc_feature (1)...(371): n = a,t,c or g
ngagatgaagatgctaaggaaacccagatagcttccaagaagaagctcagggagataagagagaaggattgggtggtgatccaggcactatggtggggaaaccggagacaagtagcaagtgaaatttatagagaatttgagatactatgttgggagaatcagaactggattggaggtgaacatagagcagaaattcaggcatcagagaagagagaccaaagaaaggatggatgtgaggatggcacaaatatcctggcacccgaggctgagatccaggaacaattaaaaggtgaaactgatgtggagactcagagcaatgagcctcttagagaagaggatggtacagacattcagtcactaggaagagcccg

SEQ ID NO: 140864 - DNA, 703 bp, Homo sapiens
gccctttttttttttttttgcccaaatgaccaatttattagaggctttgcagggatcaggacactctcaaagcttttctgatatgtcctgaggactctgggcctgagtctactttttaaagccattctggaagagaaaaaaattcagatgcttcataatactaaactttttggaggctcgtgtattctgtggagccccatttgggttcccagggtgcctcctggccctgggggactctctgtcttagggaagggtgggccccagtacagcagtgaccttgcagctgaagatccctctgtgaagcagtgtgatctccgatggctgtcctcccctgcacggagggatcacccactttggggagggcagagtaggaattcagggttcccttcagggcttcaggttaggggggccaagtgcttgcgcttggcgagctgtggggaccaggacatcttggccagaaaggtcaggcccagctttgccaccgcagagtggagcctccctttgaagctgacaggttctgcagaatggcaggaaggctgctgcccaacccctctgcaccctgtagattccaggcttcctcttactccatatgtgagctgcctgcatttgagtcctgggagcttagaggcctcccaagagtacattcctttctccagtgggcgtggtctgccctacaaaaatgagtcccactctgcttggagcc

SEQ ID NO: 140865 - DNA, 3498 bp, Homo sapiens
caaggcccaagaagcacttgggtccccttgttattgaacctagagaccaggaatcacaagacaactacctttttgagcaccaaaggcagtgaggtatttcctgatgacccttcgatattcttagcactttcatatctcaagtcttctagcaaaatgtcaaaaacttattctcccttttttctccagcctcatgtcttacccaagcagttaatctgcagctcctttgtctgggcaccatccaggatggaaaggaagaggggaaaaagcttctcacggaagtgtcctgaaagcatctcagctgccactggtgaggagtatagcttcccataaaggtaacacccaaatggcagtatgataaaagcaggtaaaagggtagtggcagctcctcccacaggtcactcaccatgctccattacaagctcgtctgccagagcagggatgaaagggttgacccagctctgacatctgaggattctgagagactcaagaacccatagctattttctgacctctttaagaggcgagaacaacccctggaccgaccaaagcccgtgtgccgctgcatcccgcgcacagcacctacatcccgctgccgtcgctgctgccaccatgcccaagacaaaggctgaaggtgatgctaaaggagataaagccaaggtgaaggacgaaccacaagtaaccagagctgcaattcagactaatactttcatcttcaagtgctagatagagccccaaaagcagatatacatactatacattcaaaactcatgtcaaatttccctcttaatcttaccaaaaagcacacttatgaagtggatgcagactctctgatcctgagacaccagttgcggcctggccgcgtttgctgagggaaatggccaaacccaggtcttctgaagaaaaggttccgcccgcaccgacacgccggggtccggcagcagctccagcgcgcaggccaggcacaggcggggggtcacgggcagcagccagcgcgggtcgtgccggtaatgggccctctcgaatagaagcgccgcctcttcctctctcctgggcccgggagtgcccgccgtcgccgcctgcctcacagccatctcctcgcttgccctcagctgaggcgggttcccaggtgcctcctggccctggggactctctgtcttaggaagggtggccccagtacagcagtgaccttgcagctgaagatccctctgtgaagcagtgtgatctccgatgctgtcctcccctgcacgaggatcacccactatccccactctatgaatccctggcaggggttgtgcccctggctggccagatgctctccctccccacccaccagcaggaagacttcaccccagtgggggacaggattcatctcaggacagggggcagagatgaaaccattcacagccactgcctgttcctgttcccgggtcccacatccatagccagtgaaggctggaggccatggtaggctgtgcttcctgcctgtgggcctctcactcccagaacagtcgacttggagactgtccctcacagcatcctctcctctgaccagatccttgtttcctccccttggtgctcgaggctctccaacatcctcatctgtgcactttctctggcttcctatatcctggagttctgcaacatcctcaactccaccgtcattcttatttccttgcccttgtacctggatctcttcagcaatttcaactcttaactgtccctggtcatctcctgcaggagcctgggtctctgtaccatcatcagctgtggtccctctcagctttttaacagtctgtttcttcgctctaagcctccagttttttcccctaagcctccagatcattctaccgtcctcgtttccaacctctctctggtttctcttctctgatgcctgattttctgcaacatcctttccaatcagctcccagttcctcctccctggtgaatggctccctccaatttcactatctaactggtcctcgttctctctcttaggtctctgagtctttacaccgtcctcacctccaggttctctctggtttctctccactggagcctgaatttctgttccattctcacttcccatctgcttctggctcttccactctgataaaaggatctttctaccaagatcacttctaaactgactctgggtttctttcccaggtgcccaggtctttacaccgtcctcacctccaacttctctcaggtttctcttcccttgtatctgaatttctgccccattctcacctccaatctgctgatctttcttccattctgctgaatgcatttctccatcaatttgacttgttaatttgccccagttccctgactcagatatctgggtatgtgcaccatcttcgcctctaatatgttcctgattcttcccctttggtatgtgaatctttccactaaattcatttcctaactgaccctgatttttcctcccaagttcctgggtgtctttatcatcctcacctttaacctctctcctccctagtgactgaatgtctgtaccatcctcttctctaagtggctcattgctctgagtctccacatcagttatcaccttttaattgttcctggatctcagcctcgggtgccaggatatttgtgccatcctcacatgattctcccaacatagtatctcaaattctctataaatttcacttgctacttgtctccggtttccccaccatagtgcctggatcaccacccaatccttctcttatctccctgagcttcttcttggtagctatctgggtttccttagcatcttcatctcttctcaggcccttatttccccaccccacttgaatttcatgacttaattgtttctggttctctcccccagatgcttgggtcttcttagctttcttacttccaccttgatcatgcttctcccaccttggtgtctggatctctgtaacattcccatttccaacacattcctgttttccccaatccaaggcctgggtctctacactattctctttttttacttctcccacgttctccctcccacatgattgggtttgtgcagcatcctgacctccaacctgatccttgtttctcccctcttccatctgaatttccacatccgcatcacctttcatctgatcttgtttctcccactgtggtgtctgggtctcctcaccattctcatctccagtctggccttgcttccccaatccttgagcctggatctcttccccatcctcctctccagcctctttcttgtccttcttctcaaatgtctgggtctccacagcatcctcacttccattcttatcctggttctcccactcaggtgtttgggtctctgcatcaattttacatcttaactgttcttggttctctcccatatgtgcctgggtttcagggagattctcacctccagcctccctctggtttctattccctagttcctgaatgttggttctactctcaactcccatccggtcctgggtgtcccaccctggtgtcaagatctcgcca

SEQ ID NO: 140866 - DNA, 1695 bp, Homo sapiens
atgagctgtaccatcaagggctgcttgacggtgtttctcttctcccttctccccaggcggctgttgaagagtgaacttggatcattcattacagactattttcagaaaggcaatctcttccctcgctccctccctctgccttggggcaagtctccagcacagcctcacctgcaggatgagcaacatctggacaatggacgagggcagcttggactgggccagcagcagcagcagtggctcaaagtgccccaggtaccattccagctgttactctggagggagcaagctataagccttggtggcttccacatagtgctaagtctacaggtgcacagagtacaagagaaggaggctttgcagcttccacctagatttcagaagatgtatagaaaagcctgggtgcccaagcagaagcctaccacaggggtggagcccccacaaagagactctaccagggcagtgccaaggggatatgtggggttggagcccctgacacttcctagtggagccgtgggaagggggttcttgccctctagacccaagaagggtagagccaccggcttgcaccctgagcctggaaaaaccacaggcactcaactccaatctgtgagagcagacccaggggctggaacccttcaaagccacaggggcagagctgcccagggccttgggagcccatcctttgcatcaggtagggagagtctcagtgaagaagtggtcccagacttcagccagaacctcaatgcgattttcacctacaagagggcgagaagatgggaagggaggaagaaagaaaagagttcgtcattacttgtaggagaggccagaagacagaaccaaggtgaactccagcacctggataatttaccccaaagggcaaaaggttactccagcttctttgttgatgtcccttatcttaagccttctacaaccaagacaagcagaggccctcttgacctgaaggaggggaagaagagagaaccttgcaggtcagcactggtgcctacttactccccctttcaatgccaagacaggatgctcattggcacacaagaacaggccccaacacccagaactctaagactagaagagactcagagaatatgccaggcctggtgctctcaggccatgccagggcagggggacagaatcttggatgaactttgttcatcctgtctagccccatttctgagttttcactctgagtgtatctatgatgagggttacttgggagcccctttcctggacacactcgtgtctttcccagggaatgggaagaaacaaaaggatgatgacatgacacctaataagtctggatctggaagtaagtttgatctacggttcattaggctggagcagaaaaaaaagaaagggtccggatgctgcctgccagcaacacagccttgtacattggaggaggacaatcaggatttgttgagtgagaacctgctggtcatggcaatgaacactgacctttgtgtatcttggctgttcattttccagagtgttcacgagcccacaggcccaagtgagagttatttgcaactggaggagctggtgaagcaagtggtttctcctttcctcggcatcagcggggaccgtagcttctcaggccccacgtacacgctgggagctggaatgggccagagtttcaatgacactgaaggaaaacagtcttctgcagccccactctga

SEQ ID NO: 140867 - DNA, 628 bp, Homo sapiens
ttccttttaatgtgttacaggggtctgttccaactaagagcttaggagagttggaagaaaaactgtttttcttcctctacactggcattaggcccaaacaatggtagcgttcctgccatggcccagctaacctgctgacgtcctgacagctccctggatgccccagtcccccaaaattcagtgagctgagcccagcaggaaggtggactcccagggagaccgcaagcaaccatggcaccccagctcagagtggggcttgcaagaagacttgttttccttcaggtgtcattgaaacgtctggcccagttccagcgtccgtgggaggaatgagtgaggaagggagggaggaaggagaagaacccagcaggcagcaggcttggggccagcaccctccgatctgtggtggctgtggttaagctggtgtctccagaaaaacatgagccagggtggtgaaaacctgccagctggccctggctcttgctgtggtagagaggcccaggaaggggcaggaacctcactggaggacgctcctttctttgaagctcaactactacaactccattaaagtgagaagagggggcatcaggttcccaatttgagtaatccatttctgcctctgcctcgtgcc

SEQ ID NO: 140868 - DNA, 809 bp, Homo sapiens
gtagcaaggttgtactggaagaggccgagtctccatgcttgccacttcagagatccacgagccggcctgtcagagaaccctcgtctgctccaatgcagtccctcttcctcatcggggaatgtctggggaccgcatttgtatgcagttccttgtctgtaaaatgggaggattataccttcaccatggaactaccgttcgctaaacagcaccacgtcctctacctgctcttccttcgctgtggtgtcaagtccctcctgcccttgggtacagctgcccgggtcatgcttgctgtcaaggtccctcttacaacgtgtcgcctggagccaagcaccagtgccgatgcgttcagagcaggatcagctccagaagcctccacctccctcggctgggctccctgcttctgttcatgcgaacctctaaccaggcgatcgcaaggggtcagtatggacaccagctggggtggcccaaattccctccccctggccctgagaccagctttctccagaggaggtgggagggtccagcccacactgacggccgcctctgaggctacggggggcctgcagctgcagcagcagagaacaaggaggctctgtcggtgcagaggggtcgacatcgagccccggaaactccccggggagggccgccggctgggcagaaaccacagcccaaacgagggtaagggacagactaagcttctgccttcaggtgaaaagatgcaggagctgaccctcctgggcacctcgtccgcgctggtgccaggcacagcgcctgacatgtcgccttctgaaatctccccacagacctaa

SEQ ID NO: 140869 - DNA, 155 bp, Homo sapiens; identical to SEQ ID NO: 119386
  misc_feature (1)...(155): n = a,t,c or g

SEQ ID NO: 140870 - DNA, 868 bp, Homo sapiens
atggccgccctctgctccctgtgtttgggttatgctgtgcagtgttcgctgggtctgatgtcactttcttctcaccacctgcccttgcctgtttgcgtccagtatgcctgggtggagaagtactttggccctgactttctggagcagattgtgctgaccagagacaagaccgtggtctctgctgaccttctcatagacgaccggccggacatcacaggcaagtggcctgcgacagtgctggtggtgacagtgacccgcagtcagtccctgttgactgagcactggctgcgcgtgctgacggcctccttgccgcatctcgtgccatcctcacacccgctgcgaaggcgggcggctgcgctccaggtctccactgctgagctgaatgccgctttcccacccacaggggccgagccaacccccagctgggagcatgtcctcttcaccgcctgccacaaccagcacctgcagctgcagcccccccgccgcaggctgcactcgtgggcggacgactggaaggccattctggacagcaagcggccctgctgagctggactgtgcttcgggctcctctgtggggctctgatctcagggctcccagctcggggcctgtggggccagttatgctggtctgggagtccctcctagactcctgggccccatgacctcctgctgcatgtcccttcccttccccagccctgccaggccttaacctgatcacggggcagggctgggccttctggggcttgggacatagacacgtggtcccagggccgtttcagcctgaacctcaggcaggcaggcaccaagctgccagaagcccagggggttcagggacagggaggagttgaggccattgtttcaggggggc

SEQ ID NO: 140871 - DNA, 330 bp, Homo sapiens
atgaatcagccggctattcctcagtatgctattccttgtcactccagctccaatgtggtggtggagcccagtgggcttcttgagctaaacaacttcactagtcaacagctggatgatgaggagacagcaatggagcaggacatagacagtagcacggaggatggaactgaccccagcccttctcagagctctgctgaacgggattttgccgatttcggaaccaccatcaaacaggattttcgcctgctggggcaaaccagcgtggaccgcttgctgcaactctctcagggccaggcggtgaagggcaatcagctgttgcccgtctcactg

SEQ ID NO: 140872 - DNA, 1971 bp, Homo sapiens
accatccaacaaggattctttaatgccagtattattctaggtgtttataaactaattatgaactgagaaaatgtaaaattttaaccaattcaacacttccagggatttgcaaaaacatacaagtttttaaaaaacttttcctgacacatcatttcaaaatacaactattcacattctccttttagatggtattttgctcagcagaaaccagttgagaaacattcacaggaagtctctttccactgcaagacaaaactgtttcaccggccatgatccaacagagaaagaagaccaggtcttaagtcactgtaaatgtgcagctttttttttttctttttcatttttttttaaaaaagtacattcccctgggagttttatcttgttttaaaaagctgctcctgcagcaacattttgttgaaacactggtgttttagggtccacagcctaagtacgggcaaagggctttttttagtcatcaaaatacaagggtttccctggacacttggtaaccaagcaggttttaaagtgcactattgtgtccaaacactaggaccgttcagcagagctctgagaagggctgggttcagttccatcctccgtgctactgtctatgtcctgctccattgctgtctcctcatcatccagctgttgactaggtgaagttgtttaggctcaagaagcccactgggttcccaccaccacattgggagctgggagtgacaaggaatagcatactggaggaatgccctgaatgataatttctgctggactctcttcagctttcttttggcctacattctgaatacgccatgaacttggcctgtcgcaggcactgcttggtggatcaattttccttgtcggttagggaagagccaacagtggatggactcgaacaggactctctacatttctgttgctggggagtggaattcgccatccctgccaccaccatgtgggtggagggtaatgatcctgcttcaccagtgagcatgctagtggcaagagccttctttgggggatccactatcatatgttctacatttgtatcaatctgagcttccatcaaagacattttcaaaatgtcagacactgctgtcttctcagaggcctgaatgggagatatgcttgtaactggtgatgtcagcttaggcacagaactgccaccagttatctttgtaactgtgggaggctggcgcccctcaaaagttatctttgtaacagaggatccttgggttataattggctgctccacctggcttgccgtctgtttctctgaagaagctgggagcgacatttggctctggggggtttggggttgcacgtagatttttggttggttcggagcctgctgcagtttagggagctgctgcgtggttttcactgcaagcacctgtactacagtttgcgggggctgtgccattaaggtaggaagctgcctgtctttggccaccatgggatgctgtgtgtgctgtacatctggcttgggctgtgcttgttcttgctggagaggggtgagtttttgatgcctgatggaaagctggggcatttgcgggagtttgtgctggagctggtctgcctgcaggtggatggtctgcttctgtttagtctggaagcactgcagagttttcacttgcagctgagtctgttccagcgggggctggctaagtttctgctgtttagctgactgtgactgagtcagggcagatcggtaaaacagacctgtctgagggtctaaagtgtccatctcttcaacctcgccctcctcagttccaagttcctcgctgtgtttggtaaaagcagtgtgactgcttaatgcctgctgcataatgtgggtgattgctccaggggaagatgctgggatggacttcaccaccaccgaagtctgtgttgcggtccctccctgagccacatgctggagcagggtacgctggggctgggaaggctgttggggctgggaacgctcgcacgcgc

SEQ ID NO: 140873 - DNA, 1410 bp, Homo sapiens
atggccaaaagaaatgccgagaaggaactgacagataggaattgggatcaagaagatgaagctgaagaggtgggaacattctccatggccagtgaggaagtcttgaagaatagagccataaagaaagcaaagcgcagaaatgttggatttgaatctgacactggaggagcctttaaaggttttaaaaggtttggtgggtacccttctgaagaagaacgcttttctggatttggtagtggcgctggagggaagcctttggaaggactgtcgaatggaaacaacataaccagtgcccctcccttcgccagtgcaaaggcagcggcagatcccaaggtagcctttggttctcttgctgcaaatggccctaccaccttggttgataaagtttcaaatcccaaaactaatggggacagtcagcagccctcctcctctggccttgcttccagtaaagcttgtgtcggaaatgcctatcacaagcagttggccgccttgaactgctccgtgcgggattggatagtgaagcacgtgaatacaaaccccctctgtgatctgacacctatctttaaagactatgagaaatatttagcaaacattgaacagcaacacgggaacagtggcaggaattctgaaagtgaatctaacaaagtggcagctgaaacacagtctccttccctttttggctcaacaaaattacagcaagagtcaagctttttgtttcatggcaacaaaactgaagatacacctgacaagaagatggaggtggcatctgaaaagaaaacggacccatcatcactaggagcgacaagtgcctcatttaatttcggcaagaaagttgatagctctgttttgggctcattaagctctgtccccctgactggattttctttctcccctggaaactccagtttatttggcaaagatactacccagagtaaaccagtctcttcaccatttcccactaaaccattggagggccaagcagaaggtgacagtggtgaatgcaaaggtggagatgaagaagagaatgatgagccacccaaagtagtagttaccgaagtaaaagaagaagatgctttttactccaaaaagtgtaaactgttttacaagaaggacaatgagtttaaagagaaaggcataggtactctgcatttaaaacctacagcaaatcagaagacacagcttttggtgcgggcagacaccaatttaggcaacatattgctgaacgttctgattccacccaatatgccatgtacgcgaacagggaagaataacgttcttatcgtctgtgttccaaatccaccaattgacgagaagaatgccaccatgccagtcaccatgttgattcgggtaaaaaccagcgaggatgcagacgagttgcacaaaattttactggagaaaaaggatgcctga

SEQ ID NO: 140874 - DNA, 1397 bp, Homo sapiens
aggaggagctgatcaaaagctggagcactcagggaagacttactggagaaggtgagatgggctttggaagataaagtaggggttcaggccgtgagaaatttcctgcccaactttcttaccaaaccctgttgggtaaaggcccaattgaaggaacatccctatcaaaccttgctcagcaaaggtgcaaggaacatcactgtcactttctgagggaacaagggccaaactgcctgatcatagaacgttttatggatagatatactggtaagtatattcacatggcaagccatacgacgcgttgccggccccacgtgagccgacgccccaaagcgcggctgctggcgccggctacgagatcaaggtcggcgcgtgcgcgcttgcgcgagacccgtgttcggcgcggttcccccagctgtctctggctgaaccggcgctctcgcctccctgccgaacacagcgtgaggagcccccccagggatatggtgtttgagtctctgggcttgccgagcactaagtcctctgagttccgcagcgcagcaccggaagcggccgagcgcgctcagcccggcgacccctgcgggctccagacccctgcgccgctgcgccccgggtttcgccgcaaccaagacccagcgagtgcagcggcggccgccgaggaggtgaggagcggcggcgggcgcgggaggatcttagcgaccactttgtggggttgtaatacactctgtattacacaatacaccagaataaggaagcttactctggtgtattgtggtgttgagagcaaacaagagtggggagagtatcacgaaggagttcaggcaggtttaacaagacctggcaggtccccaaaactaatcagtaagtttttggagaaggaactgacagataggaattgggatcaagaagatgaagctgaagaggtaaaaagcagcttccctaagaatgattaagtcttgaagaatagagccataaagaaagcaaagcgcagaaatgttggatttgaagtgagtgcccccttacagctcttgctatttaaaggtttggtggtaccttctggaggaggacgcttttctggatttggtagtggcgctggagggaagcctttggaaggactgtcgaatggaaacaacataaccagtgcccctcccttcgccagtgcaaaggcagcggcagatcccaaggtagcctttggtaagtagctcccatcccccagccgcctcttggttgataaagtttcaaatcccaaaactaatggggacagtcagcagccctcctcctctggccttgcttccagtaaagcttgtgtcggaaatgcctatcacaagcagttggccgccttgaactgctccgtgcgggattggatagtgaagcacgtgaatacaaaccccctctgtgat

SEQ ID NO: 140875 - DNA, 864 bp, Homo sapiens
atgcagcctcaggcaggtccttcagggggtattccagaaggcattgctatcacaggagatgacagctccatgcatgccattgcccctgaagaccttccagtgggacaggatgtggaggcggaagacagtgatactggggatcttgaccctgcacagagaagagccacgaaaggacttaaagtagaaatccgctttttgaaaaacacctctgtgtgcagtggagaagatggagccatctgtcagtgctattcaccttctgacattccatataacttacttattaagtctgttttctcctccaaaaacaatgcagtcaaccttttaagcaatgttccagtctcttgtttggatgttctcatttgtccgttaacccatgaagaaacagcccaagaggcaacgactatagatgaactgcccagtaataaaacagctgagaaaggttttaccaccgtgaagggatgtacaaatcgacctgaagttggctcaactgtgagaaataagctggtgcgcctcatgacacatgttgaccttggagtcaagcaaattgctgctgaattcctttttgtcctttgcaaagagagagtggatagtctgctgaaatacactggctatgggaatgctgcaggactgttggcggccaggggcctcttggctggaggaagaggagataattggtactcagaggatgaggacacagacactgaagaatacaaaaatgcaaaaccaaagccaccacatgggctgtaccggtcgcctgtcacgcacgagttcatcgctcagcggtttcctataccgtataccagcattcctccactctatgtgctaatatacacagcgtgtgggaaacggcatcttatgatataa

SEQ ID NO: 140876 - DNA, 582 bp, Homo sapiens; identical to SEQ ID NO: 125149

SEQ ID NO: 140877 - DNA, 417 bp, Homo sapiens
tcacctaatcacaagattcttagaacgcttccctcttgttaagggctgcctgactgtatacttgagtctctcagaaaaaccaataacatactgagcagtcttgactgtgtttaggagaggtgtggaaagggagtttttttctaactggtacaaaacggcctggagtttttctaagcttgcacaaaaaggcttgctatcatcataaccatcatcgttatcatcatcatcatcatcatcagacaaagccgtaacagcaggaactgaactgtgagaacatgccacagtataactttcaaaatgggagtcaatcctatcaaaccctgctgttactttatcaactaagtttatgtaatattctaaattttttgttgtcatttcagtaatgttcatagcatcttcaccagagacagacttcat

SEQ ID NO: 140878 - DNA, 814 bp, Homo sapiens
ttatatcataagatgccgtttcccacacgctgtgtatattagcacatagagtggaggaatgctggtatacggtataggaaaccgctgagcgatgaactcgtgcgtgacaggcgaccggtacagcccatgtggtggctttggttttgcatttttgtattcttcagtgtctgtgtcctcatcctctgagtaccaattatctcctcttcctccagccaagaggcccctggccgcgcaacagtcctgcagcattcccatagccagtgtatttcagcagactatccactctctctttgcaaaggacaaaaaggaattcagcagcaatttgcttgactccaaggtcaacatgtgtcatgaggcgcaccagcttatttctcacagttgagccaacttcaggtcgatttgtcacatccctcaacggtggtaaaacctgatctttgagaaattttcggatgtttcgatgggctcgggaacattcggttaataagctgagaactggagttagaccctctctatagctgcttcccttgtctattctcttctccataaaattcagtaaaacatgaatggcctccatattcataccattgtataccatggtattgtttttcaaaactgtttctttctcagctgttttattactgggcagttcatctatagtcgttgcctcttgggctgtttcttcatgggttaacggacaaatgagaacatccaaacaagagactggaacattgcttaaaaggttgactgcattgtttttggaggagaaaacagacttaataagtaagttatatggaatgtcagaaggtgaatagca

SEQ ID NO: 140879 - DNA, 1530 bp, Homo sapiens
tcaccagtcttgactgtggttagaagaggtgtgaaaagggagtttttttctactgggtacaaaacggcctggagtttttctaagcctgcacaaaaaaggcttgctatcatcataaccatcatcgttatcatcatcatcatcatcatcagacaaagccgtaacagcaggaactgaactcatttcgattttcactatcacaaccaagcctgcttgctgtctttctcttcctccgcccttaaaccttagggacttcttttctctctcagcctttgaaggtggtatcatttcaggaggagagaatattgatgccagttctacaggctgtacaggaagcaaggcagcatctttccggggaagcctcaggaagcttttactcatggcagaaggcaaagctccacctccaacttgtctccatctgctgccttttggcagctgggtgagctcttggttctgatctttgagaaattttcggatgtttcgatgggctcgggaacattcggttaataagctgagaactggagttagaccctctctatagctgcttcccttggatgtgacactgctgagaataccggggccacagtcatcctgggtggcggaacatggttccaccccagggaaaagcaaaccaagggagatcaagggttgctgtacctttacttcagttgagctgtcagccagttctacaggctgtacaggaagcaaggcagcatctttccggggaagcctcaggaagcttttactcatggcagaaggcaaagctggagggagacaccttatgtggctggaaagtttatcaagcatgttgacaagtttcatggcttcatattctttttgttcttctgtcatttcatctatggggtttggcattggttcctctaaatgaccagtgataagattaatgtttttggaggagaaaacagacttaataagtaagttatatggaatgtcagaaggtgaatagcatatactttggtttggcattttgtattcttcagtgtctgtgtcctcatcctctgagtaccaattatctcctcttcctccagccaagaggcccctggccgccaacagtcctgcagcattcccatagccagtgtatttcagcagactatccatcccaaacccagagttgtttagttcacaggttaggagccaatggttcagatgatcttttctccgaacattctcattctcatgagttaaatgagctctttcttgcctttctccaagatcaaagtgtgtttcttttatctttgaaatatttcttgagtccatccccttttctacgtctactgccagtgttctaatccaggccctacttgcccctcccaggtagaggcaacagctttctgtctggtctcttctgtctgtccctgcatcaatccattctctatacggcagccagagtgctcttcctggtggggtccttttcatgcctgaaaggctgctgctcatgtgtccaatcacgagacatgggatagctgtttccatcatactcaacaacttgtgttctgtaaaccttttgcccat

SEQ ID NO: 140880 - DNA, 424 bp, Homo sapiens
  misc_feature (1)...(424): n = a,t,c or g
acccacgcgtccgccgctgaccactgagtctgccatgaagaagatagaagacaacaacacacttgtgttcattgtggatgttaaagccaacaagcaccagattaaacaggctgtgaagaagctgtatgacattgatgtggccaaggtcaacaccctgattcggcctgatggagagaagaaggcatatgttcgactggctcctgattacgatgctttggatgttgccaacaaaattgggatcatctaaactgagtccagctgcctaattctgaatatatatatatatatcttttcaccatannnnnnnnnnnnnnnnnnnnnnnnnnnnnnnnnnggggggggccttttaagggttccaaatttaattaaggggggttgccaagaaaaaatttttttaagggggccccaaaaataaacccccggg

SEQ ID NO: 140881 - DNA, 669 bp, Homo sapiens
ctaagaaggcaaattggtctttggcaccttctccaatgctctgaagggctccctgcccacaccttctttaaagacctttgggaaccaaaatgattttttgtctgtaccagtcaaggctgccactttacaacagctgagagcagtgtcagttgattgatcgtcactgtgcatgtgaatcacctgggggtcttgataaaccacagattccgcatcagtgggtgtggggtgtgcgggacagactgcatttctcataaatttccaggtgctgctgatgctactggtccttcctggaccacacactgtgctgtcatcacgttttcgctgactactgggtctgccacgaagaagacagaagacaacaacacatttgtgttcaatgtggatgttaaagccaactagcaccagatcacacgggctgtgaagaagctctgtgacattgatgtgcccgaggtcaacaccctcccaaatgtctccattagttttcgctttcttctgtgttccacagtgttctgtactttgactgtgttctttcttagagaaaatggctgaccaaaggtagccttgaacccaagtcttcttgttcagtggttgtgtaatcaggtgatgggttattcctgtgtgctgtcgtttttcagctgttattggtggcttgagaaggcacatgtgcat

SEQ ID NO: 140882 - DNA, 627 bp, Homo sapiens
ttattttgattgaaaacactctgaaattatctgatattttgtaatggcatcagttaaactgtgagctggattccatctttctgcagtaacagcgggcagaaccatttcagttagcatgtgcctcactttaagaaagtcagtggtcactggtttaaagggtatcctttctcttgctagtggaggagtgggtttccgagtgagccagtctgggagcctctggtcctgctttgcagcagcgcgttccatggctgacctgcctgggggtgaagtggcagcctcttccttcagtttgatggcgtcaatctctctcttagctttgggataatctgaaaccataggggtctgccgttcccagactacatcccagggacctatttcctcttcttcttcttcctctttttctccttctcctccttttcctcctcctccttctcctttccagcctccggtaaccacaattctactctctatttttatgggatcaacttttttagcttccatataggaatgagaatgggtggtatctttctgtgcctgacttgtttcacttgacacgatgtcctccaggctcatccgcatagagaaggaagacaggatctcctttttcatgactaaataggattccat

SEQ ID NO: 140883 - DNA, 1830 bp, Homo sapiens
  misc_feature (1)...(1830): n = a,t,c or g
cctggccttaaaangggggcctataattgncaaaccttacacacacacacacacacacacacacacaccccaacacacacacacaaccctcaaaccccgggttaataaaaagaagcctttgtgggatccagagtacacccctcacttgggtcccaagaatcctaattgtcaacattaggcaaatagaccccaatgaatgtaacccaggaagagaattaaactggttgggccnggaatattgtatttgcataatggatatgccttatttgcaaactaatcctcccaactgtttgtcccagtactaattcaactgactcatcttcctaaatgtataggacaaagcctttaaaaagttaagctcttcagcaacgaaaagttaacaccatctaaaataaatagattttaaaatatatgtaatgaaattacaggtcactggaaattcaattctacaatgaatataaattaacattaaaatctattaagtactattcctgggaagattttggttcagaggttttatttttttaagggcttaatatttgtggaataaattgggcatagcttagaaacccttacaaagttgtaagtagactaggaggtaaggattatttggtgacaaggatacaaagaatctgtttctatgtccaaaataatggcttacctcattttagttaatagaagtattcccaaaaagttgtgcaaataggctttttataactggacgcttattttaagtatactagaggcccagggttgtaaaaagaaaaacctgtaagtcaactccctcctaaataaactgaaagaactcctaagtgaataagccccctgtccctacatcctgccacagtggacggcatactcccaggcactcataagtgtttgttgaatgcatgaattcgctctgacagttttttttttcccctacaggactttcttaaagtgaggcacatgctaactgaaatggttctgcccgctgttactgcagaaagatggaatccagctcacagtttaactgatgccgattacaaaatatcagataatttcagagtgttttcaatcaaaataaaatttccataagtatgagtgtatgtatttttgaggaatgttgatctatgattggcagaagcttttattgttaactcactcactgaaaacaactgcttgagctgaattctatttcaattaacaaccaaggcaagtaaagcactttacctaacttcagaaataccaccagaaaccattccacttctgtaacagcttcttcccctcactccagcacaaatatttaaatgctgtccttaccttagtccacaaaagcaaaacatgaattacaaagctaagattaaattagaaagctgaccgacttaaatatggacaaagtttttttagccttaaaataagaactaagtcaaatacattcaacaaaagtaactcttaaaggcaaatttttttcttatttggtgttttcttcccttcccatttaaatttaagactcaatttttaataatattcatatgtccatttttctaaataatatatcctctttaaaacaatacagaatgcctagcagtgcaacctatgtgtccacataaatatgcaacctgccacataaataaaataagaggttttatcagtctatttatccagcatttgtaactgcaaaaaaggctggaaaaatagctaagaatatttttatgcaagttttggggaggactgaacactggtaaggattcactgtagggctccatcattataagtttcctaaaaagtagtgtgcaaacaaaatatctgaacacagaaccctaaacatactagatgtatgtgtgggta

SEQ ID NO: 140884 - DNA, 931 bp, Homo sapiens
  misc_feature (1)...(931): n = a,t,c or g
cgtggtggaattcccggagccggggtannnnnnnnnnnnnnnnnnnntgcagccactgcaggcaccgctgccgccgcctgagtagtgggcttaggaaggaagaggtcatctcgctcggagcttcgctcggaagggtctttgttccctgcagccctcccacggcagagtctccagagatttgggccgctacaaaaagtgcattttgcccattcggctgtggatagagaagcaggaagagcactggacgtggagtcagggaatgacaatggataaaagtgagctggtacagaaagccaaactcgctgagcaggctgagcgatatgatgatatggctgcagccatgaaggcagtcacagaacaggggcatgaactctccaacgaagagagaaatctgctctctgttgcctacaagaatgtgaaaacagagaggaatgagaagaagcagcagatgggcaaagagtaccgtgagaagatagaggcagaactgcaggacatctgcaatgatgttctgtactctcccccttttccaatggatgtggcttcctgtgagcagactgctgtgattgttgtgtctcttctggggtctagctgctcagcgagtctacctggctctgggctggtactgggggttgtctgcacagagtcctgtgatgtgaaccatctatgggtctctcagccagcaataccagcgcctgtttcagtggcgatatcggagggtgcaatggactctgtgaaggtccttagctttggtggtttaatgttctttgtgctgattggcctcttgccaggaggtggagctttccagaaagcatcagctgtagtagtgtggagaggaattggtggtgggcagggtcctagaactcccttgtcttccactaccagggtggataggaaaggaccaccaggtgggggtggggctaggagtgtctga

SEQ ID NO: 140885 - DNA, 1128 bp, Homo sapiens
ccctttataatcgccgccgccgccgccgctgcagccactgcaggcaccgctgccgccgcctgagtagtgggcttaggaaggaagaggtcatctcgctcggagcttcgctcggaagggtctttgttccctgcagccctcccacggtgagtgcggcgcggggtccgaccggggcccccgggggcccaaactcgaagcccctctctggctgctgcgacgacgggtttaaccttgggagacagcagtgggggaaccccctcccattttgcagtaaaaccatttcatcatccttgcactggacttggagtcaggtaaatttggttgaaatcttgcctgcaatattttctagctttctgaatcttcagcatgttaatctctggttcttggctgcagccatgaaggcagtcacagaacaggggcatgaactctccaacgaagagagaaatctgctctctgttgcctacaagaatgtggtaggcgcccgccgctcttcctggcgtgtcatctccagcattgagcagaaaacagagaggaatgagaagaagcagcagatgggcaaagagtaccgtgagaagatagaggcagaactgcaggacatctgcaatgatgttctggtaagaggccagtgcttctgttttgaacagtggtttctaaatagtattaatttaatgtataaatgcagactctcaaattattttaggtatctttctgaagtggcatctggagacaacaaacaaagtaagtaatatctttaaaaagaaattcgaccagtaatggagccagtcttctttcacagggactttttaacgattttaattcgtcttggtctggcactaaatttctcagtcttttactatgagattctaaactctcctgaaaaggcctgtagcctggcaaaaacggtgagaaagaccctttgtgatatctaaccatagcaaaacagtgcttgtgttattaacttcattttattcctgaacatacttagggacaatctcactgtaagtactacttccacagggtttatagtctctttcctattcacctacttaataattcactgttatcttcaagaggtctgttcagtgtcactctgtaccctcaacatatatcccttgtgcgataaaaaaaaaa

SEQ ID NO: 140886 - DNA, 601 bp, Homo sapiens
cggaagtggcgatcggagcggaagtggagctaccgccaccgccgccgccgattccggagccggggtagtcgccgccgccgccgccgccgctgcagacactgcaggcaccgctgccgccgccgtgagtagtgggcttaggaaggaagaggtcatctcgctcaggagcttctctcggaaagggtctttgttccctgcagccctcccacgggaatgacaatggataaaagtgagctggtacagaaagccaaactcgctgagcaggctgagcgatatgatgatatggcttgcagcagtgaaaggcatgtcacagaacaggggcatgaaactctccaacgaagagaagaaatcttgctctcttgttgcctacaaagaatgttggtaggcgccccgccgcttcttcctggccgtgtcatctccagcattgagcaagaaaacagagaggaatgtggaaggaagcagcagatggggcaaagagtaccgtgagaagattagaggcagaactgcaggacatctgcaaatgatgttctggagctgttggacaaatatcttattcccaatgctacacaaccagaaagtaaggtgttctacttgaaaatgaaag

SEQ ID NO: 140887 - DNA, 518 bp, Homo sapiens
  misc_feature (1)...(518): n = a,t,c or g
cacgacggtgccagggacccgcaacgtgggccaccttaacaaagcatccggtggaggaaaactaaggntcccggtgagcaagaggaaaggagcccagaggtacctgggagaggatataaataagaaagactggaaaacttaaggtacaaggagtcataacatttagatgttaaagactccgtaaaggttcacactactggaaatgatttttttaataaaccaattctgttcaacaggttaatgacactagtccttttcatgaagctgatgaaatcaagttttggtcagcattcctttcttcttacattcgaaaactacataaaaactgtaccatttattaaagataaaaaaatgttttggatgcacagtccaactatggaacactgtagcagtctgtttactaatctcccttaatggctaaaatcagagtgaatgttatgctcattttctaatgttataataactccagaatgtcaaattcttacattttcttttaaatagtgttgaaggcctcaata

SEQ ID NO: 140888 - DNA, 1103 bp, Homo sapiens
aagaaaaggaagagaaatggaagctataaaagaaaaactaagccagaaaattatttacctactattaacaggtgggtttaacagaagattagaagcatttgaagagagaattagtaaactggaagatagctcagaagactttatattttaagagctgtaagttccagcaagtgaataatgtatagtgatccttttttttttttctcagtttaattttgttgggagaatccttggacctagaggacttacagccaatgtaaataggtatttagagttacacaccttgtatggctacatgaatttatttatagttagtattatgaaagatgtgctctctctttaaagagaataattttaatcatgtactctgtaaattttttaggaggagcaaaatagaggcaagcccaattgggagcatctaaatgaagatttacatgtactaatcactgtggaaggtgtgtagatatagctattatatttgtggacagtctcaaatgctttcatctcatgtgttttccatgtataggcagaaggagaagacagatactgctgtctctatacttctttctaaatttctttgcttactgtagcagcccttgccttttctcttgcagcaacagcccaggctgctccaaggatcattactgggcctgcgccggttctcccaccagctgccctgcgtactcctacgccagctggccctaccataatgcctttgatcagacaaatacagaccgctgtcatgccaaacggaactcctcacccaactgctgcaatagttcctccagggcccgaagctggtttaatctatacaccctatatttatatcatctccaagtacctctggctcctttcctcttgctcaccggaaccttagttttcctcaaaatggaagtgctcaataaatatttgttgagtgaataaatgccactatatcctgtttcctacctgtccctagagaattgtcaagtcaactgatagacttagccctgatattggtgtcgaagccagttggctggctggaaggccggtgaaggcagcaagtcgctcacaggttctaaagtgcaccagagcctggttcgtgcatgttatcaaggccgtgc

SEQ ID NO: 140889 - DNA, 4110 bp, Homo sapiens
aagccgaagcccaccccagattacctgatgcagctgatgaacgacaagaagctcatgacagcctgcccaacttctgcgggatcttcaaccacctcgagcggctgctggacgaagaaattagcagagtacggaaagacatgtacaatgacacattaaatggcagtacagagaaaaggagtgcagaattgcctgatgctgtgggacctattgttcagttacaagagaaactttatgtgcctgtaaaagaatacccagattttaattttgttgggagaatccttggacctagaggacttacagccaaacaacttgaagcagaaaccggatgtaaaatcatggtccgaggcaaaggctcaatgagggataaaaaaaaggaggagcaaaatagagggcaagcccaattggggagcatcttaaatgaagatttacatgtactaatcactgtgggaaggtgcttcaggaacaggggcaggaaatcaaattgaagagagcagttgaagaagtgaagaaattattggtacctgcagcagaaggagaagacagcctgaagaagatgcatctgatggagcttgcgattctgaatggcacctacagagatgccaacattaaatcaccatcccttgccttttttcttgcaggaacagcccaggctgctccaaggatcattactgggcctgcgccgggtctcccaccagctgccctgggtactcctacgccagctgggcctaccataatggctttgatcagacaaatacagaccggtggcatgcccaacggaactcctcacccaactgctgcaatagttcctgcagggcccgaagctggtttaaggtatacaccctatgagtacccctacacattgggcaccagctacatcaatccttgagtatcctatttgaacctagtgggtgtatttagggtgcggtggcttattaaagtttcggaagggcacgatatggcgtgttccattccttttaccaaagggtttgttgaccgcaggaccgaggccgccaccggcaactaacctatgaccttctgacctctgaactcttcacccaatgatgacctgaccatgcctgcctgctgatcagttaactggtaatcgcctttgcttgcctgtcgtcagtgcagcgagctgaggcacttgtccgttcgtcttaccatctaaccaaacaaaagacaaagaaattgttgtcctccaactcagctttttttttttttttttcctgtttgggtgaaagtggttctagaaactgcactgaatagtagtaaagcaataaggcccaattcatcccacagcactgatcatcttttaatatcccaccctaagcgaacggtaagaaggcctctcttaagaaggggagacagatggtccttaactactcaatgacagaggcagttactgtgagagacttctaggaatctttttcttctcatagcgaagtcaaagctctctctgaatgtactgtgtgatgatgcatcatgcatgaaccttcggtcagggatatcattggtgaagtgatttcaaaaagtattcaaaatttgatatgctgtttagtcactacagtgccctcaaagggcagaagttgcagccttttttatattgcctgccaaaatttgaagtattagaagaaagtgtgccatgagagaaaaacttaaggagttttgaaaagtaatgcaaataacaaaactgcaacactatttttaaaaagataaatatctgagttaaaattactgaatctttattttacacctaaaaaaatatgagaacaaggtacatgcattatgtgtcacattactgggcaaactgttcaagtatttttttttaaacctccctgtatagaaaaaaatcattaaggatgtaaaagccatgcttgcctatttgctgtatacatgtaatgaaattgtagataaagtgtagtgcattgaaacaaatgaacaaaaagtagatacttttactatacaagggtgctggtgcagaaaaaaatatatatatttttggaaatgtagcattttatactttcaagtgttataaaaaaaaagaaaaagaacaaagaaaccctttatttcattaaatgattttttctggtggttgtcaagaaacaaaagaccaaaagagcctttttgtctttcttttttattttttaagtattggaataagtctaaagaaaagaaagtgccttattttccttcatggtcattcagtcaagtgtctcataaagatcagctcctccctcagaatacaagttaatgcatgttactcagtcgcccagtatgtgaaagaagatatgagggagacaaatgagttgatagtttgaattataggatttttgccacgttaccttgatgcaaatttgccaaatctgatactgtgaaaagatttgataacttttctaatgcctgactagtaagttttaaaacatcattctttaaaagaatagtttaatacttttggttattccaatcttcaatgttaacccaaaggattctgagataaaaattatgtgtcatctaaacttcagtttacagacaaaattagagctttgttttatttggagaagggggatgcattcatttgattttgttttttgtttttaattaattgaatataataggatacctagcaaatgttttcacaaaagtgaatctttgtgattttcattctagaaaacaatgttttaaatcacccaaatttaatcacatgtctttatatcataccagataactggtgtagtgtatccttttactgtttcaataacctctgcctcccccaccccttaactttaaaagaatgtgaaaaactagcatcatagtgcatataaatactcaaccacatttcagcttaagcttctaatttctcaagaagttgaaacagttagttatgtagttgaagcaatttgtgtgcaaagcctacatctaaacacttgagtgaataatcattaactgctcagtaccagacgtggcaaatctcaagtgacagtggacccccccccccgcccagcttatcaactcgtcccctcttccacaccttcccagcatcacagtcagaggtcagcaggaagctgagtcattaccttcttggtgacctcccccaccatcttgtctcacttggaaaccgttgtcagtttatttactatgcaatagacattcattgttttgtatccagctagctttggtttaatatgccactgctttgtctttctgttacacatacagttttgatttatttacaatatatgctgtgccattttgatttttatattgtttggttggttgaataaatttgcgacactcaaacacttgaggtgatagttgttaaaaacaataccagtatttgatccagtttcatctcaactatgttatacctggacattttagatgtttatcaaaggtcttttatggggaagaaagtaaatgtatgaaataataaatgtgtgacatttatagggaatgttggctctgaacaaacttttgaaaacttggttgacaaaattttggatcaactgaaaaaagcatgacttttgaaatctctgaatgccttggttctcagtattatcattctttattgaatttatttcttattaaaatatgtagtttttaagactttttttctgacagtattatgtaattttttagcgtgggtagatgggagtgtcgcttgtatgttatcgtacagctgacatgtatttttgtctattctttattatcttagtttcatgctatgtatgtaccataaccaacctattgcctatgagaaacatgtaagataatgtatttacagccattgttacaagtttataatgtatttttctatcttgttttatatgtatgttatataacattcaaaaagaatttttttcttgattgagaaaaggatacaaaatgcaaaatccacaattttgataactgaaaattgccaattgttttgcagtactttattatattgggtgtcttgtcttttttgggcttttagttagctaatgaatgaatacattagacacttttgggttttagttgggattttacatagcttgcattttaattctttggttctttgctgtttctattaacccacagcattattttaataaatgttataataccaaccta

SEQ ID NO: 140890 - DNA, 1478 bp, Homo sapiens
ttcggcacgagctcagatcagtgttatttcagatattcagccagggcatctcttttccatcatggatgaaagaaaaggacattgttaagcttcctgaaaaactgctgttttcacaaggttgtaattggattcagcagtacagttttggtcctgagaagtatacaggctcgaatgtgtttggaaaactacggaaatatgtggaattattgaaaacacagtggactgaatttaatggcattagagattatcacaagagaggaagtatgtgcaacacccttttttcagatgccattctggaatataaactttatgaagctttaaagttcatcatgctgtatcaagtcactgaagtttatgaacaaatgaagactaaaaaggtcattcccagtctttttagactcctgttttccagggagacatcctctgatcctttgagcttcatgatgaatcacctgaattctgtagggcgacacatgtgggactaggagcagattgatatgtttatacttgggatactcccttgaagtaaagatcaaagtgttcacactgttgaagtttaactccagagactttgaagtctgctacccagacgagcctttcaaggactgaccggagatctccactgctgaccgagaacgaccgccactaccacattccagtcttttaagtccgctgggggccgaacagcagtgctcaccagtgacggtggtcacagttgcaataaagtctctctctgaaaccaaagctagcatttcagcatggaaggaattaggaccttttcttcaggattacaggtacactggatgcagccatgcattggatggtttttctttatttttcagtgatttcctctgaagcagctgcactgatacatttgggagttggtggcttgactttgtccataaggggcgtggccacttcacatgatggcgggcctttaagagcacaaagaagtttaatatggacaacaacaggaaaaagcaagaagaaaacaagtagggaaaaacagctaacctggaggagaaaggaatttcctttaaccctttatgttcttcattaaaaatcttatcttggactgatttgagggatttttagaaacatggccttattttatataagcattaccttcccaggaatctttgttgtatattaatttttgataaccatttgattaactttaaaaattaagtatatgtgtgtatatatacatatgtatgtttatatacacacatgtatctgtatagttttatatatacatatatacacatagacatacagagaaccactacttttgtaatagtgtacagtttgttttatatctctttacttttttttgttactattttatctggccagcgtaatagttttatttagattttttaaaattctgtagatgaaagcaaatgacagttattgaacagctacaaaactattaaactgtggtacatttaatgtgtaaaagaaaaaaaaagtcgacg

SEQ ID NO: 140891 - DNA, 517 bp, Homo sapiens
caagaaacagcaaacatgtctgcagggctgagccctgaggccacttttgctacaagtgacatttctggaaccacacggagcacacagctgttcttgaaattgacagatcaatgcccgagatgaaactgattttttatttgggaaacagatgtacttatgtgtgcaaagaacaacacagtggccctggcagcaaatcaaacacaaccatagtcatctggggaaaggtaacttgtgcccaaggaaagaacagcgtggtttgtgccaagttccaaagccaccctcctgctaaggccattggtcacagaatccatgtgatgctgtaccactggaggattcaaattcattgaaaagtaaataaatacaattttagggttgttaatttgaaaaaacatgtgggtatctaatttctatgtgttggcagggccaaacagtgaaacacggagcttcaaggcgaaggcagcttgttagggtccctccttctgacctgcccttggcagcacatagacaacctgtctac

SEQ ID NO: 140892 - DNA, 1038 bp, Homo sapiens
atgtctatcatccatccagaactgaccctgaggggcgagcaggtagccagggtttcctggatcatccccacaatgtttgccccgctcctgactattcaaggctgtcccttacttgaagacaagtctcctcttgccactcagcaagttctgggaccactggctctgcgtggagcatttgagattcttattctatcaaaagatatcaaattcattctttttgccctcttggagcctggagaggcccatgggaacagggcttctgaaacagcaaacatgtctgcagggctgtgccctgaggccacttttgctagaagtgacatttctggaaccagagggagcacacaactgttcttgaaattgaaggtgtttatgcccgagatgaaactgaattttatttgggaaacagatgtacttatgtgtgcaaagaacaacacagtggccctggcagcaaatcaaacaaaaccagagtcatctggggaaaggaaagaggctcaggatggtgtcgactcagtggaaggcagagatgaagcctggaaagaaaccaggcccttgggggtgttactaacccactggaccgtgacccatctgaagcctgccctgtctctagactcagaaccaacacttgcaggtgtgtcagccacagcagtcagggatgctcttacaaatgcaggtctccacaaacagcagccaacacaaaccaccagaaactccacacagaactcttgcatgcatgagccagaagcaggtcacacagctgcccctagctacaatggcactggcacagtatttagtgagcacatcaccaccctacacgacccttgggtctggtcaaaatttatcactcacggttctggtggctggaaatccaagatcaaagtgccagcagattcaggttctggtgaggacccacttcatggttcacagggcctttttgctgtgtcctcgcgtgatggaaaagatgaggtgccactctcgggcctctttcatacagccactaatcacccctcaaaggccctacctcctaatccatcactttga

SEQ ID NO: 140893 - DNA, 1358 bp, Homo sapiens
ttcgtttaatatctgtggattttatttgacttatgtctcaacatacaatatacacacataaagtacaagcagccaccgtaaaacatttttctgatgatatctctcattacttcaaatcctggtggaggaaggaggttcaagaatccatctcacaattaagacctcagggttgaagaggatcatcataaaaactatcagctgacaaccagctcttacacctgctctaccacacaatattattaatagttttctaatgaaaacaaaaatggatttcaggaaacccatgcctgaacattattttttgccctgtttgttttccaatggagtccatctgaaatggttctgtgttttgtttgtacaaaaaagaaataaggctgcctatagtcccagttagcatgtgaaaactctgccaagcacgaagatctcctcccagctcggatggattgctacctgggaaaatggaccgacccagggagtggcaggtcccaaggaagaagggcagtgaggctggacgtcacttgcactgttcgtggtctgtatagtcatccatgtccacatccgaatcaaagagtgagtgtccagtaaaatctgtgtctggggttctggaaaaactgttttctgctccctcatcttcaaaggtctctgtccttgagtaaaagctaaaatccagcagcggggtgtgggttttgctgccttcgctgctctcctcagactcatagatggtattgtcatcatcgtggtgccactctggccaaaatttcctccttatcctctcacagtacatggcaaggttgatcagctcacgtggggatacatctccataaacccattgaaagctaaaaatatcataagtcagctgggcacagtggttcatacctgttatctcagctacttgggagactgaggtaggaggatcacttgaggccaggatgtcaagaccagcagttacatgtgcaacatcgaaaaacagtttagactcagagcatccagccccagtaagccccaaaacctgaagaagagtgtagggcttgcctttgatcagccgttcgggtcttgtccctggtaaggtccacattgcctgtgccaagtgtccaaagacagtggcgtcaagagtggaaagcttgggccccatgatgtacttcttatcacctgagtaacgacgacagatttccttctgcctaactgccttcaaactgggacactggtccctcctaggtctccagcttgccagctcatcctgcagatcttgggacttgtcagcttccataattgtgtgagccaactccatataataaatcctaatggttcggtttctctgaagaatcctgactaatacaccttcgcagggcatcatatca

SEQ ID NO: 140894 - DNA, 556 bp, Homo sapiens
gtcattgagcaaagtacgcaatttacgcgcgatggcgatggtgacatttttctcccgcgtaccaccggggccgatagcgccagggtcctgaccgccgtgtccggcatcaatagcgatgataattttatcgccagtgttagccgtcgcgcgcgctgccggacgcgttaccgtattactgctgataacacccgtagtgcggttactttccgttttaaacggattgcgcgccggttcgctgacgcgcggtgcgacaaccgcaggcgtttcaacgcgtttcgcaaccacgggcggcggaggaggcggtggcggcacatcggcgttaatcgtaaagacgacagtgtaattgctgccattctgccgcttcaccgcttcggttttaccgttttcggtaagatcgaccaccagccgtagcgtttgtgcatctttaggcgttccagagcgaatcgccttcaccagattattgccgctgaacaacaacggcagtccctgaatcacgcccgtttgtttgatatcgagcgccacggtgcgtttgctttgatggctaaacgcataatca

SEQ ID NO: 140895 - DNA, 3969 bp, Homo sapiens
  misc_feature (1)...(3969): n = a,t,c or g
ctagcgtgtcgcttgtcgtgccgtcttgcgcgcacggtcggcccacgcggttcgtggctcggttgtgtacgtgtggccgcgtgttgacgtacggtcaggccagatgctccgcctagcgttgcggcttctgtgtggctcttcntggacgagcatgtgtgtggtctcgagttcgtggctgttgtgtgctgattgattcgctctggcgttggccgaggcgccgtagccgtgcatttcgcagcgggtgtctgttgtcgatgcctgggagaccgacgtcgcgtggtcgcttctggtttcgttggaatgtggtgatcgcggtttcccgatcgtcctatcggcgtgtttgcgttctctgtgtatagagtcgctagctcgtatgctcgatccttgcggcattgtcgcgtgtcgctccgctgcctcgcggcgtcgacgtctgcggctcgtggagccgctagtggtgtggtgtcgcgtcctggtctttgcgcggctgatgaccggtgtcggcctgggggcggcgttgccgaatcttatcgccctgacgtctgaagccgcgggtccacgttttcgtgggacggcagtgagcctgatgtattgcggtgttcccattggcgcggcgctggcggcgacactgggtttcgcgggggcaaacttagcatggcaaacggtgttttgggtaggtggtgtggtgccgttgattctggtgccgctattaatgcgctggctgccggagtcggcggttttcggcacatccgcaatcaacggctggttaagcgtatgcaggtcgagattttcctgtttcacgccggagagcatcaccgcttttagcgctgcctctttggtgccgcgggcaaactgtagcccctgctcatccactggcgtttcgccacgatcgaggaagcagacgaccaccggcttgcggcaggcgcgcgcacgttccagcactttgcgggccaccgcaggcgcaggcggtttggagataagcgcaatgatttcagtttgcggatcgttttccagcatcccgatggcgtcgagcatcatcaggccgccgattttctcgctcaggtcgcgcccgccggtgccaatcagttgcgaaacgccgccgccaaattcatgaatgcggacgctcaactcctgactgccggtgccggatgcgccaacaataccgatgttgccgcgacgcacggcgttaccaaaacagagcgccgcgccgttgataatcgccgtgccacagtctggccccatcatcagcagccctttttcgtgggccagttgcttgagcgccagttcatcttcaactgagacgttatcggaaaacagcatcacgttgagatcgttttgcagcgcctgacgcgccagagggacctttcctccaactgtgaccacatggaattcagtcaagaacgtgaaaagaagcaagcgggccttaaataaatctgcaactattccataatctgccacatggaaaattggagcttctgggtctttattaattgccacaattgtcttaaataaatctgcaactattccataatctgccacttggaaaattggagcttctgggtctttattaattgccacaattgtcctgtcctggcagacgctgggtcgggccggcagcccgcgttgcgcccgcacgtgcacaagcagacggagaagacgacccgcgtgcggactgtgctgaacgagaagcagctgcacactctgcggacctgctacgccgccaacccgcggcccgacgctctcatgaaggagcagcctgccccttggcgcacttgatgcgaacaagcctgcgggcccaaggtgcgccggtgtcagcgctgggcctgcggccgccctcatctccctggctgtacgggctccggcgcgcgcccaggacactttgtggccaccaggagactgcggtgacccgcctgcgggcattcccgggcccgggggagcgctgcggcacccgtgcgggatgcggatggccttctccctgacatagtcccgcttgcagtaggtcttcccgtctctcacgaagcacgtgcacgtctcgtccaggtactggctgcactcggcacacttgaggcaggccgcgtgccactcgaggtcgggcgacacccgcaggataaactggtcgtggatctgactcccgcagcccacgcacatggccgtcccgggcttctccagtaaggggcacagaggaggtggccattcacttaattcagcaggtggagctgatgggctagtaaaacatactttttttagttttcctttcttttcattaatctcctccggtagctgtttctcacactcagaatctgaagttagtttttcccactcgtcctcctcttcctcatctttattagtgcccacactggccaaatgagggatcactcgagagtctcgtcgtgtatgtcggtgctttcgtgcgctcccgttgttgcgtggtgtcgtcgtcttcgtcgcgtgggtgtcgagtggcgctgctgtcgtttcgttattgtcgttcttggcgccggtccgtggtcgttgctgctccgtccgccgtggtcggcgttgggcctgtggcgcgcccggtgtcgcgtctcccgccgcgtgatgccttttttcgcgcgttttgcgtcgctttggcctcttgttcgccgtttggtggtcctgcgcgtgtttaccctgtctttgcgcttgtccgccttctccccttttgtgcctggtccgctttcgccgcgtatcctcgtttctgctgttgccctgttcgcgcctcgccgttgtcccgtttccttgtcctctgttggctgttgggcgcttgctgctggctcccttgcgctgtttgctgtctggctttcccgcctcgccctgtgccgttggggctttggccctgcgcctttccctttgtcccctgtccggttgcctttgcggctttgggcttcgctgtgttgttgcccctgttgctttgcccttcgcgtgtgtccttgtgcctttggcttcttctccgccctttttctttccgttttgtgtcgcgccgtgttccctctcgcctttcctctgggcctgtcgtcttcctctgtggggtttgccgtctcgttttggctttttgggtgcgtctttgtccttctgcctctgctttgtccgttgcctcttttgcctatctctggcgcttttgggtctgtggccctcggcgtgccgctttgctcttgcgccgttcccgcttcggggtttggggtgggccttcccccgttccccgataaaaccccgcccccttgtggtgctcggcctgctcgtctttggcaccaaaaggcgctctttctctctgtgtcgtgacggctttatcttcgccttccggccggaatagtcagtgtagaataaacggatttttccgtcagatgtaaaggttgcagaaccggaccattcttgcgtctgatctttcaggatcggatcgttggcgtcgaacttatcgctgtctttaaagacacggcccgcgtttttccagctgtcgattgagttgtcgccgaccttttgataaaacatgtagattgatgtgtcatcagcgtgtgaaatattttctgcatcagccagcgcagaaatattttcagcaaattcattctgcaatcggcttgcataacgctgaccacgttcataagcgcttgttgggcgataatcgttacccaatctggataatgcaggcatgtgctcatcatgcagcttgccagccagaccacgataatcactttcggtaagtgcagcagctttacgacggcgacttccatcggcaatttgtatgacaccagatactcttcggccgagcgccggtgtctgttgaccagtcagtagaaaagaagggatgagatcacccagtgcgtcctcagtaagcagctcctggtaacgttcaaggcctgaccatacccgagaggtcttatcaacactatctcggcggagcacttcaaaaggatcatgtgacagtcccggttttggtgcaccagaatccagcggcat

SEQ ID NO: 140896 - DNA, 1902 bp, Homo sapiens
tcactcgttgacaggtagatgtattttctttctaatcacaggcacatccccaggaagcccagaaatgtctaccactctcaaaatcatgagctccaaggaacccagcatcagcccagagatcaggtccactgtgagaaattctccttggaagactccagaaacaactgttcccatggagaccacagtggaaccagtcaccttcagtccacagctggtctttgcgcggctgatgaccggtgtcgggctgggggcggcgttgccgaatcttatcgccctgacgtctgaagccgcgggtccacgttttcgtgggacggcagtgagcctgatgtattgcggtgttcccattggcgcggcgctggcggcgacactgggtttcgcgggggcaaacttagcatggcaaacggtgttttgggtaggtggtgtggtgccgttgattctggtgccgctattaatgcgctggctgccggagtcggcggttttcgcgtggcgctcgatatcaaacaaacgggcgtgattcagggactgccgttgttgttcagcggcaataatctggtgaaggcgattcccttttaagtctaaaccagtgatgtaacctccatgtattgctttatgattttgcctgtagcttctgcttttctgtaacttaccattgccttcagaaatccttgccaagtatttctctgctttctgccatgtcacgggcccatgatccccattgacatagagactgttcctgtccagggtgtaggggcccagctcttcaatgtcattggtcagtttgcttagctcccagtacagctgctccctgttgagtccagggcttttggggtcaaggcggtgggtgcagatggcatccactccagtggctgccccatctttctcgggcccagaactagtgaccagtgaagtcaccagcccttgtacagtaggggagacagctaaagttggaatggctgaaatcatctttgcctcagaatgggtgaccaatgaagttgtggtctctggttcatcagaagaaatagtcagagttggaatagttgtactggttactgctctagaactagtgaccagagaggtcaccattcctggtacctcaggtgaaacagttagaacagctgagctggcttctaccccatgactggtggccattgaaggtgtggtctctggctcagtgcggttgcttttgcgcatgttttgcgttcgggtgtgtgtcgcttgtgccgtcctctttttgtgcgctggtcttcccttctgctgctttgttcccttcgctgcgacgtccgtctgctcttggtcttggttgtggtgctgattgcgtggctctcgttcgttcagcggcgttctttgtcgcctgtattgacacttttctctgtcgtcttcgtgttggttgttgtcgctgtgttgtgtgtcgctgtatgttgctccagcacctgtttgggttgtgatggtcatttttgcagattctgtcaggacagaggaggcagaaatcctggggatggttcctatggagatgtcttgtgacattgtggactgctcagggcctgacatggatgttctgctaaaggagatggcttctgtcctggagacctcagtagtagcaccagtggacactttagaaagaacagtgtttgcttctgtggctaagctggtctcttcagaggtgctggtctccctcaatctggtggtcagtgaggaagctggctctgactgaattttcctgtaatgtcgatgagcatgtagggttgtactttttgtcggtgcggccaacggctcggcgagctgctgctgatggggcggagctctcctgttatttagtgtgtccgtgcgtttggtcgtggcctgtgcgtttttgagggtggagtctcgttctgtcagctctaggctggagtgctgtggcaccat

SEQ ID NO: 140897 - DNA, 141 bp, Homo sapiens
ggcaacgcttgactacgtggtgccgttcaaagtattcgaaggtaaccgcccgaccaactccatcctgctgcgtgaaatcactccgttcagcctgggtgcgttgattgcgctgtatgagcacaaaatctttactcagggcgc

SEQ ID NO: 140898 - DNA, 1191 bp, Homo sapiens
atgttcacgagtcaggcgacgcataccttcaccttccgcacccatcaccagcgccaggcgtccggtcattttgctctgatagagtgtatgatccgcctcgcctgccgtaccgacgatccagatattctcttcctgcaacatacgcatggtgcgcgcaaggttagtcacccgaatcagcggaacgctttctgccgcgccgcaggctacttttttcgccgtagcgttgagctgtgcggagcgatctttcggcacaatcaccgcatgaacgcctgcggcgtccgcactacgcaggcacgcgccgagggtgcaagtcaggctcggtaccaaccgtcgattttactggatattattcgcgatctacaacagcacggtatcgcctgtatttatatttcgcacaaactcaacgaagtcaaagcgatttccgatacgatttgcgttattcgcgacggacagcacattggtacgcgtgatgctgccggaatgagtgaagacgatattatcaccatgatggtcgggcgagagttaaccgcgctttaccctaatgaaccacataccaccggagatgaaatattacgtattgaacatctgacggcatggcatccggttaatcgtcatattaaacgagttaatgatgtctcgttttccctgaaacgtggcgaaatattgggtattgccggactcgttggtgccggacgtaccgagaccattcagtgcctgtttggtgtgtggcccggacaatgggaaggaaaaatttatattgatggcaaacaggtagatattcgtaactgtcagcaagccatcgcccaggggattgcgatggtccccgaagacagaaagcgcgacggcatcgttccggtaatggcggttggtaaaaatattaccctcgccgcactcaataaatttaccggtggcattagccagcttgatgacgcggcagagcaaaaatgtattctggaatcaatcccggcccctccaagttaaaaacgtcgttcccccgaccttgctataggacgtttgagcggcggcaatcaagcaaaagcgatcctcgctcgctgtctgttacttaacccgagcattctcatacttgatgaaatcagctcggtaccacgattatatgcatgtatcccagagcaatgcctcccattacagagagcactgtccagacgaggtatttccctgatttgttcatag

SEQ ID NO: 140899 - DNA, 1794 bp, Homo sapiens
ttatctgtaaaatggggctaggaaaaggatgcccataaggggcttttcataatcacgctttacaatatccagcgcgcgcagcacggtactggcagggatctgattttcctccagcagcacaatcaaatcgacagccagtttgacatcgtcaggggcattttccagtgacatattctctccattgctgttttcgattttttccagcgcatggcggcagcgtgccaggcgcgcttcataggcttccacttcacgatgcagcgtttgctgttccacgagatcggtcacccgcgccagacgggctctgcgttcggcaaccatctcacgtagccgccgctcaaaatcctgatgctgaatacgtttacgctgccagcgggcaattttcggtggtgcactgtcccactcgcgcaatgaccaggcggaggcttcacgcgcgatggcttccagttgtgccgccagatgttccgccagccaggccacttgcggcagctgttgctgctcaactgcatgacgaagcgcagccagattatcgcccgcctcgtcgagacaagcctgtagtgttgtcgcacgagtctgaaaaagatgcctgtcgaaacgagcacttagcgtggcgaactgtgacaccggggcacaacgctgacgcagcgtagcgagctgtccttccagtttttccagcagcagggcggttttcacgataagaccgcgggcgattttgcttattttgctcacgtttgccatcatgattgcgatgatagctgcaatcatcacgaagacctgctcctgagtcaggttatgatttatcaggttggcttttagtttcccttcatgcatcaccagtacacgatcgctaaggccgagcacttcaggtaattcggaagagatgacaataacggcaataccctgctggacgagttggttaattaatttgtagatctcgtatttcgcgccaatatcgatacccctggtgggttcatcaagaatgagaatgcgcgggttaagtaacagacagcgagcgaggatcgctttttgctgattgccgccgctcaaacgtccaatagcaaggtcgggggacgacgttttaactttgagttgctggattgattccagaatacatttttgctctgccgcgtcatcaagctggctaatgccaccggtaaatttattgagtgcggcgagggtaatatttttaccaaccgccattaccggaacgatgccgtcgcgctttctgtcaggcattgaatggtctcggtacgtccgggcaccaacgagtccggcaataccccatatttcgccacgtttcagggaaaacgagacatcattaactcgtttaatatgacgattaaccggatgccatgccgtcagatgttcaatacgtaatatttcatctccggtggtatgtggttcattagggtaaagcgcggttaactctcgcccgaccatcatggtgataatatcgtcttcactcattcgggcagcatcaggagtaccaatgtgctgtccgtcgcgaataacgcaaatcgtatcggaaatcgctttgacttcgttgagtttgtgcgaaatataaatacaggcgataccgtgctgttgtagatcgcgaataatatccagtaaaatcgacgtttcctgctcagttaatgaggctgtcggttcatcgagaattaacaagcgcacctgtttattaagtgccttggcaatttcaaccagttgttgttgcccaagccttaaatcgccaacgcgggtatcaggtgaaatggataaactgacctgtgcgagcagcttctgacagcgtagcgtcat

SEQ ID NO: 140900 - DNA, 2652 bp, Homo sapiens
aagccactctcgcagccacactccttcagctcctcccggtgcgcctcctcgggcttggccctgccgtccctgcgtttctctctcttcttcttctcttttaggatgttgatggcactagatccataaggctttagttccttttctattttcttggaaggttctctctcggaatcatttttatctttcttttcggtagaaaacaattccgatggttttatctagctcatcttctatgtcagctttcatgttgtaagaaactccgtaagcatccgcctccaggaagtccttttcgtactggccggagtccttcctgctaccgccctcccttgtaatcttcgcccttctctttcttctcggccttctctttcttggctcgctctcggtcgtggctcttcttggatgaagatgaggagtgtctgtgcctctccttctctttcagcttctcagggaggcaggcgctctccctcggcttgtcgtctccaggtggctccgtgaaagagacctccaggaaggcagtcagccccggctcctgccctcggtccgtgaagctgtcagaggagacctcgctgaatttatcgttggagtcttctctgtactcatggagaagcctcttcttccaacttttcaagcaggctttttttcgcgtcggcacttctcgaggacttcctctccttggaatgttctttgtccgacttctctttgtgtttgcttttagccttgtcttcggcagcgtgcttcttttcagccttctcggggagcttctgtttatttttcttatcttgcgtggagtccactgaggctctgtccttcctgtccttgtacttttctgtggactctttatccttcttctccttgtgcttttcaaagactttctctttttggtctctccccggcgtcggcaagcccctcggtcctttctcctgtctctgggctccttgtccttctgcctctcagggtgctgcttgtcagaagacttcctgtgtctgtcggaggcataggcctcccgtccttcctccttctcctggaggccgtccgtcctcggcaagtcgctggcctctcccatcttgaacccgctccccatgcaggctgtctctgtcgtcctcactctcatctgtgaagatgtctgcgatgtaccaggcttttctctttgcctttcttgtcatcttttttttcagagaagtcttctgagatgatcccagggaaagccttctccttcttctctttcccttggtcgagagacgctttcctttctttgtctttgccatgtgtgtctttatgtttttccttggtatcttttttctctttaaaacatttatcaaattctttgtccttctgacatttttccaggattgatttctcacttttgtccttgtcactggatttctctttgtatctttctggttttgtcttctccttcctttccttatcggggccatccttcttctccttctctcgtgctgggtggtgccgttcccacggctccaggcccttcccaaagtcgccgtcggacttgtccttgaagccactgtgggctgtgtccatgactgtctgttggtgctgagaggactcctgattcttcacaatcatgtgccgggctagcagcttatgtgatgcagcgtttgctctgagagtttcctgtagtttggaatcctggtactgctcgcgctgattgtcatctggtacaacaatttctttggtgcggaaactgaagcgattctgccgtatgaccagtatatgcaccgtttcgcggcgtacttccagcagggcaatatggagtccaacggtaagtatgttgaccgtaacggtaacgttgtggattaccagactggcccgattatctggggtgaaccaggcactaacggtcagcacgcgttctaccagctgatccaccagggaaccaaaatggtaccgtgcgatttcatcgctccggctatcacccataacccgctctctgatcatcaccagaaactgctgtctaacttcttcgcccagaccgaagcgctggcgtttggtaaatcccgcgaagtggttgagcaggaatatcgtgatcagggtaaagatccggcaacgcttgactacgtggtgccgttcaaagtattcgaaggcaaccgtccgaccaaataaatactgctgcgtgaaatcactccgttcagcaaactcaacgaagtcaaagcgatttccgatacgatttgcgttattcgcgacggacagcacattggtacgcgtgatggtattgaacatctgacggcatggcatccggttaatcgtcatattaaacgagttaatgatgtctcgttttccctgaaacgtggcgaaatattgggtattgccggactcgttggtgccggacgtaccgagaccattcagtgcctgtttggtgtgtggcccggacaatgggaaggaaaaatttatattgatggcaaacaggtagatattcgtaactgtcagcaagccatcgcccaggggattgcgatggtccccgaagacagaaagcgcgacggcatcgttccggtaatggcggttggtaaaaatattaccctcgccgcactcaataaatttaccggtggcattagccagcttgatgacgcggcagagcaaaaatgtattctctcccaccctcgctgctcttggcagggcagacacctcctccat

SEQ ID NO: 140901 - DNA, 566 bp, Homo sapiens
caccgtgctggaattcccgggtcgacgaatgcctgtccagcccgagtgtgagtggcgtctgtcggaacctggccggctcctacaccgtggaatgtggccctggcagccggctggacccctctggtaccttctgtctagacagcaccaagggcacctgctggctgaagatccaggagagccgctgtgaggtgaaccttcagggagccagcctgcggtctgagtgctgcgccaccctcggggcagcctgggggagcccctgcgaacgctgcgagatcgaccctgcctgtgcccggggctttgcccggatgacgggtgtcacctgcaatgatgtgaacgagtgtgagtccttcccgggagtctgtcccaacgggcgttgcgtcaacactgctgggtctttccgctgtgagtgtccagagggcctgatgctggacgcctcaggccggctgtgcgtggatgtgagattggaaccatgtttcctgcgatgggatgaggatgagtgtggggtcaccctgcctggcaagtaccggatggacgtctgctgctgctccatcggggccgtgtgggga

SEQ ID NO: 140902 - DNA, 2853 bp, Homo sapiens
atggggcttaaggttgacgataaagtgccgctttttgcagtggtgagccgtctgaccagccagaaaggtctcgacctggtgctggaagccttaccgggtcttctggagcagggcgggcagctggcgctactcggcgcgggcgatccggtgctgcaggaaggtttccttgcggcggcagcggaataccccggtcaggtgggcgttcagattggctatcacgaagcattttcgcatcgcattatgggcggcgcggacgtcattctggtgcccagccgttttgaaccgtgcggcttaacgcaactttatggattgaagtacggtacgctgccgttagtgcggcgcaccggtgggcttgctgatacggtttctgactgttctcttgagaaccttgcagatggcgtcgccagtgggtttgtctttgaagatagtaatgcctggtcgctgttacgggctattcgacgtgcttttgtactgtgtcaaggacagtttcatcatcggactaccgatgtcgagtacaaaggcgatccgaaagcggtgaagattgaagagagtgaaatcaattacctgctgaatgtgtataacacgcactttaaaaagcagttaagccgtgacgatatcgtctggacctactccggtgtgcgtccgctgtgtgatgatgagtccgactcgccgcaggctattacccgtgattacacccttgatattcatgatgaaaatggcaaagcaccgctgctgtcggtattcggcggtaagctgaccacctaccgaaaactggcggaacatgcgctggaaaaactaacgccgtattatcagggtattggcccggcatggacgaaagagagtgtgctaccgggtggcgccattgaaggcgaccgcgacgattatgccgctcgcctgcgccgccgctatccgttcctgactgaatcgctggcgcgtcattacgctcgcacttacggcagcaaccagcgagctgcgtgctcggcaatgcgggaacgtgaagcgcgcacactgccgcaaaaactggctggcacgctgggtatgttaagtaaagtaatgcggatcccacgccagcaggaagtcacggctctgcgcacttatctgcaaattcgtatcggtctgcatgcggcgtttaatgcctgtgaagagatgtgccaacgcgtggcgctggagcgtcaactggacagcgaagaacgcgcattactgattgaacgttcgcaaacggttattcgtcagggccgcgatcttcttcacgcctgggatgccacctggaactcggcgcaggcgctggataacgcactacagccggacagagcaggtcagtttgccgacgccctggagaaatacgctgccgatgagtcattttttgcccaactcgataaatatgatattccggtggtggtgattggcaaagttgaaggtcaatatgcccatgtttattctgtcgataccgataattttggcgacagcattgcgttgaccgatgcattaattgaaagtgggcatcaaaatattgcctgcctgcatgctccgcttgatgtccatgtttcggttgatcgcgttaatggttataagcagagcctggctgcgcataatattgcagtgcgtgatgaatggattgttgatggcggttatacccatgaaactgcattaaaagcagcacggcaattattaagccagtcaccgttgcctgaggcggtgtttgccactgacagcctgaaattaatgagcatttatcgtgcggcagcagagaaaaatattggctattccgcagcagttagcggtgcgcatcttattcgggctacatttatagatcgtattaagtactcgggccggattcggcaatttagcccattattaggacgaccccttgaatcatcgctactgtgctctaaagagcacgcaatactgacggcttgccatgccagcaccaacaggggcagcagaatcagcaaaaatgccagcattaccagttgtcgtaatgagcggggaaaaacgggccagcgtttcaaggtgttactctcgtcagacgcgaatagcctgatgctaaccgaggggaagttcagatacaacaaagccgggaattacccggctttgttatggaataaggcggtgcctaactcgacgtttcgcccgatggttgatatagctacgctgatatcagaagttggacggcaggcaccttgttgtgcgtcattcgtattttatgtagcacgtcccgaaggggctgacataataaaggaagatcttacctgggaagcgttccgcgacacgctgctggaacaggccgagcaaggtgtggattacttcactatccatgcgggcgtactgctgcgctatgtgccgatgaccgcgaaacgcctgaccggaatcgtctctcgcggcggttcgattatggcgaaatggtgcctctcccatcatcaggaaaatttcctctatcaacacttccgcgaaatttgtgaaatctgtgccgcttatgacgtttcgctgtcgctgggcgacggtctgcgccccggttctattcaggacgccaacgatgaagcgcagtttgccgagctgcatacgctgggcgaactgaccaaaattgcctgggaatatgacgtgcaggtgatgattgaaggcccaggccacgtgccgatgcagatgatccgccgcaatatgaccgaggagttagagcactgccacgaagcgccggtttacactctggggccgctaactaccgatattgcgccgggctatgaccacttcacgtcggggattggtgcggcgatgattggctggtttggctgcgcgatgctctgttacgtaacgccaaaagagcatatgggtcctgcccccccccaaaaatatttttaa

SEQ ID NO: 140903 - DNA, 3264 bp, Homo sapiens
gaaaaaaaatttcatttcgtaaagggattatggaattgtggggggcccaggccattatttatcaactgcccgtgttgtcttcgaccggcaaactccataagatgtgcagcattcacgttcggacggagttcctgacctatgtcccctactatttatgatattgccagggttgcaggcgtatcaaaatccaccgtatcacgcgtgctgaataagcaaactaatatctccccggaagcgcgcgaaaaagtgttacgggccattgaagaattacagtatcagccaaacaagctggcccgcgcgctgacctcttcgggttttgatgccattatggtgatttctacccgttcgaccaaaactacggcgggtaatccgtttttgttggaagttgcgcaggccttccccgccaaagctgaataaaaaggcttccaggtgctagtacgaacgtcgcacaatccggcagaagatctgcaaaaatgcgaaagcaaaattaagcagaaaatgattaaaggcattattatgctcagttcgccagcggatgagtcattttttgcccaactcgataaatatgatattccggtggtggtgattggcaaagttgaaggtcaatatgcccatgtttattctgtcgataccgataattttggcgacagcattgcgttgaccgatgcattaattgaaagtgggcatcaaaatattgcctgcctgcatgctccgcttgatgtccatgtttcggttgatcgcgttaatggttataagcagagcctgggtgcgcataatattgcagtgcgtgatgaatggattgttgatggcggttatacccatgaaactgcattaaaagcagcacggcaattattaagccagtcagtgtcgttgtctgttgctgtgtcgtggtctgcttgtctgtgtgtgctttgggagctcgagctggatcggtaccgcgtgcactatgcactttgctgtgccactgtgggccgtgcctggggccttccatgtgaactttgccctgcacagccacacccctgccgccgcggcttcatccccaatatccacacgggggcctgccaagatgtggatgagtgccaggctgtgccaggcctgtgccagggaggcagctgcgtcaacatggtgggctccttccattgccgctgtccagttggacaccggctcagtgacagcagcgccgcatgtgaagatgtcgacgaatgcctgtccagcccgtgtgtgagtggcgtctgtcggaacctggccggctcctacacctgcaaatgtggccctggcagccggctggacccctctggtaccttctgtctagacagcaccaagggcacctgctggctgaagatccaggagagccgctgtgaggtgaaccttcagggagccagcctgcggtctgagtgctgcgccaccctcggggcagcctgggggagcccctgcgaacgctgcgagatcggtagtatcctccttgaggcctcccaggcacccatgggaaaagccctccatggggcgggtccccccttgggctggcatgagaaaatgactcctctcttcactcttgttctcccagttgcagaccctgcctgtgcccggggctttgcccggatgacgggtgtcacctgcgatgctgggagccagagtcccatccgcacaggtgcacaggtagggctgggagcagaagccttcaccgcaggcgcgcctacagaatggtggatgaatgcaacgggtgcagtcaagaccggaacgagtctggccgtcctgctcattggtgtcgggctgtgccggaaactagtggccgcgtgggctctgttccgggctgtgcttgcaccccccgtgtttgtatttcccaattgctggtcgcatgtttcccctgtgtttggccctaacaggggaaaacgatctcaagactgggtccgggtggtgttggtcggccattccgacggcgcctcgatctccctgatccatgccggcggcacccccgcgccggatgtgaagggcgtggtctgtctggcgccgcatgtgatgaacgaggaaatctgcgtcgcctcgatccaaaaggccaaggcggcctccacttgtatcctgcggcttgccgtgcgtcgtgactcgtgtatccgcggcttgggcgcgtgcgtccaggcgtgggtcaatcgaggcttgccagcgtcgacagagcgtgcgtgtatcaagtcactgcgactatcatcacagacgcaggaacatctcacagagggggtcaatcaatccgtcacagagtgcaaacaggaagacggagtgaatgaaaggcgccagaggagagacaccgaaagaccaaatagagggacgccaagagaaacagcgctggtaagacggtccaatcggccgtggtatatagatatcattacacaggattacggggctgggatgcaggcacgggcaaaggcatgtgtccacgcccccagcctggccacgccccagcaggcagtgggtgtccccatctacccacgagtccaccccagccccgcaggtgcataccacagccgagctcgtcgctggagtcgggacagtctgggtggccgtcgcagcgccacagatggggatgtccctatactgcccaggctgatcttgacgctcctggtgctcaagtgtgtcttaacgttgccttgcgtccctcccgccaaaacagggtttgccctttgcggcacacgtttcacccaggtgcttgtttcaggttatccgaacgtcattattacccattcatttgacccactttttgcatttgtccacctcacaaccctctacgcgtacatagcattgctaattacccattccgcccaattttttaacaggggcttttgcaacaaagcttttggtgtcctttggtggacaaccattgacatctgccgacacttcaccaacctgtgtctgaatggccgctgcctgcccacgccttccagctaccgctgcgagtgtaacgtgggctacacccaggacgtgcgcggcgagtgcattgatgtagacgaatgcaccagcagcccctgccaccacggtgactgcgtcaacatccccggcacctaccactgccggtgctacccgggcttccaggccacgcccaccaggcaggcatgcgtggatgtggacgagtgcattgtcagtggtggcctttgtcacctgggccgctgtgtcaacacagagggcagcttccagtgtgtctgcaatgcaggcttcgagctcagccctgacggcaagaactgtgtggcctggctgatagagcgagactccatctcctaa

SEQ ID NO: 140904 - DNA, 453 bp, Homo sapiens
acgcgcggatcctgtgacacctccgggcagcccggcacttgttgctcccacgacctgttgtcattcccttaacccggctttccccgtggccccccgcctcctcccggcttcgctccttttcatgtgagcatctgggacactgatctctcagaccccgctgctcgggctggagaatagatggttttgtgaaaaattaaacaccgccctgaagaggagccccgctgggcagcggcaggagcgcagagtgctggcccaggtgctgcagaggtggcgcctccccggcccgggacggtagccccgggcgccaacggcatgacagactcggcgacagctaacggggacgacagggaccccgagatcgagctctttgtgaaggctggaatcgatggagaaagcatcggcaactgtcctttctctcagcgcctcttcatgatcctctggctgaaaggagcg

SEQ ID NO: 140905 - DNA, 1476 bp, Homo sapiens
tcatgcagcgaaggcaccagtctccctctgtaaccttggtccttccctaaagtatgtagtcattggtgcagaatgtacagctgtgaaggtgactgtttctctaaaggctttggtgatgtaagccccgccctgcagccgccggctattttgggcgcgttggcggcggcgggatcgctgacagtcgcggatcctgtgacacctccgggcagcccggcacttgttgctcccacgacctgttgtcattcccttaacccggctttccccgtggccccccgcctcctcccggcttcgctccttttcatgtgagcatctgggacactgatctctcagaccccgctgctcgggcagggctcggggtgcgctggactccggaccctcccaggagggcggcgcggagccctgtgctcccccgtggcctttccgcaggccagcgccccgctgcgaggctcctgggcggaatggaggaaggcaggttccggcaggtggccgtcttctcggagagttgatccgcagtttgtccacccccgtccccgcctccgctgtcaccgcttgctccttggacagaaactgcctaatgtcagagctgctgtactttatttgcaacctgtaggaggaaggatggaggcgaggctgcggcggcgtttcccggtccgccggtgtaaggagaaagaaacatttgatcagcccttggtgccgacgctgcagaagtagggaaacctgaggcttctctgatgagataagttcccaatctaacactttgggatatacgctatgtgggtttaaggaagagtagtgagataaaatgtgagctgctgctgtttttgccattgctattacggctgcattcactgtgaccatgttggaataaggagagcccccatatcctatatcaacctctatggacttcagggtgatggtttcttttccacttttgtttaacgttattttgtggaattgaaggttctgggcagggcttccccacaggctctgggagaggggagctgtgtagggaaagttatgtggcctttcctcattcaggtactttgtgaatataacagggatctgatcaactttttcacacagtagctcaatgcagtgtttagtgagtggtctcccccacttggactccctccaccctgtagttctgccaccctgcgggacggccaactcctttgctgggctctctacagtcagccagcacagggaagattgaagttggaggacatcatggtaggtttgcatggtcgaatcacttccacccactttccatagtccagagctcaatcctgtggctgttcctctgtgcaagggaagctgggaagtgtcatctaactgtgcaggtgagttagccaagccattcaagcaggaaagccattctgtgaagccccagacaaccgctcccaaggacagattactttggttaactttcacattagccactttcattgtgtgtgtgtgcatgcctaatttcctcat

SEQ ID NO: 140906 - DNA, 462 bp, Homo sapiens
gcgcaatcggtcaatagtcagacgttcagcgaattgcgcgccacccagaccttctacaaaacgacctcgcataattcgcccggagtcttccatacttcgacaaagcgtttgcatcgatggaaacccgccagggatattttcggctatcaccgcctgacgactgatgatgccgtagcggtcgagcatattttccgccagcgccagcatcctttcggtatcgtttagtggctccacctgcaataacgaccagcgtccagccagatttggtgtgttgtaagatacccgcggcgagacgggttgcgcatagacaggacgtccacgacgagcccggtgactgcggcgagttgaggtgcgcgcagtttaactgctgcgggtgagggcgcgtaacggcgcccaaatggcgctggtgaagacgccctgccagaccagcgcccataacgccccttgcaggggcagagagac

SEQ ID NO: 140907 - DNA, 1319 bp, Homo sapiens
tcagtgtggtcttatcatttgaggaactgtgatgaggaccgtgtagctggagagcagagtgtgggtaggaggaagaatagtgaaaggagttgaggtgtatgcaggggccagatcctgcgaggcatttcggatatgttttggtgtttggatttgaccttgtgggcagggatgccattgaagggctgtgtgcatggagtgggattgggtccattcattgttaaagacacttggtggcgagaccaccgtttcctcaagcggaatattcttgccgtaacgttctttgagctttgcctgaacttgtgggctgctcaggtcgaactctttcaacttctgctgctcgcccacgcgcattcccagcgcgttctggtaaaccttccacaccacttccgaacagtactggcgatcgtcgctcggtgagaagctgaaatcatacggtttaccgagataacgttttgccgtttgcgccagtttttgctgttgttcaacactcagtccgccttcaacgcggcgaacaacgtatttgcccttttcaccatgggcgatccactgcttgagcggggtgtatttcaccgggccgactgcttcaaaaacgtagggctttttgttgcgtatcaccagcataccggtgtggctataatcggtatgggtcgccagttggatcgctttactttgcgatgagcgagagatctgaaagatgatgtcgccggtttgtggctgccaggcaaaggcaggtacagaaaccagcaggctgaggatcagcagcctgtttttcatagttaaacgtccatgtataaaaagcggtgggtcgcagacaacgtgcgctttgtttatgccggatgcggcgtgtacgcccttatccggcctacggtcaggttcccgtaggcatgataagacgcgtaagcgtcgcatcaggcaatgaatacccaatgcgaccagcttcagcaggcacttggtttgctggtaatgctccagcatcatcttgtgggtttcgcgaccgatacctgattgtttgtagccaccaaacgccgcatgtgccgggtaagcgtgataacagttggtccacacgcgcccagcctgtatgccgcgccccatcttataggccagattaccgttgcggctccagacgcccgcgcccaggccatattgcgtatcgttcgccagctccagcgcttcttccatcgttttaaaggtggtcaccgccagcaccgggccaaaaatctcctcctggaacacccgcatattgttctgaccaaacagaatcgtcggttcgaggtagtagcagtctttcagttcaccttccagcacgttgcgccgcccgc

SEQ ID NO: 140908 - DNA, 2430 bp, Homo sapiens
atggaagcgctggcaggcattaaaaagataaaaatgatgtgtctgcgaaaagctaagaggacccggagggacaagttcaccagtgcactggagctactactggcaaaagatgttcccctgccctttttgctgaccggattaacgctggtacttggcgtcactgctgagctggggccatgcacgcaaaatgttcctgcatcgctgctcgccgccatttaccctcagtggcgggatacatgccggtctgggaaccgtgctcatctatgcgtgggcactctctggcggatgtttaactggttttggttctggatctggcgcgaacaaccgctgcgcgagtcactaagtctgctgtaccgtgaactggcagattattgtgaagccaaatacagcctgcttacccagcacaccgaccctgaaaaagcgctgccgccgctgctggtgcgccagcaaaaagcggtcgatctaattacccagtgctatcagcaaatgcatatgctttccgcgcaaaataatactgactacaagcggatgctgcgtattttccaggaggcgctggatttacaggaacatatttcggccactctgctgcaggtctactggagttgctggaggtccactccagacctgtttgcctgggtatcagcagcggtggcatcagaacagcggattgttgtgaaccgttgtggaggtcagtgtgactgctgtgtggcattcatcttggcaaacaccattgggaacggtcacatggggccatcaacagcactatctcgtccccaacacatcaagcacatcatccaaggtggcaaaaaaatgctggtctggcaggaaaaagaggaattactcgccccagaggttttccacgcgctgactaccgcactgcgtcgcgaaccacggctgcgctttacgctaacagaagtgaatgatctaccggtccggcaaacgccgatgtttacgctgctgctattgcaggacggattattccgcgtccggctcttcagacttgtatttagcggcagtttctttgatcagctgctgcagttcgccacgctgatacatttcgatcacgatatcacaaccgccgaccagctcgccgtcaacccacagttgcgggaaggtcggccagttagcatatttcggcagttccgcacgaatgtccggattctgcagaatatcaacataggcaaaacgttcgccacatgcggcaagcgcctggactgcctgggcagagaaaccgcagctcggcagtttcggatcgggttttccagcatctgggcgttggattttttcgaaaggtggggcccattggcaaaagagaaatatggcctcgatgttgaactggtaggatttagcggttcgttgctaccgaacgatgcgacaaatcatggcgaacttgatgcgaatgtcttccagcatcgaccctttcttgaacaagataatcaggcgcatggttataaactggtagcgaagagagtggcgaggcggaagtttatcaggctatccaccatcaactggttgccagtgcgcgggcagttaaagcctgtcatagcctgctccccgaagcgaaaatcggcaatatgcttctcggtgggctggtttacccccatcacctgccagccacaggatatgttgcaggccatggaagagaaccggcgctggatgttctttggtgatgttcaggcgcgtggccagtatcccggctatatgcagcgtttcttccgcgaccacaatatcaccattgagatgactgaaagtgacgcagaagatctctacaacgaccgccagattatccgtgctggcttagaagatcactttatgggcaagctgagcggcatctctatgggctgtgactgctgttataccaaccacgctgacgctgaccagaacctcaacgaaaacctgatgatcctgctcgccaccgcaggctgcaactacatcatggggatgccgctgggtgatgacatcatgctcaactaccagaccaccgcattccacgataccgccactattgaagaaattgtacgcagcgtgatggcgtcaatgggacaagcggcccccgcgccgtcagaagcaaagtgcgccaccaccaactgtgcggcaccggtgacctcggaaagctgtgcgctggatttaggttccgctgaagcaaaagcgtggattggtgttgaaaatccgcatcgcgcagacgtattaacagaactgcgccgcagcaccgtggcccgcgtttgtaccggtcgtgccggtccgcgtccacgtacgcaggcgctgctgcgtttcctggccgatcactctcgttcgaaagataccgtactgaaagaagtgccggaagagtgggtgaaagcgcagggcttgctggaagtacgctctgaaattagcgacaaaaatctctacctgagtcgccggataatggccgcgctgtgttcaaaactgtga

SEQ ID NO: 140909 - DNA, 1979 bp, Homo sapiens
atggcctgttgtgcatcaggattcttaaccttcttcacgccgtgcagacggcgagaaaaacgcagtctgtcacgcagcatcagcgaatccagccgctgctgcaaggccgtaaagagccggttgacggaacactggtacgtacaaggggctctgcgaagcgttagaagccttacgggcacttgcgcggagactccgatcggcgtaagaggccagcgccgatatcccgaagcggccaaaagagatcatgcgcctacgtcatattgcaatttattgaatttgcacgaacttgtaggccggataaggcgttcacgccgcatccggcataaacaacgagcacgttgtctgcgacccaccgctttttatacatggacgtttaactatgaaaaacaggctgctgatcctcagcctgctggtttctgtacctgcctttgcctggcagccacaaaccggcgacatcatctttcagatctctcgctcatcgcaaagtaaagcgatccaactggcgacccataccgattatagccacaccggtatgctggtgatacgcaacaaaaagccctacgtttttgaagcagtcggcccggtgaaatacaccccgctcaagcagtggatcgcccatggtgaaaagggcaaatacgttgttcgccgcgttgaaggcggactgagtgttgaacaacagcaaaaactggcgcaaacggcaaaacgttatctcggtaaaccgtatgatttcagcttctcatggagcgacgatcgccagtactgttcggaagtggtgtggaaggtttaccagaacgcgctgggaatgcgcgtgggcgagcagcagaagttgaaagagttcgacctgagcagcccacaagtggagccactaaacgataccgaaaggatgctggcgctggcggaaaatatgctcgaccgctacggcatcatcagtcgtcaggcggtgatagccgaaaatatccctggcgggtttccatcgatgcaaacgctttgtcgaagtatggaagactccgggcgaattatgcgaggtcgttttgtagaaggtctgggtggcgcgcaattcgctgaacgtctgactattgaccgattgcgcgatctggcgacacaagccacgcaaacgcgccactatacaccagtggcgctctctgccaacgatccggctaatgtgtggggaaatcttctgccctggcctgcacatccggcaacgctggttccaacgcgtcgggcgggtgcgctggtggtcgtttctggcggcaaattgttactctatctggcgcaaggtggcaaaaaaatgctggtctggcaggaaaaagaggaattactcgccccagaggttttccacgcgctgactaccgcactgcgtcgcgaaccacggctgcgctttacgctaacagaagtgggtacatgataaagaacagaccacgcagacactgaaaatggtggcggaaaatggtcgttgggtcattgacgatattgtcagcaatcatggcagcgtcttacaagcagttaatagcgagaatgaaaaaacgctggccgctttagcttcgttgcaaaaagaacagccggaagcctttgttgccgaactctttgaacatattgctgattatagctggccgtggacgtgggtggtttccgactcttaccgccaggcggttaatgccttctataaaaccaccttcaagacggccaataatcccgatgaagatatgcaaatagaacggcaatttatttacgacaatccgatctgttttggcgaagagtcgctattttcacgcgttgatgaaattcgagtcctggagaaaaccgccgattccgcccgcattcatgttcgttttacgctgaccaatggcaacaacgaagagcaagaactggttttacagcggcgcgaaggcaagtgggaaatcgctgattttatccgcccgaacagcggcagcctacttaagcagattgaggcaaaaactgccgccagattaaagcaatga

SEQ ID NO: 140910 - DNA, 1195 bp, Homo sapiens
ttatcggaggttgatgtggacgtaagacagagcatccacagtgcgcacgcaaaaacgctggatacccaagggctgcgcaatgaatttttggttgaaaaggtatttgtcgccgatgagtacaccatggtttacagccacattgaccgaattattgttggcggcattatgccgataactaaaacggtttccgttggcggggaagttggtaaacaactcggcgtaagctatttcctcaccagtaaccgtcgcacgattaacaaatatttggtcccggatgtactggaaacctgccaatcgagtatggggctgacggagctggctccgggtaactagtggaacaccatgccgtgtcacacccacgagcgccggatggaagtttatttctatttcaatatggatgatgacgcctgcgttttccacatgatggggcagccgcaagaaacgcgtcatatcgtgatgcataacgagcaggcggtgatctccccgagctggtcgatccattccggtgtcggaaccaaagcttatacctttatctggggcatggtcggtgaaaaccaggtctttgatgatatggaccatgtggccgttaaagatttgcgagctaatcatcatcagcgctttatcatcagtcagcgcagtgacattcacctcacgacgcaatggatcaagcgagcagcgcagaccattcatccgccagtttccataatccagcaaatcgttgcgttcttcgagtgagagtggcgtcggcgttgggttaaccaccgcgacctctttcagcgcaggcgcgggcggtacgctgagcggcggttcgtcccctttcttgatccacgcggtttcactgccaacgcgcttttgctgagcatcaataaacaacaacgctgcttttaagccactcagagaaatggtctgatcgccatcgcgtaaggtgattgccttcccttcctgaatcatctgcaaaaacgcggtgatggttgccgtatcatcggttactaataaccatggtgaaatccgccacttgtcaccacttaacgccaacggctcgccatctaacagcagccgtggcgctatctccccttctgacgcctccggcgacttcaatccgccgcgctcaatacctccaacggcatctggtactcgccccggcgcaacaactcagggtcatctccagtccattatatctactacagtcggccag

SEQ ID NO: 140911 - DNA, 515 bp, Homo sapiens
ctcctacaaggttgaggtgaagattaaacccagcacgctgcaggtcgagaatatttccattggtggtgtgcttgtcccactggaactgaagtctaaagagcctgatggggacagagttgtttatacgggtacatatgacacagaaggtgtgaccccaacgaagagtggagaacggcaacccatccagatcaccatgccggagtgcctggaacaacgaccccaagagatctctcttacatatgaatgtgaagaataagcacattcttcaatgtgtgccatcatgaggaacaaatgttctttttttttttttccaaattatttgctttgcattctaggggagggcttctcacaggccatcagaattatcggggatgcttgttaaaatgtagattcctaaactctacctttttagacctcttaaattgagcaaactctctgagagtaaatccaaagcatctgcattttattaagcactttaggtgattcttatcatattaaagtttggaaaacactaa

SEQ ID NO: 140912 - DNA, 600 bp, Homo sapiens
atgccgtatgctgttctttttctcctgagttttctgttcaggctggtgatggtgcctgggattagcaacatccccacagcaagaggatgttttttggtttatccatggcagggacgatttcttgccagcgaccgctggataatgcacccagtagacctctggcgggaaatctattgcaggaatatttccattggtggtgtgcttgtcccactggaactgaagtctaaagagcctgatggggacagagttgtttatacgggtacatatgacacagaaggtgtgaccccaacgaagagtggagaacggcaacccatccagatcaccatgccggagtataaaatagaggaacaaaccataactcttaaaaggcttcagaattctactagtctaacccttcattttagagataagcaaactgaggcagagaaaggtgtggtgaccatccaggatgtgagcaggactcccacgctccagccaatggatttctacgtgatcttgattaatttcatgtctgcagtagaagtaggtggcatggtgaatagaaagaagtacactcgagattctatgccagtgggttgtaagaccaccaaaattgtttaa

SEQ ID NO: 140913 - DNA, 763 bp, Homo sapiens
ggaggcacgagggcggcagcctcagctccaccacctccctcaccctccccgcgcttcctctccgcccctcgcgctccagccactcggccgcagccggcgctgtcctccgccccccggagccgccgcgccagaccctcgcccagacatgggggacctgccgggcctcgtgcgcctctccatcgcgctgcgcatccagcctaatgacggcccggtcttttacaaggtggatgggcagcgcttcggccagaaccgcaccatcaagctgctcaccggctcctcctacaaggttgaggtgaagattaagcccagcacgctgcaggtcgagaatatttccattggtggagtgcttggcccactggaactgaagtctaaagagcctgatggggacagagcagtttatacgggtacatatgacacagaaggtgttgaccccaacgaagagtggagaacgggcaacccatccagatcaccatgccgttcacagacattgggaccttcgagacagtgtggcaagtcaagttctacaattaccacaagcgggatcactgccagtggggaagccccttctctgtcattgagtatgaatgcaagcccaacgagacacgcagtctgatgtgggtgaacaaggagtccttcctctgaaagtggctctttctgatgctactggacaatcttttcagaaatctacttttagataaaccagcgcaggccttaaacaaggcatgccacaccattgctgttccccatctggtactaatgaccg

SEQ ID NO: 140914 - DNA, 429 bp, Homo sapiens; identical to SEQ ID NO: 118058

SEQ ID NO: 140915 - DNA, 426 bp, Homo sapiens
atggggcgatgcccaccccagagtgagaaaccaaagaaaagcagccccccccactcaccacagcagccccacgggctggcatcttccctccctgagctccaggtccccatgactgttgacacatcccaggaaggggagctaaagggacctgtgggtgtaccttttgtgccaattcgatgtaccactcttgttgcttctagacttaaatctatggtagaaattgaggtggcaaggccaaggaagaagaagaagaagaagaagaagaagaagaagaagaagaagaagaagaagaagaagaagaagaagaagaagaagaagaagaaggaggaggaggaggaggaagaagaggaggagaaggaggaagaggaggaggaggaagaaaaggaggaggaggaggtggaaataatcaatgtagtatatgcttga

SEQ ID NO: 140916 - DNA, 252 bp, Homo sapiens; identical to SEQ ID NO: 118012

SEQ ID NO: 140917 - DNA, 174 bp, Homo sapiens; identical to SEQ ID NO: 118056

SEQ ID NO: 140918 - DNA, 280 bp, Homo sapiens
atgaagggaagaagaaggaaaaagaaggaaggagaaggaggaggaggagaatcggaaagaggaggaggaggaggagaaggagaaggagaaggagaagaagaagaagaagaagaagaagaagaagaagaagaagaagaagaagaagaagaagaagaagaaaaagaagaagaagaagaagaagaagaagaacaagaagaagaagaagacgacgaagaagaagaggaagaaaaatcctgtagtgtcaatgtctcactgatagaattaccctgggaccccaagg

SEQ ID NO: 140919 - DNA, 379 bp, Homo sapiens; identical to SEQ ID NO: 125354

SEQ ID NO: 140920 - DNA, 363 bp, Homo sapiens
atgggccgggcgtggtggctcatgcctataatcccagcactgtgggaggctgaggtgggcggattacctgaggaagaagaagaaggagaaggagaaggagaaggagaaggagaaggagaaggagaaggagaaggagaaggagaaggagaaggagaagaagaagaagaagaagaagaagaagaagaagaagaagaagaagaagaagaagaagaagaagaagaagaagaaaaagaagaagaagaagaagaagaagaaacagttattatcaaaggatgcattagtctgaagcactccactgccattcaggcactgagacataggagttgcgctatacaatggatacttggacagtgcagggattag

SEQ ID NO: 140921 - DNA, 847 bp, Homo sapiens; identical to SEQ ID NO: 125357

SEQ ID NO: 140922 - DNA, 396 bp, Homo sapiens
atgttgatgaaagacccacagtggaacagcagcatcttcatctccacccacttagctctacaacagaagcgcagacaagcagagtatggtgcccaggagcctagcagaaggatagttgggggaaaaggatcaggagctcaggtagatgaagaagaagaggaggaggaggaggaggaggagaaggaggaggaaaaagaagaagaaggagaagaagaggaagaagaagaagaagaagaagaagaagaagaagaagaagaagaagaagaagaagaagaagaagaagaagatgttgttgttgagtcttccgatgatcaggccaagactaccacatcctcgttgggcttcatctccatcctctatggttgccaaaccatagtgtgcattagagtcgcttag

SEQ ID NO: 140923 - DNA, 2034 bp, Homo sapiens
atggcgccatattgtagcaggacgagccgcagacaaaactcctcagacaccgagttaaagaaggaatgggtttattcggccgggggcatcggcaagactcctgtgtcaggagccgagctcccccaccagccaacagtagtagctgaaaagcgagagcacactgatgaagaacactgcgggcacaaagaaaaggaaaaaacgtggcgttctcaggaattgacgtcctccaggcccccagatgagggtagtgagcaccctgagagccagctggactcccctcttggtgtgttactgcacagccacagcctctggagtggaatgatagctgatgacatcattttaaaagtcacagtactacagagatgtttggacactcatcagaggcagacctgctgtgggaaagtcaaggccttggctgatgcaaaaataattgcagtttttgccattacaataattcttaccaagaactattcacattggaccaaagccaattgtaatgatccatgtgatggagagagccagaatgctatgaaagtggccttgaccagaaataggtcatttgatccttggctcattgacatctccatagattttcggtgtacaatgttcggtctgatgtgcaaggtacaacttttccagagaagaagaggaggggggcggggaggagcaggaggaggaggaaagaaggaggagaaggagaaggagaaggagaaggagaggaagaggaagaggaagaggaagaggaagaagaagaagaagaagaagaagaagaagaagaagaagaagaagaagaagaagaagaagaagaagaagaagaagaagaagaagaagaagaaaaggaagaagaagaaactgtctctacaccttcattctcaggacaagttcattgtctggcaccaagctccttgggacgcggaggttggggtcatggcgccccgaagcctcctcctgctgctctcaggggccctggccctgaccgatacttgggcgggctcccactccttgaggtatttcagcaccgctgtgtcgcggcccggccgcggggagccccgctacatcgccgtggagtacgtagacgacacgcaattcctgcggttcgacagcgacgccgcgattccgaggatggagccgcgggagccgtgggtggagcaagaggggccgcagtattgggagtggaccacagggtacgccaaggccaacgcacagactgaccgagtggccctgaggaacctgctccgccgctacaaccagagcgaggctgggtctcacaccctccagggaatgaatggctgcgacatggggcccgacggacgcctcctccgcgggtatcaccagcacgcgtacgacggcaaggattacatctccctgaacgaggacctgcgctcctggaccgcggcggacaccgtggctcagatcacccagcgcttctatgaggcagaggaatatgcagaggagttcaggacctacctggagggcgagtgcctggagttgctccgcagatacttggagaatgggaaggagacgctacagcgcgcagatcctccaaaggcacacgttgcccaccaccccatctctgaccatgaggccaccctgaggtgctgggccctgggcttctaccctgcggagatcacgctgacctggcagcgggatggggaggaacagacccaggacacagagcttgtggagaccaggcctgcaggggatggaaccttccagaagtgggccgctgtggtggtgcctcctggagaggaacagagatacacatgccatgtgcagcacgaggggctgccccagcccctcatcctgagatgggagcagtctccccagcccaccatccccatcgtgggcatcgttgctggccttgttgtccttggagctgtggtcactggagctgtggtcgctgctgtgatgtggaggaagaagagctcaggtgattggattgtggctgcccacagcgagagaggattttccccgctcagtcactcacatgccaatcccttccagaaacaccctcgcaggcacacccagaaataa

SEQ ID NO: 140924 - DNA, 960 bp, Homo sapiens
atgcagaaagaactgaagggcaccaaaacctcagtcctacccctagaccatggtactcccacaggccctcctgagctctccgaatggaaaccagggactccccaagatcctggagttgaggaggaagcagtaaaggtgacagaaaaggagtgcgatcaaggaggaaggagcgtaggctgtttggaaagccaagtgaagaaagtgtttataggagagaatgatgcttatcactcaaagcaagctaatcccaaacgctctaccgataggtgggagagtggaatgagcaaatatgagagatggaattgtaaatttgcttcaccacccacaccaagccaacagcacacacaactgctgcaatgcatggatcttcctgaaatccagaccagaccaagatatgccaagaaacaatacaggggcaaaaaggattcctatttctctaagagtttatgtctaagaggctatgcccaaacggaatcatattttagacacactaagaagtcattctggtttgttgaaagcagtagctctatgctacagtggcatcaggaacatctggaaaacttttccaaaaggaagaagaaggagaaggaggaggaggaggaggaggaggaggaggaggaggagaaggagaaggagaaggagaagaagaagaagaagaagaagaagaagaagaagaagaagaagaagaagaagaagaagaagaagaagaagaagaaaacatcacaggatgctgttttgcggatactggagaaacaatgcttttgggaaaacatcaaggatgaaaaacaaggccacggaggtgattcagacaacagtaatgcagtgatccagggcccagggcaagctggctgtaaggaacgggtgcggggcctcacaggtgctgccggcctggacagggaagacaagggcctgggatcagcaggacttggaaaggaaatgacggaagcccatagcttatga

SEQ ID NO: 140925 - DNA, 495 bp, Homo sapiens
  misc_feature (1)...(495): n = a,t,c or g
ggggccccttgacggctgtggattgagcacagtggatctgcagcattgggttttgccatcacggttacaggcttcccaagtaaagttgaaaagtaaaggacgagcaagttcctcaggaaatcaagaaagcagcggtcagagctgtattattctcctctttgatgtaataaagtcagctattagatatgagaaaaccatttcagaagcctggattaaggcaattgaaaacactgcctcagtatctgaacacaagggcattttagattatctggataacatatcccctcagcaaatacgaaaactcttctatgttctcagcacactggcatttagcaaacagaatgaagccagcagccacatccaggatgacatgcacttggtgataagaaagcagctctctagcaccgtattcaagtacaagctcattgggattattggtgctgtgaccatggctggcatcatggcggcagacagaagtgaatcacctagtttgan

SEQ ID NO: 140926 - DNA, 3117 bp, Homo sapiens
atggccattgaagtaggggtcgcctgtcctctgtggcttgatcaaaggcacacaggactgtcaatggcaggataccagctctggtcaccatggaccccactggatgagagtttccaatggctgcggcacacgacacctacaccttcctccaagcacccattcaaggcctccccctgcttcccacacacaccgtccgaccttgaagtgcagctgtgctttcaagaggtcactctagtcctagacagcccattcctggaatctggagtgagtcccaagttaccctgccacacatcagagttgcgcacgatgaacaacaaaggactggtcaggaagccccagcccatccgcctcagtggagtagattctgtctttggcagggttatcacagctcagccaccaaagtggaccgggactttcagagtttcagacaagtcagccttttgcaaaatcattagcagggagcaccagtggcccattggactgaaggagcctcagattcagatgacagtcactatgtgcaaacagatgctgcgctctatcctcttgctgtatgcaacttacaaaaagtgcacctttgccttgcagcactccaagcatacttttgttgttttcttccgtgtgatgatggctgaactagagaagacggtgaaaaaaattgagcctggcacagcagcagactcgcagcagattcatgaagagaaactcctctactggaacatggctgttcgagacttcagtatcctcatcaacttgataaaggtatttgatagtcatcctgttctgcatgtatgtttgaagggtgaagagattaagtcccaaaattcccaggagagcacagcagatgagagtgaggatgacatgtcatcccaggcctccaagagcaaagccactgaggatggtgaagaagacgaaataatagaagaatttgttagtggcctggagtcttacattgaggatgaagacagtttcaggaactgccttttgtcttgtgagcgtctgcaggatgaggaagccagcaagaacagtgatgaaatcaacatacctcgactcattgtcagtcaactaaaatggcttgacagagttgtggatggcaaggacctcaccaccaagatcatgcagctgatcagtattgctccagagaacctgcagcatgacatcatcaccagcctacctgagatcctaggggattcccagcacgctgatgtggggaaagaactcagttcctcaggaaatcaagaaagcagcggtcagagctgtattattctcctctttgatgtaataaagtcagctattagatatgagaaaaccatttcagaagcctggattaaggcaattgaaaacactgcctcagtatctgaacacaaggtgtttgacctggtgatgcttttcatcatctatagcaccaatactcagacaaagaagtacattgacagggtgctaagaaataagattcgatcaggctgcattcaagaacagctgctccagagtacattctctgttcattacttagttcttaaggatatgtgttcatccattctgtcgctggctcagagtttgcttcactctctagaccagagtataatttcatttggcagtctcctatacaaatatgcatttaagttttttgacacgtactgccagcaggaagtggttggtgccttagtgacccatatctgcagtgggaatgaagctgaagttgatactgccttagatgtccttctagagttggtagtgttaaacccatctgctatgatgatgaatgctgtctttgtaaaggcccgacgccgctctgacgccactgaggtgcgccacgacgtgacgtcaacgttcgcgccggaagtggaagaccaggcagcccagctgaaggcaactgggaaccagctttcagtgaagatggcagggccagaactgttgctcgactccaacatccgcctctgggtggtcctacccatcgttatcatcactttcttcgtaggcatgatccgccactacgtgtccatcctgctgcagagcgacaagaagctcacccaggaacaagtatctgacaggcgtcgggcctggtgggactgtcagctgagatgccaagtaccaaagcgctttgcagtctgtaaaactgccattagagattgtttagctgctgagaatcacggtgtagttgatggaccaggagtgaaagttcaggagtaccacataatgtcttcctgctatcagaggctgctgcagatttttcatgggctttttgcttggagtggattttctcaacctgaaaatcagaatttactgtattcagccctccatgtccttagtagccgactgaaacagggagaacacagccagcctttggaggaactactcagtatctacctggagcacacagagagcattctgaaggccatagaggagattgctggtgttggtgtcccagaactgatcaactctcctaaagatgcatcttcctccacattccctacactgaccagggatgtacttcttgggattctccaaatactccatcagtgtatcctctccccaggtgatgcctttgttcttattggtgtctgtgatgacatgcacttggtgataagaaagcagctctctagcaccgtattcaagtacaagctcattgggattattggtgctgtgaccatggctggcatcatggcggcagacagaagtgaatcacctagtttgacccaagagagagccaacctgagcgatgagcagtgcacacagatggaaaaactaagtcttgtcagcacgtccggcttccaggcacccgcctttaacacgtgcgataccatctggcttccagaaaagcccaacagaaacatgatccgccactacgtgtccatcctgctggagagcgacaagaagctcacccaggaacaagtatctgacagcatgcagcagagtgcaaggcacatggggacgaggcacccacagtccctctcccataagcctgccaagaagattgatgtggcccgtgtaacctttgacctgtacaagctgaacccacaggacttcattggctgcctgaacatgaaggcgactttttatgatacgtactccctttcctatgatctgcactgctgtggggccaaacgcatcatgaagtga

SEQ ID NO: 140927 - DNA, 397 bp, Homo sapiens
caattctgtcagtagctgatacaaacttcagaatacccttcacctcagccacagctgcccagtcccacagcttctttcctcccaaccccagcacccctgcacccttagctccaaaattcctaaaaggttcactgtttgttcttctaatttctccccatgatgttgcgtttgaaattggtttgctctagtgggtttccctgtagccttgcgtattcctgagctgcaacatcagattctggtttttctccgcagtgactttccatttcctgtgaaaagcactgtacggactggaagaatacgacactcaggatgggattgccataaacctcctgcccgctgctgttttctcaggactttgcaaaaagatgggggtcccggtgacctcacaggaatcagg

SEQ ID NO: 140928 - DNA, 573 bp, Homo sapiens
ccgaatttccgtgtcgacgatctcgtagcttcttaagatatcaggaattattcttaaaacgggagagagtcagaatcaactagctgtggatcaaatagctttccaaaagaagctctttcagaccctgaggagacacccttcctatcccaaaataatagaagaatttgttagtggcctggagtcttacattgaggatgaagacagtttcaggaactgccttttgtcttgtgagcgtctgcaggatgaggaagccagtatgggtgcatcttattctaagagtctcatcaaactgcttctggggattgacatactgcagcctgccattatcaaaaccttatttgagaagttgccagaatatttttttgaaaacaagaacagtgatgaaatcaacatacctcgactcattgtcagtcaactaaaatggcttgacagagttgtggatggcaaggacctcaccaccaagatcatgcagctgatcagtattgctccagagaacctgcagcatgacatcatcaccagcctacctgagatcctaggggattcccagcacgctgatgtggggaaagaactcag

SEQ ID NO: 140929 - DNA, 1197 bp, Homo sapiens
  misc_feature (1)...(1197): n = a,t,c or g
ggcattttagattatctggataacatatcccctcagcaaatacgaaaactcttctatgttctcagcacactggcatttagcaaacagaatgaagccagcagccacatccagcaactacactcgagcgtgcggacaggcaacctggagacatgtctgcgcctgctctccctgggtgcccaggccaacttcttccacccagagaagggcaccacacctctgcacgtggctgccaaggcaggacagacactgcaggccgagctgcttgtagtcgccgcaaagaatccggaaaaacgtgaatataccaccgaaaacggatctccggctgaaacccctacgtgtagcgcaggaaaacgaggaacaccacgaaccaagatgtcggacatctccagcgaggacctgcgtcgtgaaattcaggcggttttgaaggacgccgatttggcgaccatttcggcaaagagggtgcgcgagcaggtggagggaaagctgaactgctcgttgctgagccgcaagaaggagttcgacaagatcgtgatggaggtgatcaacgagcagcaggacgaggaggacgaagacgatgacgagggcaaggatcccgatgccgatcccgacgatgagagcgagcccagcgaggaggaggaccccagcagcagcgaggaggaggccgccaagaagaagaagcagacccccaagaagaggccacagcccacgaagcacaaggcgcccaagaagaagcgcaagaccctaaatgccgacgattccggcaccgctgatgaacgactgccnnnnnnnnnnnnnnnnnnnnnnnnnnnnnnnnnnnnnnnnggtgtagagtacaatagcacacttcacacttgtcctgaagtggttggtgccttagtgacccatatctgcagtgggaatgaagctgaagttgatactgccttagatgtccttctagagttggtagtgttaaacccatctgctatgatgatgaatgctgtctttgtaaagctcagcaaccggctttttgaggaactcgccatggacgtgtatgacgaggtggatcgaagagaaaatgatgcagccggattccagcccaaactctgggtctggatgagtggcactggccttgttccatttgtctgtccccagccggccacgcccagccttgccctggcccggcctagctctgcgtgcccaaagaccacccctgtctga

SEQ ID NO: 140930 - DNA, 1774 bp, Homo sapiens; identical to SEQ ID NO: 118666

SEQ ID NO: 140931 - DNA, 1099 bp, Homo sapiens
gcacgagcccagctgaaggcaataagcttggtctcaccgctgcagcagaggttctgtgctagccgggcataggggcgagagaaggcccagaggcgacagtcagagagaagcaactgcgccccggtgaagagaagctcgcccatcaccggctgggagccagctttcagtgaagatggcagggccagaactgttgcttgactccaacatctgcctctgggtggtcctacccatcgttatcactcttcgtagacatgatccgccactacgtgtccatcctgctggagagcgacaagaagctcacccaggaacaagtatctgacaggggacgaggcacccacagtccctctcccataagccctgccaagaagattgatgtggcccgtgtaacctttgacctgtacaagctgaacccacagggacttcattggctgcctgaacatgaaggcgactttttatgatacgtactccctttcctatgatctgcactgctgtggggccaaacgcatcatgaaggaagctctccactgggcccttttcagcatgcaaaccacggggccacgtgctgcttcacctcctgttacctgcagcagctcctcgatgccacagaggacgggcatccccccaagggcaaggcctcatccctcatcccgacctgtctaaagatactgcagtgaaagcccaagccctagctttccccagtgaaggactaaaattaggggccccccgctcaattggtagtggccacaagcctggcagctgtagagccgctaaccttccgacacctccctcaccacacaggaccctgagtgaggaggaggggctggaaacctgggatgggttggccaaaggagaacctcaggctcctggcctggcccagctccttcctgcccaaggtagcttagcccatccagactggtcctgaagtctgtccctccattggcatgaagtttgcccctcagcagtccggcctcacaggctgtactttcatggtgctctttaccttttggcccccatcccagaacatttgtgagtgaatttgcaagcatactagcatgtgatattagggagtttgcaataaattattgatgctgaaaaaaaa

SEQ ID NO: 140932 - DNA, 3130 bp, Homo sapiens
atgcacttggtgataagaaagcagctctctagcaccgtattcaagtacaagctcattgggattattggtgctgtgaccatggctggcatcatggcggcagacagaagtgaatcacctagtttgacccaagagagagccaacctgagcgatgagcagtgcacacaggtgacctccttgttgcagttggttcattcctgcagtgagcagtctcctcaggcctctgcactttactatgatgaatttgccaacctgatccaacatgaaaagctggatccaaaagccctggaatgggttgggcataccatctgtaatgatttccaggatgccttcgtagtggactcctgtgttgttccggaaggtgactttccatttcctgtgaaagcactgtacggactggaagaatacgacactcaggatgggattgccataaacctcctgccgctgctgttttctcaggactttgcaaaaggatgggggtctggtgacctcacaggaatcaggccaaaaattggtgtctccgctgtgcctggctccgtatttccggttactgagactttgtgtggagagacagcataacggaaacttggaggagattgatggtctactagattgtcctatattcctaactgacctggagcctggagagaagttggagtccatgtctgctaaagagcgttcattcatgtgttctctcatatttcttactctcaactggttccgagagaatgaccttctcaccttcactgtggaactactgttcgtcctggcacaggcatatgcctactgttttgattcaattgtaaatgccttctgccaggaaacatcacctgagatgaaggggaaggtgctcactcggttaaagcacattgtagaattgcaaataatcctggaaaagtacttggcagacatgatccgccactacgtgtccatcctgctggagagcgacaagaagctcacccaggaacaagtatctgacagcatgcagcagagtgcaaggcacatggggacgaggcacccacagtccctctcccataagcctgccaagaagattgatgtggcccgtgtaacctttgacctgtacaagctgaacccacaggacttcattggctgcctgaacatgaaggcgactttttatgatacgtactccctttcctatgatctgcactgctgtggggccaaacgcatcatgaacaagaacagtgatgaaatcaacatacctcgactcattgtcagtcaactaaaatggcttgacagagttgtggatggcaaggacctcaccaccaagatcatgcagctgatcagtattgctccagagaacctgcagcatgacatcatcaccagcctacctgagatcctaggggattcccagcacgctgatgtggggaaagaactcagttcctcaggaaatcaagaaagcagcggtcagagctgtattattctcctctttgatgtaataaagtcagctattagatatgagaaaaccatttcagaagcctggattaaggcaattgaaaacactgcctcagtatctgaacacaaggtgtttgacctggtgatgcttttcatcatctatagcaccaatactcagacaaagaagtacattgacagggtgctaagaaataagattcgatcaggctgcattcaagaacagctgctccagagtacattctctgttcattacttagttcttaaggatatgtgttcatccattctgtcgctggctcagagtttgcttcactctctagaccagagtataatttcatttggcagtctcctatacaaatatgcatttaagttttttgacacgtactgccagcaggaagtggttggtgccttagtgacccatatctgcagtgggaatgaagctgaagttgatactgccttagatgtccttctagagttggtagtgttaaacccatctgctatgatgatgaatgctgtctttgtaaagggcattttagattatctggataacatatcccctcagcaaatacgaaaactcttctatgttctcagcacactggcatttagcaaacagaatgaagccagcagccacatccaggatgacatgcacttggtgataagaaagcagctctctagcaccgtattcaagtacaagctcattgggattattggtgctgtgaccatggctggcatcatggcggcagacagaagtgaatcacctagtttgacccaagagagagccaacctgagcgatgagcagtgcacacaggtgacctccttgttgcagttggttcattcctgcagtgagcagtctcctcaggcctctgcactttactatgatgaatttgccaacctgatccaacatgaaaagctggatccaaaagccctggaatgggttgggcataccatctgtaatgatttccaggatgccttcgtagtggactcctgtgttgttccggaagttgactttccatttcctgtgaaagcactgtacggactggaagaatacgacactcaggatgggattgccataaacctcctgccgctgctgttttctcaggactttgcaaaagatgggggtccggtgacctcacaggaatcaggccaaaaattggtgtctccgctgtgcctggctccgtatttccggttactgagactttgtgtggagagacagcataacggaaacttggaggagattgatggtctactagattgtcctatattcctaactgacctggagcctggagagaagttggagtccatgtctgctaaagagcgttcattcatgtgttctctcatatttcttactctcaactggttccgagagaatgaccttctcaccttcactgtggaactactgttcgtcctggcacaggcatatgcctactgttttgattcaattgtaaatgccttctgccaggaaacatcacctgagatgaaggggaaggtgctcactcggttaaagcacattgtagaattgcaaataatcctggaaaagtacttggcagatgcatataccaatggaacagaagagagcccagaaataagtccatacacctacaatgaactcattctcagcaaaggtgccaagaatatacattggggaaagacactctcttcaataaatggtgttgggaaaactggatatccatatgcagaagaatga

SEQ ID NO: 140933 - DNA, 710 bp, Homo sapiens
cggacgcgtgggttttcgccggaagtggattaccaggcagcccagctgaaggcagtatgctcggctcacagtcgcaggagagttctggggtacacgggcaaaggggcttgagaaggcccggaggcgaagccgaagagaagcaactgtgccccggagaagagaagctcgcccattccagactgggaaccagctttcagtgaagatggcagggccagaactgttgctcgactccaacatccgcctctgggtgggcctacccatcgttatcatcactttcttcgtaggcatgatccgccactacgtgtccatcctgctgcagagcgacaagaagctcacccaggaacaagtatctgacagtcaagtcctaattcgaagcagagtcctcagggaaaatggaaaattacattcccaaacagtctttctttgacacgaaaatattattttcaacaacccagaggatgggattttttcaaaaaaacttaaacgggaggtagtgccaccttctcctatgactgatcctactatgttgacagacatgatgaaagggaatgtaacaaatgtcctccctatgattcttattggtggatggatcaacatgacattctcaggctttgtcacaaccaaggtcccatttccactgaccctccgttttaagcctatgttacagcaaggaatcgagctactcacattagatgcatcctgggtgagtt

SEQ ID NO: 140934 - DNA, 417 bp, Homo sapiens
acgctgagctgctcgggcccataaccttgtcagtttgctgtgctaaccactacttatatcttttggtcgtgggacttctcaaaggacaggacagacataggcactctcacagtatcaagcccatttaccgtcacctcacaccaatactcgccccaccgtgtgataggctcttctggtaactttaatgtatgtggggcaaccacaacaccaagcgcctcacctgccttggtctggatcttctctaattttccttcttgtctcagcaatttctcctcttcaaacagcttcttgttttcaggggaagcatatacagccagtcccttgagaaagagtcgattccggcctaaagatttcttactgagaccaggtcaccccggactccaacatctgtcaattagaacagagacaggggaattt

SEQ ID NO: 140935 - DNA, 1127 bp, Homo sapiens
tttttttttttttttttttaaaaaagaacatattctctttatttctgcttgggatacaaatgttcagtttggatgatgagaatgaggcaagtactggagacaatggctggctctcctgtttgtccccaataaactcccaaatggaggaagaagctaaaacaggttttggatcggtttcggtctacatgcatctagcttatcaaatcctacagccttggtacttctggaacaggacttccctgcccccagtgatgacagttaaagatggcaaaaatgaagaattcaacatgtaatacggcagtgcaagtcttgatgtccttcagactgttctctaaaattctcgtatttgggtcagaagctggggagtgaagatgcaggggtgctttgcacaattccttgctccacttgctcccgattcctgctttgcctgccttggaagggaagagtagatttagatctggggggctggtggggggccatagccttggaagccttgctgggctaaccagtacttatatcttttggtcttgggcttctcaaagttcacgaacagacataggcactctcacagtatcaagcccatttaccgtcacctcacaccaatactcgccccaccgtgtgataggctctgctggtaactttaatgtattgtggggcaaccacaacaccaagattctttaaagaagtggcgggcaactatttcagggttcagctcccatttgacattgttcttcatccctacctccaggcgacagctttttagaaatttacactgtcgcctcacctgccttggtctggatcttctgtaactttcctcctggtctcagcaatttctcctcttcaaacagcttcttgttttcaggtgatgcatatgcagccagtctctgagaaaggagttgattccgatccacagatttctttactgagatcaggtcaccccagactccaagtgtctccacagactgtgtgaagatgatctccagattttctttgggccagtgctccgtgtcctccaccagcttgtcgatgtagtgtcgctggtgcagacgcagcttctggccctccctggccagtggtaccttccatccacccagtgctccacaatgccgagggcacgacagtcccat

SEQ ID NO: 140936 - DNA, 711 bp, Homo sapiens
ggggccgcgtgggaatggaaacatctgccccacgtgcaggaagccgggtggtggccacgacagcgcgccactccgcagcgtaacctcgcagatcccctgcgtgtgtcctcgcaagactagctcaccgaaatggccgcgtccagtcaaggaaactttgagggagatattgagtcagtggaccttgcagaatttgctaagcagcagccgtggtggcgtaacgtgtttgggccagaatctggactctcagccgaaaagtatagcgtggcaacccacctgttcattggaggtgtcactggatggtgcacgggttttatattccagaaggttggaaagttggctgcaacagctgtgggaggtggatattttctccttcagcttgcaaaccattctgggtacatcaaagttgattggcaacgagtggagaaggacatgaagaaagccaaagagcagctgaagatccctaagagcactcagatacctaaccagaagcacatgtcccggatgcaggtcaaaagcctagagcaagctagatctgagctgtgcatacattggcagacacgtgtgagtggcccagtgccccagggacaagctcctattgttggtcccactggtgcccctcagcagcaggcctggccctggccttgtttacaagccagttctgtcacagtgtgcttagcagcagcagtggcagcaggatctgatggagcttag

SEQ ID NO: 140937 - DNA, 906 bp, Homo sapiens
  misc_feature (1)...(906): n = a,t,c or g
ccgcggggcctgtgacaccgcacgctgagctctgtgaggtagccgcttgcggagactgcaagcagccgcggcgcgcccggccctccctcttccgctgccgccgtgggaatggaaacatctgccccacgtgccggaagccaagtggtggctgacaactgcgcgccactccgcggcctaccgcgcagatcctctacgtgtgtcctcgcgagacaagctcaccgaaatggccgcgtccagtcaaggaaactttgagggaaattttgagtcactggaccttgcggaatttgctaagaagcagccatggtggcgtaagctgttcgggcaggaatctggaccttcagcagaaaagtatagcgtggcaacccagctgttcattggaggtgtcactggatggtgcacaggtttcatattccagaaggttggaaagttggctgcaacagcttgtggggaggtggattttttctccttcagcttgcaaaccatacttgggtacatcaaagtttgactggcaacgagtgggagaaggacattgaagaaagcccaaagagcagcttgaagatccgtaagagccaatcagattacctactgaggtcaggagccaaagctgcagggaggtggtgtcattttgtgaagaagaatgttctagtaacatgggggatttttccggaggctttctgcttggcatggcatcctaaggaagatgacctccatgttccattgttccctgggttttttcccagccagcagccttttacactccatcatagggacatcgagtccctcctcctcttcttcccatggccttctttccctggccattgggaaaattntgagtnggctttttttaaggcatcngcttggttacaaattcaatgttgggcaccatgaggctttcangggggggca

SEQ ID NO: 140938 - DNA, 735 bp, Homo sapiens
atggtcattgcaaacagtgctgaacagacacctttacaagtcaccttatgcacgacagcaaaagtttcatcggaactccccagtggacttgctctcttaattcaaaatggctgtaacagtgtcacgttggctgcacctgtttcaaagaaagttcagaaaattgggtatttcacagacacattaagatttcaaacaaagacgagagcattcacaaggaacagagagggaacttccatagcagtcttcgagagagaagttctggtagaagaggaggtagagaacttccatgatggaggcgacttccaggagaagccgactgcccttctccatggaactcagcctgcatctgcccaggagtcagaggaggtgagggaggagatctgggaagggctggacaggcccatctgcttcctgccccctcagcctgctggtgagccagcacataacccacaaaagcctcaacagcccctggccccccatcaactttcaaaggcaccaatgcaaaagactatagctactgcttcagttccttcttccaaatgtcatatgaaatgcctcttaggggtctatactaacccagaactgtgcaggagagagaaatctgggaaacacagtttcagcttaactaaggtgaactgctattagtcaaccacacctagtctcactatgcccatttgtcatgtgtggcccactcagactgaaagaaatctttgttggttcactgttttataaggg

SEQ ID NO: 140939 - DNA, 1358 bp, Homo sapiens
gcctcaccgcagccttgccgccacctttattgggcactcagccctgaggcttcttacacacacgcgccgggggatgggaggggatggggtgtcacttcgggggcagggaccctctggcggggaggacgggtggcttggtgataagagcatggccccagggcccggcgccttggcccccggaacgctctgtgaccctcgcagctgacctggcctaagggcgtgcagagtcgtgacctgggaccacccgtgggtgaagctggctccccaagtgtctggggctcaacttgggggcaattgaaaagcacggcccgctggttcaatggggttgtcaaggaagaacggagccactccttcttgaggcacttgtttcaagctgcgacagccgcaatgttggggggggttctcttgtttgaaccgcggcaactgggcttccttcaaaaggctgtgaaaggctgcccgcatgcgtctttcttgggtgccggtcggccgcctccttcggccaacgcttgagcaactgcaaatgggcgtcctcggatggtgccgcgcctccacgcttgccctcctccaagcacgcgggcggttcacgttcttcctccagcggcacctccagatggctcttggctttctcggctgtgtccggggcctccctgagctgatggtctcggcgcagcgtgtcctcgatctgggccccgggtgaccttgctggacgtggccacccgcggcgccttaccgccctagagcagggagtcctcctgcctccagtaggcgctgcgtctccttcgtacgttccaactggtggaggcaccgattatcattctgcgtcccagcactgctctttcctcatcacgtcgtttgtcgtcgtccttccagtaagcatcactccagctccttctgcttcttggcatcagcggccgccttggcctctgccctccgtgcccgggccgctgccgacttggtgttctcaccctggaacttcttgggcatccctcagcaggctgcggcgaagaggatggggatgggggagcaggggcbggaggggacatcggvactcagcaagccaagaatcacacttgggcagccatgaccctcttggggcctctgtggccttctctgtataaaacaagggctttggacttagcgctctccttgtaaaagtttattaaggcaaaattcacatcatgacaccaaatgagctcatttaggccaggtctggtggctcacacccgtaatcccagcaccttgggaggccgaggcgggcggatcacttgcggtcagaagctcgagaccagcctctcaaagtgcctggatcacaggtgtgagccacagtgcctggcaatttctgctgtttaagccaccca

SEQ ID NO: 140940 - DNA, 1374 bp, Homo sapiens
atgagtttcctcatcgactccagcatcatgattacctcccagatactattttttggatttgggtggcttttcttcatgcgccaattgtttaaagactatgagatacgtcagtatgttgtacaggtgatcttctccgtgacgtttgcattttcttgcaccatgtttgagctcatcatctttgaaatcttaggagtattgaatagcagctcccgttattttcactggaaaatgaacctgtgtgtaattctgctgatcctggttttccaatggtgccttttttacaattggcctattttattgtgagcaatatccgactactgcaataaacaacgactgcttttttcctgtctcttatggctgacctttatgtatttcttctggaaactaggagatccctttcccattctcagcccaaaacatgggatcttatccatagaacagctcatcagccgggttggtgtgattggagtgactctcatggctcttctttctggatttggtgctgtcaactgcccatacacttacatgtcttacttcctcaggaatgtgactgacacggatattctagccctggaacggcgactgctgcaaaccatggatatgatcataagcaaaaagaaaaggatggcaatggcacggagaacaatgttccagaagggggaagtgcataacaaaccatcaggtttctggggaatgataaaaagtgttaccacttcagcatcaggaagtgaaaatcttactcttattcaacaggaagtggatgctttggaagaattaagcaggcagctttttctggaaacagctgatctatatgctaccaaggagagaatagaatactccaaaaccttcaaggggaaatattttaattttcttggttactttttctctatttactgtgtttggaaaattttcatggctaccatcaatattgtttttgatcgagttgggaaaacggatcctgtcacaagaggcattgagatcactgtgaattatctgggaatccaatttgatgtgaagttttggtcccaacacatttccttcattcttgttggaataatcatcgtcacatccatcagaggattgctgatcactcttaccaagttcttttatgccatctctagcagtaagtcctccaatgtcattgtcctgctattagcacagataatgggcatgtactttgtctcctctgtgctgctgatccgaatgagtatgcctttagaataccgcaccataatcactgaagtccttggagaactgcagttcaacttctatcaccgttggtttgatgtgatcttcctggtcagcgctctctctagcatactcttcctctatttggctcacaaacaggcaccagagaagcaaatggcaccttga

SEQ ID NO: 140941 - DNA, 3031 bp, Homo sapiens
cgcatacagtggtccatttccaagacaaagtgccttaaattggcttaggtcagcaaactacagaagaaacaggaaatactaggcccctgcttcgatagctgatgcctgcttgtcagcctccccaccttccccctcttccccgccccttagttgccctcacccgaaccaaagaagtttagtctgagatgaaagtttactagcctgcagaatagcttgctttgtctgttcttatcagccttcccagctacttaggtcataaatcaaattcttaaagagcccccgagctgactaggattgcaatgcattgtgggctgcaacaaaatgtagcaagacaaccctaaagaaacacctaaagcctctaaccctggcacacgataagggctcggttttgttcgacgacttcactttttttccagtgaagaaacagaagcccgaggggcaatcctctaccactgaatttctgtaatcttcatttgacgtatttttccataggccacaagtgccaattgcaagttgttcagattttgtaaatctaaatgtcataaaaacttttaaaagaagtgcagtcctcgcaaagctaggtggatcaaagcattccagaatgcagctggtaaagagcttacagtggataattcatttgaatttgaaaaacgtagaaatgaacctatcaaataccagcgagagctatggaataaaactattgatgcaatgaagcaaattgaagaaatcaaacagaaatgccaagctaaatttataatgaacagactgaataaaaataaagagctacagaaagttcaggatatcaaagaagtcaagcaaaacatccatcttattcaagcccctcttgcaggctggaatggttcatgtggacaagatgagtcctaagcaaaactgaaccaggtcccaccaggacctgacgtggggccactagatttggagccatgggtattaactatcacagcagggagccccaacccctgggccactgacccgctacccaagacctaattatatgctaattaccaaacgaaattacacaccttcagagagctttcctctgactgcttggaggaagctctgcccaccacaaatgcaacgagtaaccctggcacccagttgcgtttccgcggcttgctaaaggcctgctctccaaggctgccaggccttgctgagtttgcacaaagaaacgcggcccgcggtagcaggcgtccggctaaaaaggtcaccagtttggctgatcccaggactgttagggttaacttcccagtctgcttgtcacgtccctgtgaccatcaagtccaaggcctcttgtgtgatcggatcatcaagggccacaataaggatgtcacctatgtaatgaatgcacatgaccactttgtgcagggaccgggaaggcggagctagggatgcaggttcggtcgcctctttaggccactgcgccacgcagtcttcccagaaactgtcaaggtgctggtatgtttcttgcccttgcacttttagtgtactaaaatcaacggccaaactctactctttatagcaatcaaagctttttgccgagcacgtgaaccctcaacttctgtactccttccgtcacccagcgacgtggcgctgaatcccgcgtcacacctttctctaccccacgccgaaccctcaccctcatcctccttttctgatctccgtctgagtgaccccggtggtggactgtcgattgagatggggccagggggctgcctgtgactggttatctcctccctaagggtgtctgcagtagtgacaaggagctactattctccaactaggaaggagactccattgacctttatctgttttttctggaaactaggagattcctttcccattctcagcccaaaacatgggatcttatccatagaacagctcatcagctgggttggtgtgattggagttactctcatggccctcctttctggatttggtgccgtctactgcacatacactttgatgtcttatttcctcaggaatgtgactgacacagatattctagccctggaacagcgactgctccaaaccatggatatgatcataaaaactccagaactcagtcatctgtaccccacgattttgttaattttacctcaggagcttgaagttttgtcttcctaaaacttatagcgaccgcttgtcttcctaaaatttacagcgaccgtttttaggactcacgctcttagaaccccgtccattcgaataaatgactatacgcttgtaagtggtttacgctgtgtaactcagtactacgaatacgacttgctctcttcctacaccagatttaaagagggagccccgtgggagcccaaagacaatcttgctgtagaataagaataggtgctgaattaagaagactgttttcctttagacaataagctaaaacatttgtaagactcacctcatttatttctcttctctcaggtatcgcagtcccaaactgacagcaggcgatgcctgaaaacagttatttcacatacttatgtaatagaaggaaaaatccctcatatccaccgctcacatccatggcctactccaggattagagagagagagagaggggtataagttcttttcagggctctctctggtttcagagtcccccagttctaaaggtcacatagtaaagtttggtggatgtcaggacttacttggtttgtgtttgggcatccaacacatcgtcttaccactgcagtccatgaaaagtgcactgacaagaacattgggatctccaggtagttgtttctacccaggaagagacgagggaagaccaccaaagcagtgtggtagccgggaaattacagataaggatcaaccagccaatgtcaacttccttcctctcatgaactctaccccttcctggctagattctgatcatcctggtgtatttgtcacagacccaaaatacaaatctctagtcaacagtatagagctcttcatggcttccaaaacaaggcatatttccttcctagaatgttccttctctggaatccccgtgattcactcctcat

SEQ ID NO: 140942 - DNA, 734 bp, Homo sapiens
ctggtctaacagacccgcgagaacgaaggacgcttgcctttttccggtcggggaagggggaagaaggtaacttccggtgacggggttgcatcacttcctctcaagcttggcgtttgtttggtggggttacacgcgggttcaacatgcgtatcgaaaagtgttatttctgttcggggcccatctatcctggacacggcatgatgttcgtccgcaacgattgcaaggtgttcagattttgcaaatctaaatgtcataaaaactttaaaaagaagcgcaatcctcgcaaagttaggtggaccaaagcattccggaaagcagctggtaaagagcttacagtggataattcatttgaatttgaaaaacgtaggaaatggaacctattcaaatacccagcgagagctatgggaataaaactattgatgcgtatgaagagagttgaagaaatcaaacagaagcgccaagctaaatttataatgaacagattttggctaggcacctttggcagggatgtctcagaaatgatggcgtatccttctcatgcatcatatcgggaagcacatgatgtcaccttgctgattgaagaaaataaagagctacagaaagttcaggatatcaaagaagtcaagcaaaacatccatcttatccgagcccctcttgcaggcaaagggaaacagttggaagagaaaatggtacagcagttacaagaggatgtggacatggaagatgctccttaa

SEQ ID NO: 140943 - DNA, 1183 bp, Homo sapiens
atgcttattttcaacgactatacatcaagtatgtacaagattgaagttccacaacgcaagaccttcccctacacagatgaaaagtcaagggacaaagaaggagagagaagtatcaacccagttccaatatctggccgggctaaccccgcggctcctgcacctgtgcctgcccggggaatcgtgggccgtttcccactcctcttcaaccctcagcgacatcttgggccttcttttccagtcagttgggacggcgcccctatgaggctgtgtcttatccctcggaacatgggcaccccacagagggtcctgtctcctgtggtctggagccccgcctcaaggaagaaacccatgctgtctgctcacaactccaggatgtttggacacctcagccccgtgaggattcctcatctcagaggcaagtttaaccttcaacttccttcattagatgagcaggtgatcccagccaggctcccgaagatggaggtgagggcagaagagcccagagaagcaacggaggtgacagaccaggtagagacccaggggcaggaggacaataaaaggggcccctgtagcaatggggaagcagcttccacctctaggcccctggagactcagggaaacttcacttcctcctggtacaatcccaggcccttggagggaaatgtccacctcaagagcttgacagaaaacaaccagactgacaaggcccaggtgcctgcagtgagtttctactccaacggccatggagtcgccagttcacacagccctgctggaggcatccttccctttgggaagcgtgacccacttccaacagtgctccctgccccagttccaggctgctccctgtggccagagaaggcggccttgaaggtgctgggtaaagaccacctgcccagctctccaggcttgctgatggtgggggaggacatgcagcccaaggatcctgcagctcttgggtcaagtaggtcttctccacacagagctgccggccacagttcccacaaaagaaaactgtcggggccaccgctgcagctgcaaccgacccctcccctgcaactgagggacatggatgaagctggaagccatcatcctcatcaaactaacacaggaacagaaaaccaaacaccacatgttctcactcataagtgggagttgaacaatgagaacacatggacacaggaag

SEQ ID NO: 140944 - DNA, 3210 bp, Homo sapiens
atgaacaccaagcgacgagagccctggctctttggggaggaacacacccgactcatccgagaagccatcagagagcgctatggcctcctgccatattggtattctctgttctaccatgcacacgtggcttcccaacctgtcatgagttttgctgaccagaggggtcattatcccagcaagtgtgtggtggagaagatcttggtcttaggcttcaggaaggagccatcttctgtgactacccactcatctgatggtaaagatcagcctgtggcttttacgtattgtgccaaaacatccatcctgagcctggagaagctctcactcaacattgccactgactgggagccacttgccatgccgaccgtcattagcgcatctgtggctccaaggacagcggctgagccccggtccccagggccagttcctcacccggcccagagcaaggccactgaggctgggggtggaaacccaagtggcatctattcagccatcatcagccgcaattttcctattatcggagtgaaagagaagacattcgagcaacttcacaagaaatgtctagaaaagaaagttctttatgtggaccctgagttcccaccggatgagacctctctcttttatagccagaagttccccatccagttcgtctggaagagacctccgaaatccttcctgttcatctttgaggccccctcaccaagctcaggccagtcccatagtgggtactcagctgatgctgatgtagtgacctttgccagccctatgcagtctgaaaagactgtgtcctatcaggagaagcaccacacagaaaggtccgtgctgagcagccagactccttacgggatgaagcagtttgtgtcaggctaccttatggcgcaaccgagaagccccttgtgtcaacttgagtgggaaatttgcgagaatccccgatttatcattgatggagccaacagaactgacatctgtcaaggagagctaggggactgctggtttctcgcagccattgcctgcctgaccctgaaccagcaccttcttttccgagtcataccccatgatcaaagtttcatcgaaaactacgcagggatcttccacttccagttctggcgctatggagagtgggtggacgtggttatagatgactgcctgccaacgtacaacaatcaactggttttcaccaagtccaaccaccgcaatgagttctggagtgctctgctggagaaggcttatgctaagctccatggttcctacgaagctctgaaaggtgggaacaccacagaggccatggaggacttcacaggaggggtggcagagttttttgagatcagggatgctcctagtgacatgtacaagatcatgaagaaagccatcgagagaggctccctcatgggctgctccattgatgatggcacgaacatgacctatggaacctctccttctggtctgaacatgggggagttgattgcacggatggtaaggaatatggataactcactgctccaggactcagacctcgaccccagaggctcagatgaaagaccgacccggacaatcattccggttcagtatgagacaagaatggcctgcgggctggtcagaggtcacgcctactctgtcacggggctggatgaggtcccgttcaaaggtgagaaagtgaagctggtgcggctgcggaatccgtggggccaggtggagtggaacggttcttggagtgatagatggaaggactggagctttgtggacaaagatgagaaggcccgtctgcagcaccaggtcactgaggatggagagttctggatgtcctatgaggatttcatctaccatttcacaaagttggagatctgcaacctcacggccgatgctctgcagtctgacaagcttcagacctggacagtgtctgtgaacgagggccgctgggtacggggttgctctgccggaggctgccgcaacttcccagatactttctggaccaaccctcagtaccgtctgaagctcctggaggaggacgatgaccctgatgactcggaggtgatttgcagcttcctggtggccctgatgcagaagaaccggcggaaggaccggaagctaggggccagtctcttcaccattggcttcgccatctacgagatgcacgggaacaagcagcacctgcagaaggacttcttcctgtacaacgcctccaaggccaggagcaaggggatctataccctacgagggttctctagaggctggttctggcttggctgccaggaagccgtgcaccagagcaaaccgtccacgggcctcctgcttgcttctggtgacactgagaccccacatgtctgtattcctcacagggaagttgaaaataccatctccgtggatcggccagtgcccatcatcttcgtttcggacagagcaaacagcaacaaggagctgggtgtggaccaggagtcagaggagggcaaaggcaaaacaagccctgataagcaaaagcagtccccacagccacagcctggcagctctgatcaggaaagtgaggaacagcaacaattccggaacattttcaagcagatagcaggagatgacatggagatctgtgcagatgagctcaagaaggtccttaacacagtcgtgaacaaacgtgagttgctcaaaccaaatgggggtgggacagatggctctggaaagctcaacctgcaggagttccaccacctctggaacaagattaaggcctggcagaaaattttcaaacactatgacacagaccagtccggcaccatcaacagctacgagatgcgaaatgcagtcaacgacgcaggtgctgagaaggaaggggtggcagggatgtggacccgagacggattccacctcaacaaccagctctatgacatcattaccatgcggtacgcagacaaacacatgaacatcgactttgacagtttcatctgctgcttcgttaggctggagggcatgttcagagcttttcatgcatttgacaaggatggagatggtatcatcaagctcaacgttctggagaagttcccacaactgcccaacacctcacctacccgtttcctgctgcacaaagtctccttcactctcatcttttcgatacatcgtcaggcagggcagaagggcactacgccgcagagcattcgaggctctcagcacactgccagccagcgtgaaaatgcggcttcactacagcccagagaaaagggccaggtttag

SEQ ID NO: 140945 - DNA, 561 bp, Homo sapiens
atggcagcaggcaagggagtgtgtgcaggggaactcccctttatgaaaccatcagctctcatgagacttcttcactaccacaaggacagtgtgggggaaaccatccctgtgattctgttatcttcacctgggattgcaaaatggaacgggaacccacgacccagcctcgcacctgcctccagggacgcacgacccagcccctcacctgcctccagggaccgggacccacgacccagccccgcgcctgcctccagggagcggcacccctaccctgtgcgtcgtcctcggattgaggggccttgctccgttgcggtgcaggaaaccatggcgatgtgcgagagggtcagggtcgtgctggcacaggtaggaggagagagttatgacaggaaggagcttgagcaaaaccaggaagacgtggtggaccttctggctggacagtccactgccttcctctgccagcacgttggatggaaatcagaggatgactgccctggggcacagtcaatctgcagtcttatcctggaactctcaacatcaggcagcagatgccttcagttttaa

SEQ ID NO: 140946 - DNA, 1393 bp, Homo sapiens
ctcctctcccaattgtgtaagaccttgtccttctaagaaattccttcttccattatgctcagagtggctctgctttcctgaccggaccctgactggagcaagggatatttcatccagacctcagatacgagactttgtatcttggacagggattactacttctatctgttcagccctgtgccaggcaacatcagggataagacggcctttagcctattggaattcacgatccaattctgcagcacatttgtcccattccctagtggctactcccaattgccatataatttgtcactctacgtcacttgattcacctcagcaagcttgctttgctactatccgaggaacactgaattgggtcccagatattttggggatcgtgccccgaacccagtctgcaggcagcctagaatttggctgtgtatacaggaacccaggaaaggaaggaagtgccaatagagagaagggaaatggtggcagggggcagaggcagaggtcttcaagaactcccattctcttggcgtccattgcaatgaaactacctctgatggaagagaggagaccttgtggtacaggccaggcagcccacactccatcaatgtctggccctgaaaaaagcaaccccatccccagctacatgaaagcttttctcccacatggatcatcacttgatcttgcttatccatctctcttgggaatgatccacctgagaaatatgacagaagccattgccatagctgttgccagaatagtaactagaacaacacttgaggggtattccttgaagtgtgaaagggcattaggtttgcagtcgtatagcctggttttgaatccagacctaaccactttactgagtgaccttaagaagagagaaggggctgtgatcatcgaggaactcacacagcatccaccaggatccatgggccacagcatgtcagtatcctctgttggtttcttgtcctcatccttttctgtgggctatgatggggacgatgggggttacagtggcagctgtgctaatgccctggccaggtccaatgggctgctggtaggcaacgagaagatcaccatgcagaccctcaataaccacctatctggcctcctacctggccaaggtgaacgccctggaagaggtcacctgagagctgggggtgaaggtccatggctgggttttgacattgagctgcagcagctcagcatgaaagccgccctggaaggcacactggaagaaacaagggccctctttggagccaagctggcacagatccaggcgctggtcaggggtgttgaagcccagcagggtgacgtgggtgctgacagccagcagcagaaccagcaccagtggttcatggacatcaagtctcagctggaggaggagattactatctactga

SEQ ID NO: 140947 - DNA, 647 bp, Homo sapiens
atggtggaaggggaagcaaacacgtccttcttcacgtggcagcagcaaggagaagtgccgagcaaagagggaaaagccccttataaaaccatcagctctcgtgagaactcactcactatcatgagaacggcatgagagtaaccacccccatgattaaattactcccgggtaccttccacgacacatgcggattgtgggaactacaagaggaatttggcactgcgaggttctctgccgaggccaaccagaaataccccttggaagctggaatctgcaacaatggcccagggtgtcctctggatcctactcggattgctactgggtcagacccagggacaggatgcccggccatccacccccctgccgctggggagcggcgccttatcggggccgcccgaagctgctgcagtgccgctgggattcttgtacgtgcatcacacctacgtgcctgcaccacctgcacggacttcacgcgctgcgcagccaacatgcgctccatgcagcgctccaccaggacacgcaaggctggggagacatcggctacagttcgtggtgggctcggacggctacgtgtacgagggacgcggctggcactggtgggcgcccacacgctcggccacaactcccggggcttcggcgtggcctag

SEQ ID NO: 140948 - DNA, 750 bp, Homo sapiens
aaaagcatcagctgaggtgatattagttcagtcacctaacaactcctagaagagatgaggaaagggaaccttctgctgagctggcttctggggcctgagcttccagagctgtccccaagggctaggaaggccgacctgaaggatgagaacctcaaattcagttgctggtgggagccaaggaagacggcgggtgttctaacgtggccctttctggctgagctggcggaagtgggcgttttggccgatgggatgtatctcggcgctgtgtctgtggcccagcaaagccttggagtcctgtccctgacagtggccaaagggcttttatctgaggttgtgggcatctttctggatgcacttcgtaaaggcagtgcactggcgatgctgagggcactcatgggcttggagtcagcatccttctttaaagcatataatccttcaaatgaaagaggcaacacaaggcaccatataatgggtttggcagaactggaagctctggagaacggtcacccaacctgcctgcagtttaccctgaacatgaccgaggctgtcaagacctacaagtggcagtgcatagagtgcaaatcctgtatcctctgtgggacctcagagaatgatgaccagctactcttctgcgatgactgtgaccgaggctatcacatgtactgtttaaatcccccggtggctgagcccccagaaggtaatgatgatgaagtcaacaataagaacagcaacagatactactactactag

SEQ ID NO: 140949 - DNA, 3189 bp, Homo sapiens
atgggggtggaggacactggcctgagggtggtcatcgccctcagggacacgcctcccgacatggggaagggaatgagagtgggaagactgatggagaggcagaaacggaaggcggacatcgagaaagggctgcagttcattcagtcgacactacccctaaagcaagaagaatatgaggcctttctgctcaagctggtgcagaatctgtttgctgagggcaatgatctgttccgggagaaggactataagcaggctctggtgcagtacatggaagggctgaacgtggccgactacgctgcctctgaccaggtggccctgccccgggagctgctgtgcaagctgcatgtcaatagggccgcctgctacttcaccatgggcctgtatgagaaggcgctggaggacagcgagaaggcgctgggcctggacagtgagagtatccgggcgttgttccgcaaggcacgcgctctcaatgaactgggacgccacaaggaggcctacgagtgcagcagccggtgttccctcgccctgccccacgatgaaagcgtgactcagcttggtcaggagctggcccagaaactggggctgcgagttcgcaaggcgtataagaggccccaggaattggaaaccttttctctgctcagtaacggcactgcggctggcgtggcagatcagggaacttctaatggattggggtccatagatgacatcgaaacaggtaatgtccccgatacgagggaacaagtggaaattggggccccgagagactgctacgtggaccctcgaggctccccagcccttctcccctccacgcccacgatgcccctgttccctcacgttctggacctgctggcccccctggacagcagcaggaccctccccagcaccgacagcctggatgacttctcagacggggatgtctttggcccagagctggacaccctcctggactcgctgtctctggtccagggtggcctgtctggcagcggcgtgcctagtgagttgccccagctgatacccgtgttccccggcgggaccccactgctaccacctgtggtgggtggctccatccctgtctccagcccactgccccccgcctccttcggcttggtcatggacccctccaagaagctggccgcctctgtgctggatgccctcgatcccccgggccccacgctggaccccctggacctgctgccgtactcggagacccggctggatgcactcgacagctttgggtcgacacgaggctccctggacaaacctgactccttcatggaggagaccaactcacaggaccaccgtccccctagcggtgctcagaaaccagccccctcgccagagccctgcatgcccaacactgccttgctcatcaagaaccccttggctgccacccacgagttcaagcaggcctgccagctctgctaccccaagacaggcccccgggctggcgactacacctaccgtgagggccttgagcacaagtgcaagcgggacatcctgctcggccggctccggagctcggaggaccagacctggaagcggatccggccccggcccactaagaccagcttcgtgggctcctactacctgtgcaaagacatgattaacaagcaggactgtaagtacggggataactgcaccttcgcctaccatcaggaggagatcgacgtgtggaccgaggagcggaagggcaccctcaaccgcgacctgctcttcgacccgctggggggtgttaagcgcggcagcctcaccatcgccaagctcctgaaggagcaccagggcatcttcaccttcctctgcgaggccatggcacagacagggctggggatgctccctggcacggaccaccataggaagtcagccctggaacccgtgggctgtggaggcctggtcttagaaccagtaggtcctggagggtcaatctgctttgacagtaaaccccggatcatcagcaaaggcaccaaggactctccgtctgtctgctccaacctggctgccaagcacagcttctacaacaacaagtgcctggtgcacatcgtccgctccacctccctcaagtactccaagatccgccagttccaggagcacttccagttcgacgtgtgccgccatgaggtgcgctacggctgcctgcgggaggacagctgccacttcgcccacagcttcatcgagctcaaggtctggctgctgcagcagtactcaggcatgacccacgaagacatcgttcaggagtctaagaagtactggcagcagatggaggcgcatgcggggaaggccagcagcagcatgggtgctccgaggacacatgggcccagcacctttgacctgcagatgaagtttgtatgtggccagtgctggagaaacgggcaggtggtggagcctgacaaggacctcaagtactgtagtgccaaggcccggcactgctggaccaaggagcggcgggtccttctggtgatgtccaaggccaagaggaaatgggtgtcagtgaggccactgccatccattcgtaacttcccacagcaatacgatctctgcatccatgcacagaacggccgcaagtgccaatatgtggggaactgctccttcgcacacagcccggaggagagggacatgtggaccttcatgaaggagaacaagatcctggacatgcagcagacctatgacatgtggctgaaaaaacacaacccaggaaagcctggagaagggacccccatcagttctcgggaaggggagaagcagatccagatgcccacggactacgcggacatcatgatgggctaccactgctggctctgcggcaagaacagcaacagcaagaagcagtggcagcagcacatccagtccgagaagcacaaggagaaggtcttcacgtccgacagtgacgccagcggctgggccttccgcttccccatgggcgagttccggctctgcgacaggctccagaagggcaaagcctgcccagatggggacaagtgccgctgcgcccatggacaggaggagctcaacgagtggctggaccggcgcgaggtgctgaagcagaagttggccaaggctcgcaaggacatgctgctgtgcccacgggacgacgactttggcaaatacaacttcctgctgcaagaggacggggaccttgccggtgccaccccagaagcccctgctgctgctgccaccgccaccactggggagtag

SEQ ID NO: 140950 - DNA, 1430 bp, Homo sapiens
tgatagcgtcatcagatctgaaacgttttactctgaatgtggcatggaatagagattatatggagattaagaatgtaaatagggataatagtgtggaagctgttgcagctgacaaagcaaatctgtggaatgttgaacttgagagagattatctgaaattggaatggaacttatgtttaaaagggaagcagagcctaagtttggaaaatttgcagcctgatgatgtgatagaaaagaaaaacccattttctggggagaaattcaaggtgactgcagaaatttgcatacgtatacagaagtcaagaattgaggtttgggaacctccacctagatttcagaggatctatggaaatgcctggatgtacaagcagaagttggctgcaggggtggagccctcatggagaacctctgttagggcaacagagaaggaaaatatggggttggagcccccacacagagtccccactggggcactgcctagtggagctgtgagaagagggccaccatcctccagattccagaatggtagatccactgatagcttgcacactgtgcctggagaagccacagacactcaacaccagcctatgaaagcagctgggagtgaggctgtaccctgcaaagctataggggcagagctgctcaagaccatgggagcccacctcttgtatcagcatgaccatgatgtgaaacagggagtcaaaggagatcattttggagctttaaaatttgattaccttgctggattttggacttgcatggggcctgtaaccccttttttttggccaattactcccatttggaacagctgtatttactcaattacctgtaccccgattgtatctaggaagtaactagcttgatttggattttacagggtcataggcagaagagacttgccttgtctcagatgagactttggacaggggacatttgggttaatgctgaaatgagttaagactttgggggactgttgggaaggtatgattggttttgaaatgtgaggacatgagatctgggaggggctggggtagaatgatatggtttggctgcatccccacgcaaatctcacattaaattgatgagatcccataattcccacatgttgtgggagggacctggtgggagataatttgaatcatgggagtgggtctttcctgtgctgctctcatgatagtgaataagtctcatgagatctgatggttttgtcaggggtttctgcttttgcatcttcatcatttttctgttgccactgccatgtaagaagtgcctttaaccttccaccatgattctgaggcctccccagccatgtggaactgcaagtccaactatacctctttttcttcccagtctcaggtatgtctttatcagcagcatgaaaacggactaatacacctacattaaagggcagagaagaggcaaaaaaaaaa

SEQ ID NO: 140951 - DNA, 1839 bp, Homo sapiens
agcgacgcgtggagaagcggcccacgtgtctgcccagagtcaagtcctgtgttcttcccgctccttacgcatccgcggtccagggcgccctttcagccccgctggtgttcgcccaccccgggccgcgtgagtggggccccacgcagctccccgcactccgtgggccaacttggccaagcaactctgtccggggagcggtgcttgcggggggtgagtaccgggcactgcgcatgcggagctccaaattcaaacagctgttttcagaggctggagggcgggcggactggtagcagctggggctaggagaggctttctctaggaggcggccgctcgagagccatggtggaccggggccctctgctcacctcggccatcatcttctacctggccatcggggcggcgatcttcgaagtgctggaggagccacactggaaggaggccaagaaaaactactacacacagaagctgcatctgctcaaggagttcccgtgcctgggtcaggagggcctggacaagatcctagaggtggtatctgatgctgcaggacagggtgtggccatcacagggaaccagaccttcaacaactggaactggcccaatgcaatgatttttgcagcgaccgtcattaccaccattggatatggcaatgtggctcccaagacccccgccggtcgcctcttctgtgttttctatggtctcttcggggtgccgctctgcctgacgtggatcagtgccctgggcaagttcttcgggggacgtgccaagagactagggcagttccttaccaagagaggtgtgagtctgcggaaggcgcagatcacgtgcacagtcatcttcatcgtgtggggcgtcctagtccacctggtgatcccacccttcgtattcatggtgactgaggggtggaactacatcgagggcctctactactccttcatcaccatctccaccatcggcttcggtgactttgtggccggtgtgaaccccagcgccaactaccacgccctgtaccgctacttcgtggagctctggatctacttggggctggcctggctgtccctttttgtcaactggaaggtgagcatgtttgtggaagtccacaaagccattaagaagcggcggcggcgacggaaggagtcctttgagagctccccacactcccggaaggccctgcaggtgaaggggagcacagcctccaaggacgtcaacatcttcagctttctttccaagaaggaagagacctacaacgacctcatcaagcagatcgggaagaaggccatgaagacaagcgggggtggggagacgggcccgggcccagggctggggcctcaaggcggtgggctcccagcactgcccccttccctggtgcccctggtagtctactccaagaaccgggtgcccaccttggaagaggtgtcacagacactgaggagcaaaggccacgtatcaaggtccccagatgaggaggctgtggcacgggcccctgaagacagctcccctgcccccgaggtgttcatgaaccagctggaccgcatcagcgaggaatgcgagccatgggacgcccaggactaccacccactcatcttccaggacgccagcatcaccttcgtgaacacggaggctggcctctcagacgaggagacctccaagtcctcgctagaggacaacttggcaggggaggagagcccccagcagggggctgaagccaaggcgcccctgaacatgggcgagttcccctcctcctccgagtccaccttcaccagcactgagtctgagctctctgtgccttacgaacagctgatgaatgagtacaacaaggctaacagccccaagggcacatga

SEQ ID NO: 140952 - DNA, 2346 bp, Homo sapiens
atgcctttgatgaaggctgtacattgccaagaagagatttgtgtcatcattctgctagaatgtggcaccaacccagatcttatggatgtctatagcaacaatgcactacactatgctgtgtataatgagaatacactactggcagaaaaactgccctcacaccatgtgaatactgaagtgctgaacaaggatactgaagtgctgaacaaggatgcaaacacaccacttttacttgctatagtttgcaaaacacagcaaaagcctaccatggaaatgaaagattctgttgtgaagaaagcaatagaaaggaagaacgaacaaacatccaaagcagaacaagaagtacaagtgacatcagaggaagaacaagaaaagcttgaaagtgaaaataaacagccacaggttgaagaagctagaaagaagcacgaaagaacctcgaaagggaaaaaggacattgaaattgttaaagaaatgaatgatgaccttcaagagactataaaactgaatggaaaaacattaacaaaaacagtatcccagtatggtcaacagcttaacgacctcaaaactgagaatacaatgctcaagtctaaactggagaaggaaaatcaaaacaaggaaagactggaagctgaagttgagtcattccatgctagactggctgctgctataaatggtgctcataagaaaggggataatgaacaaaaggtaattaatatccaaggatgctgtcttgagagtgaaaaggaaggtcttctgctagaagggaaaaataaggaattaatcaatgaatgcaatcatttaaaagactgtttcagtatgaaaaagagaaagcagaaggagaagtaccacataccaagttctgagcactatgctttatatgacaaaccatataaagcagaggggggtagcctggataatgatgtgtctagagcaggatttctcagccttggcacttttgatgttttgggccagaaaatcgttgtgggggttgtcctgtgtctcgtggtatctgatgctgcaggacagggtgtggccatcacagggaaccagaccttcaacaactggaactggcccaatgcaatgatttttgcagcgaccgtcattaccaccattggatatggcaatgtggctcccaagacccccgccggtcgcctcttctgtgttttctatggtctcttcggggtgccgctctgcctgacgtggatcagtgccctgggcaagttcttcgggggacgtgccaagagactagggcagttccttaccaagagaggtgtgagtctgcggaaggcgcagatcacgtgcacagtcatcttcatcgtgtggggcgtcctagtccacctggtgatcccacccttcgtattcatggtgactgaggggtggaactacatcgagggcctctactactccttcatcaccatctccaccatcggcttcggtgactttgtggccgtgcaacagacctatgttgggggtgccctaggtgtgaaccccagcgccaactaccacgccctgtaccgctacttcgtggagctctggatctacttggggctggcctggctgtccctttttgtcaactggaaggtgagcatgtttgtggaagtccacaaagccattaagaagcggcggcggcgacggaaggagtcctttgagagctccccacactcccggaaggccctgcaggtgaaggggagcacagcctccaaggacgtcaacatcttcagctttctttccaagaaggaagagacctacaacgacctcatcaagcagatcgggaagaaggccatgaagacaagcgggggtggggagacgggcccgggcccagggctggggcctcaaggcggtgggctcccagcactgcccccttccctggtgcccctggtagtctactccaagaaccgggtgcccaccttggaagaggtgtcacagacactgaggagcaaaggccacgtatcaaggtccccagatgaggaggctgtggcacgggcccctgaagacagctcccctgcccccgaggtgttcatgaaccagctggaccgcatcagcgaggaatgcgagccatgggacgcccaggactaccacccactcatcttccaggacgccagcatcaccttcgtgaacacggaggctggcctctcagacgaggagacctccaagtcctcgctagaggacaacttggcaggggaggagagcccccagcagggggctgaagccaaggcgcccctgaacatgggcgagttcccctcctcctccgagtccaccttcaccagcactgagtctgagctctctgtgccttacgaacagctgatgaatgagtacaacaaggctaacagccccaagggcacatga

SEQ ID NO: 140953 - DNA, 768 bp, Homo sapiens
atggccctaagggtatatacactgcctcagctgccttgggcttcatgcctgggctcctccaccagggccagccccaataggtctttagttcgaggtagaggttctgctgttatttcccaggcttcgaagtacaagtcttccctgaacctacctccagtgggagcccgcctccagcggcaggatggagggatcataacctgtctagagcagcttcatgaaaaaatcaacgagatgaggaacgtgttcaactcgctggagaacaaggtatctccctgggataaaaaagaagaagctaaccagaaaaagctggaatttgcattcgcaaacagtgattatctggcccttctacaagcgtataaggagacaaaaaatacacagtggaagtcgaaacagacttttattttagaaagtattcttgataatgtgttcaaagactgccctggctacagcccaggactggcagtaaatacaaccagctttggggaggaatctccctctggggaatgtggaatcacagatgctgacagcccaaaggaggcactggaaacaggatttactacaaagccaatcaagaaaatcatgaaagagattgtagacacggcaaaaagggtggggagtgatgtgtttcaacatatgggtcttagagaaattcaagagctaacagataccacaccagaggaattaacagaagacaaggtggagatagatgcttctgaaccactgccagacagtgagaaagatgcagaacagtgccagaaaacaaactga

SEQ ID NO: 140954 - DNA, 1776 bp, Homo sapiens
atgcgccaatcaccgaagggattcgtatgtgtacaggagagaacgcttgctcgcggcacatcgcagctgtttagagaaggcggaccaggcgatcgtacggagaacgcgagtaagagtgcagagccatacaacgggagcagtgtatggacacaagaaacaattgattcctccgtccttcctctaagtccgtattatccgttaccccctacacgtgatagcattcctagtcttttgttctatccacccaaaagatacattattatctctctagaagaagttttagccatttcgtgcaactttttagtgcacgcgcttaacaagccccagtacgttgcaccccagaggggtaccgagcacgcattcgtaatcatggtcatagctgtttccagtgtgggattgttttccgctcacaattccacacaacatacgcgccgggagcgaaaagtgtcaagcatggggtgcctcatgagtgagccactcacatacaatgcgatggctcacagcgcgctttccagtcgggagacctgtcgtgcacgcagcattaatgaatcggccacccgcggggagaggcgggctggcgaacaggtgccctccgttataagtaaaaatcgcacagccggcaccaaaataggccccccgccccccccaggtagttgggtcgggccccgggggaagcgaggggagtatttatatgcgggggggaagatatccagcagcaccgcgaagcgcacgtgtaaagcattccgccagaagacgcaccctgtcggagaccgaggggcaccaggaatgtgtatgaacgagtgtgacagaatcgcgcccagtagtgtacattctcagtctctgctggtgcgaggagggcacagcgtggagttaccggcactgcgaagaagcagtgttggcgctcgaacagacccaaaccaatccgggaaaacattaatacccgttaattcactcgctctcatggccctgtttaggctattcccaattcgagcactgagctccgcagctagggtctgtccacctaagcatcttccccggcctagcgcaagagagcgcatcctcaccatcatcctcccaaatatcgtcgtgccacagcttgcatctttcgagggatcgcagtctctcccacgatcccgcggcgagagatatttccagtgtacattccaccactctcgtaagtcagaatattggcggatgaagagatcacctccatcaggcgaaaacccacccacgcaaaacccctgcggaataagcttggaaaacagcaaaatccttacgttcccaagaggctttcgtaaatcatcggagatagatctcaacagatatcaaggaattggcagttatggggaaattaattctctcagaggcagtaaacgtttacgtgtactctatgagccctggagaatgaatccgaagacaagactgtctgatgatcagatttatcacgatgtcattgatcacttattatgtgaactgtatatcacgaggatcaagaaattgggcttgaactgtgctccactcacttctatggagctgccaagtgcccagaaatttcagacacatccacctcactggagctcgagcattggtgctctcagcatgagtccattgctatcagctgtacatacagcagcaattaaaacttctcgtcgaagctcatcacgctcaaacttcaagaaaattacattgcacgcagaagaacttcagtctattttgccttcaacaggaattaatttattagatgaagaattccacgaagattgtgacagacactag

SEQ ID NO: 140955 - DNA, 426 bp, Homo sapiens
tgctggcagcgctggaaactgggtggacggcatgggttggtctcaggatttgttccgcgccttgtggagatcgctgtcaagggaagtgaaagagcacgtgggcacggaccaattcgggaacaaatactactacatcccgcagtacaagaactggagaggacaaactattcgagagaaaagaattgtagaagcagcaaataaaaaagaagtagactatgaagcaggggatattccaacagaatgggaagcttggattagaagaacaagaaagactccacctactatggaggaaatactaaagaatgaaaaacacagagaagaaatcaaaataaaaagccaagatttttatgaaaaagaaaaactcctcactggtctctttactaaggaaaggaagaaccctcagtggctcccagcagcactggtaaa

SEQ ID NO: 140956 - DNA, 505 bp, Homo sapiens
gcatgggttggtctcaggatttgttccgcgccttgtggagatcgctgtcaaggacaaactattcgagagaaaagaattgtagaagcagcaaataaaaaagaagtagactatgaagcaggggatattccaacagaatgggaagcttggattagaagaacaagaaagactccacctactatggaggaaatactaaagaatgaaaaacacagagaagaaatcaaaataaaaagccaagatttttatgaaaaagaaaaactccttagtaaagagaccagtgaggaactcctgcctccaccagttcaaactcaaattaaaggccatgcctctgctccatactttggaaaggaagaaccctcagtggctcccagcagcactggtaaaacctttcagccaggatcctggatgccacgagatggcaagagccacaatcaatgaatgcattatggtcaaatcttttcatgtatatggatgtgactattttaacaaataaaagaagtgaaaagtt

SEQ ID NO: 140957 - DNA, 1006 bp, Homo sapiens
gggatgtcgataccgctggtccatgaaccacactttgaaaaacaaagctgtagctaccaatgagagccctctggattctactgccagggtggaggggtgggcgagtgtgaagaagccccctgtgcaggaatggcaaaagaatggacttagtactggatcctgggctggggtggaggaggaggcgccactgcagatccagtatggtgagagttcctacattgacaaagaagttggactagaggcactccagggcccactgagatccatgcagatacagcagactttccttcctgcattcacgctcctcacgatgaatctcatggcttccaccagaatcctcaaaaccacagcacatcagtttgctagcttgcacaaaaggtgtgatctcaaccctggggctgatggcgcagaagtgagcatgaacgacagctcacgttctggtggccttgtgggaaaggatttgttccgcgccttgtggagatcgctgtcaagggaagtgaaggagcacgtgggcacggaccaattcgggaacaaatactactacatcctgcagaacaagaactggagaggacaaactattcaagagaaaagaattgtagaagcagcaaataaaaaagaagtagactatgaaacaggggatattccaacagaatgggaagcttggattagaagaacaagaaagactccacctactatggaggaaatactaaagaatgaaaaacacagagaagaaatcaaaataaaaagccaagatttttatgaaaaagaaaaactccttagtaaagagaccagtgaggaactcctgcctccaccagttcaaactcaaattaaaggccgtgcctctgctccatacttcggaaaggaaaaaccctcagtggctcccagcagcactggtaaaacctttcagccaggatcctggatgccacgagatggcaagagcacaatgaatgaatgcattatggtcaaatcttttcacgtatatggatgcgactattttagcaaataa

SEQ ID NO: 140958 - DNA, 450 bp, Homo sapiens
ttaggccgccatctttgctgtttcggtgacatagccattccaggctccgggctttggagagtccaagttgaccaggggtggaagcggtatcccagcacagcacagctgctctatgaaagcatagctagactgcttctttaagcaggtctctgatcctgttcctccttcccattctgttggaatatcccctgcttcatagtctacttcttttttatttgctgcttctacaattcttttctctcgaatagtttgtccattttcattaaaatggtaagaatgaataaatgtacagtaacaatctgaactgccaactggtaaatctgcacttgtgacaactgaatgtctttgagactgaccatttaaaggcatgatctctgtcaaccagggctgaatgaggatcacattttcccttttctctggtgtccaggcgctaatacagactacttccat

SEQ ID NO: 140959 - DNA, 475 bp, Homo sapiens
aattcgggaacaaatactactacatcccgcagtacaagaactggagaggacaaactattcgagagaaaagaattgtagaagcagcaaataaaaaagaagtagactatgaagcaggggatattccaacagaatgggaaggaaatactaaagaatgaaaaacacagagaagaaatcaaaataaaaagccaagatttttatgaaaaagaaaaactccttagtaaagagaccagtgaggaactcctgcctccaccagttcaaactcaaattaaaggccatgcctctgctccatactttggaaaggaagaaccctcagtggctcccagcagcactggtaaaacctttcagccaggatcctggatgccacgagatggcaagagccacaatcaatgaatgcattatggtcaaatcttttcatgtatatggatgtgactattttaacaaataaaagaagtgaaaagttatttaccttgtaaaa

SEQ ID NO: 140960 - DNA, 440 bp, Homo sapiens
ggtggacggcatgggttggtctcaggatttgttccgcgccttggggagatcgctgtcaagggaagggaaagagcacgtgggcacggaccaattcgggaacaaatactactacatcccgcagtacaaaaactggagaggtgaggtggcggcgtgggcagcgattgcgtggtcagtgattgcgaggacaaactattcgagagaaaagaattgtagaagcagcgaataaaaaagaagtagactatgaagcaggggatattccaacagaatgggaagcttggattaaaagaacaagaaagactccaccctttatggaggaaatactaaagaatgaaaaacacagagaagaaatcaaaataaaaagccaagatttttatgaaaaagaaaaacttcttagttaagaaaaccaggagggactctctgcctcaccagttcaaactcaa

SEQ ID NO: 140961 - DNA, 1386 bp, Homo sapiens
gtgggaactcttcgagataagcactatgtcttatggttctccatcctgtccccaacacagggcctggcctatcacgctctcaggggatgtcgataccgctggtccatgaaccacactttgaaaaacaaagctgtagctaccaatgagagccctctggattctactgccagggtggaggggtgggcgagtgtgaagaagccccctgtgcaggaatggcaaaagaatggacttagtactggatcctgggctggggtggaggaggaggcgccactgcagatccagtatggtgagagttcctacattgacaaagaagttggactagaggcactccagggcccactgagatccatgcagatacagcagactttccttcctgcattcacgctcctcacgatgaatctcatggcttccaccagaatcctcaaaaccacagcacatcagtttgctagcttgcacaaaaggtgtgatctcaaccctggggctgatggcgcagaagtgagcatgaacgacagctcacgttctggtggccttgtgggaaagccctgcccctccatctgtaagatctttgatctcacaaacatattctgtgcccttccagagaatgacatcaccaagtgtgccctctgtcctgtcacttggagctcctggaagcacagaatgtccctcagcctggacactgcccctggcctggggagggggtccctgcagccaccatcaggaaagctcccaccctggggacagtctctcctgcctcctgttcttcctggggtcaaagacgtgctcctgctcaagggtgagcaggatttgttccgcgccttgtggagatcgctgtcaagggaagtgaaggagcacgtgggcacggaccaattcgggaacaaatactactacatcctgcagaacaagaactggagaggacaaactattcaagagaaaagaattgtagaagcagcaaataaaaaagaagtagactatgaaacaggggatattccaacagaatgggaagcttggattagaagaacaagaaagactccacctactatggaggaaatactaaagaatgaaaaacacagagaagaaatcaaaataaaaagccaagatttttatgaaaaagaaaaactccttagtaaagagaccagtgaggaactcctgcctccaccagttcaaactcaaattaaaggccgtgcctctgctccatacttcggaaaggaaaaaccctcagtggctcccagcagcactggtaaaacctttcagccaggatcctggatgccacgagatggcaagagcacacaatcaatgaatgcattatggtcaaatctttatcatgtatatagatatgactatattaacaaataaaagaagtgaaaagttaaaaaaaaaaaaaaaaaa

SEQ ID NO: 140962 - DNA, 585 bp, Homo sapiens
atggagttgcttaaaaggcatccttctgctcttcctaagccggcgctcggcaagttctcccaggagaaggccatgttcagtacgagcgccaagatcgtgaagcctaatggcgagaagccggacgagttcgagtcccgcatctcccaggctcttctggagctggagatgaacttggacctcaaggctcagctcagggagctgaatattatggcagccaaggaaattgaggttggtggtggtcagaaagctatcataatctttgttcccgttcctcaactgaaatctttccagaaaatccaagtccggctaccaacttggaaaagctgtacaaaatataagcaaaagcatcccaggagccatactctgacagctgtgcacgatgccatccttgaggacttggtcttcacaagcaaaattgtgggcaagagaatccgcgtgaaactagatggcagccggctcatgaaggttcatttggacaaagcacagcagaacaatgtggaacacaaggttgaaactttttctggtgtctataagaagctcatgggcaaggatgttaattttgaattcccagagtttcaattgtaa

SEQ ID NO: 140963 - DNA, 742 bp, Homo sapiens
cggcgctcggcaagttctcccaggagaaagcccatgcttcagttcgagcagccaagatcgtgaagcccaatggcgagaagcccggacgagttcgagtccgggcatctccccaggctcttttggagctgggaaatgaactcggaccctcaaggcttcagctcagggaacctgaattattacggccagcctaaggtaaattgaaagttggtggttgttcggaaaacctatccataaacttttgttccccgttccctcaaactgaaaatcttttccagaaaatccccaagtccgggcctagtaccgcgaattggagaaaaaagttccagtggggaagccatgtcggtctttatcgccctcagaggagaattctgccttaagcccaacttcggaaaaagcccgtacaaaaaaataagcaaaaagcgtcccccagagcccgtactctgacagctgtgcacgatgcccatccttgaggacttgggtcttccccaagcgaaaattgttggggcaagagaatcccgcgtcaaacttagatggcagccggcttcataaaggttcatttggacaaaagcacagcagaacaatgtggaacacaaggttggaaactttttctggtgtctataaggaagctcacgggcaaggatgttaattttgaatttcccaggagtttcaattgtaaacaaaaatgacgtaaataaaaagtatatattcacagtaaaaaaaaaaaaaaaaaaaaaagtcgagc

SEQ ID NO: 140964 - DNA, 404 bp, Homo sapiens; identical to SEQ ID NO: 114867
  misc_feature (1)...(404): n = a,t,c or g

SEQ ID NO: 140965 - DNA, 2628 bp, Homo sapiens; identical to SEQ ID NO: 134003

SEQ ID NO: 140966 - DNA, 400 bp, Homo sapiens
gtgattaaaagctttattgctcacacaaagcctgtttggtggtctcctcacacagacacgcatgaaatttggtgctgtgactcggatcgggggacctcccttgggagatcaatcccctgtcctcctgctctttgctccatgaaaaagatccacctacaacctcgggtcctcagacccaccagcccaaggaacatctcaccaattttaaatcgggctgctcatcgccatgccgagctaagtcccaattcttcctcagtctctgctcctccaccctataatccttctatcacctcccctcctcacacctggtctggcttacagtttagttccacgactagctcttccccaccttcccaacaatttcctcttagagaggtggctggagctgaaggcagtcagg

SEQ ID NO: 140967 - DNA, 277 bp, Homo sapiens
atgttgctcacacaaagcctgtttggtggtctcttcacacggatgcgagtgaaatttggtgctgtgactcagatcaggggacctcccttgggagatcaatcccctgtcctcctgttctttgctcggggaggggcaagtaccctaaccccatatatctctgtgccccgatcccttatttctgtgccccaacctcttatatctctgtgccccaatcccttatttctatgccccgacctcgtatctctgtgccccgacccctttcccacttttctggagg

SEQ ID NO: 140968 - DNA, 630 bp, Homo sapiens; identical to SEQ ID NO: 119353

SEQ ID NO: 140969 - DNA, 384 bp, Homo sapiens
atgcagcaagaagaccctgaagaaagtaccaaaagccccaacccaacgaccaataaaaaacaagaaaagaaacttagcctgtttggtggtctcttcacatggacgcgtgtgaaattcggtgccgtgactcagattgggggacctcccttgggagatcaatcccctgtcctcctgctccttcaacgtttattctccaaaggatatcgggtatccccatccaaagctcaaatttcttctccatccgttacctacctcaatagtgtctccttaataaaaactcttctcaagaccactttacttccaaaggaagctggagtcattcactgcaagggccatcaaaaggcatcagatcccattgctctgggcaacacttctgctgataag

SEQ ID NO: 140970 - DNA, 1359 bp, Homo sapiens
ttatatcatgaaggcttccataaagaggaactttaactgtgaaaatacaagcctctgcttggaaatagggagctgtttttctggacatttggctttcctgttacttctaagatgctctctgaggtgcactgcctccacagcccgtgtggttatgacatttgatctattattttcagtgctttgagacactgaaagggcctgtggctccggatcccagagttggggagttttaagaggtttagaagcctggccgtcaatacccacagcagttatggagacaagggaaacaggcccttgaaaagaaggtaatgtggagtgggtagcctccgtattgactaagaaggggacggacttatcctccactgtgagagttacccagagcgtctgtgatggtcctgtaggcttccgaggcaattgggcggtgtcagtcttcagcttgctgttttggttactgtagccttgtagtattgtttgaagttgggtagtgtgatggttccagctttgttctttttgcttaggactgtcttggctatatgggctcttttttgcttccacaggaattctaaagttgttttttttaattctgttgtttcctgactttttaatgatcgccattctaactggtgtgagatggtatctcattgtggttttgatttgcatttctctgatgaccagtgatgatgagcattttttcatgtgtcttttggctgaataaatgtcttcttttgagaagtgtctgttcatatccttggcccacttgttgatggggttgtttgtttttttcttgtaaatttgtttgagttctttgtagattctggatattagccctttgtcagatgagtaggttgtgaaaatgttctcccattttgtaggttgcctgttcactctgatggtagtttcttttgctgtgcagaagctctttagtttaattagatcccgtttgtcaattttggcttttgttgccattgcttttggtgttttagacatgaagtccttgcccatgcctatgtcttgaatggtaatgcctaggttttcttctagggtttttatggttttaggtctaacgttcatgtctttaatccatcttgaattaatttttgtataaggtgtaaggaagggatccagtttcagctttctatatatggctagccagttttcccaacaccatttattaaatagggaatcctttccccattgcttgtttttctcaggtttgtcaaagatcagatagttgtagatatgcggcgttatttctgagggctctcttctgttccattgatctatacctctgttttggtaccagtaccatgcttttttgattactgtagccttgtagtatagtttgaagtcaggtagcat

SEQ ID NO: 140971 - DNA, 2146 bp, Homo sapiens; identical to SEQ ID NO: 119355

SEQ ID NO: 140972 - DNA, 1503 bp, Homo sapiens
atggcagctgaatctacggtatccatttctgactccacaagactgtcagtctcaccactgaataatataagacctgagtttgccaagtctcttgctaacattccagatggaggaaaactgccaccatatctaatttatcatcatcacatcatcatcaccaccatcatcatgatcattcatggtcatcatcattcatcatcactcatggtcacatcatcatcaccatcatcatgttcattcatggtcatcatcatgctcatcatcatgtgctcatcatcacatcatcaccatcatcatcgtcagctcatcgtcatcatcatcgtcatcatcatcgcgtcatcatcacatcatcatcaaccatcatcatgctccagtccatgtcatcatcatgctcatcatcacactcgtcatcattcatcatcatcacccatcatcatcgtcaccaatcgtttctatttcattgctgctaagttttctctcatccctgaactagtggcttcccactatggtccatctaccctgggcccaagccccaagagctccttggaaaaatggacaattgttgtactgcaagaggagcctgaagtatctgatggcaccagaagcctgtttggtggtctcttcacatggacgcacatgaaatttggtgccgtgactcgctctttgctctgtgaaaaagatccacctatgacctcgggtcctcagacccaccagcccaaggaacacctcaccaattttaaatcggggccacatggagaacttccaggttttcgtcaggaagcagaagcaggaaccaggagaaagcctagtccagagcttgatagggatttccgtgggaaagtcaaggcagagagaggcggaattgttggtgcactcgcctatctagaatcaagtgctgctaatacagataagctgcttgaagaaacttcctttgtttcacaaggccttccctcctgccaagaaagtgaagacgaatatgcatctgtttggaaatctcccaaatgcatgtgcaaaatgggccaagcagctttcattgccaaatattcggaggagccctgtcacagcctcatgcagaggacttcagtattagggcgaaggcacctgcagacaatgccgggaagagaggagggggaaaggaggatatttctggcaaatgtcagcaagactgggaaagtcctcaggtgcttattgtttgtaagtgaacgagcctccatcggatgggttgctgctgccctcgccaaggcatgttactgcacgcagtttgccttggctggaagttgtggttactgctgcttctcctgctccctgctggatgatcctgggttcttatgggcacaagatcgggggtggggcaggccatgggtggttttggaaaaggcaacattggagcagggaaacagggataagtcatacaaagaggtgcaagagggtgagaagagaggcctcaaaggaaaccagtctgccagcaacttgatcttagaattacagcctccaggaccatag

SEQ ID NO: 140973 - DNA, 1650 bp, Homo sapiens
tcagttggaagtacaagtccagtccatgccatctcctctgaaactgccttccacctgagccccagcaaagtgtgggcctggacagccaggtgtcctcagcccattggaacagggcacctgaccctggactagcaaatgcatgggctgggctaagccaattagattctttctctcagaaatggagacagaattagtgggtggatgttgtgtacttgagtcagggtggaagcagctgatccgatttaaaattggtgagatgttccttggactggtgggtctgaggacccgaggtcgtaggtggatctttttcatggaacaaagagcaggaggacaggggattgatttcccaagggaggtcccctgatccgaatcacggcaccaaatttcacttgcgtccgtgtgaagagaccaccaaacaggctttgtgtttggtgcaataaagcttttaatcacctgggtgcaggtgggctgagtcctgggaagcacaaggggtcggggaactacctcccctagccaagggaagccatgagaaactgtgctatgagggatggtgctatctagcctagatactacacttttcccgtggtcttcacaacctgcagaccaggagattcccttagtgcctataccactagggccctgggtttcaagcacaaaactgcgcagccatttgggcagacaccaagctagctgcaggaattttttctcataccccagtggcacctggaacgccagtgagacagaaccatttactcccctgggatgctccagcttggtcgggggaggagtgtctgccattactgaggcttgtgtatgtggttttcccctcacagtgtaaacaaagctgccaggaagtttgaactgggcagagcccaccacagctcggcaaagcctttgtagccagactgcctctttagattccttctctctgggcagggcatctctttttggagcaccctgtttattgctgtgggtgtgtgacagctggaagacagggctcatggaaaggtcaaaggaggcatgggcacccattccccttgcccctgttgttgctgcagatggtatgttgctcaatatcatatcagtatgactacccggaatcctccttcctcctcctgtttctctccagcctgtgcagtgcagggaagagcactggctctcatgccatactgctggggtctgcttttgtgcttccccacctggtggctctgagatcttagccaagcactgtaccttcctggggctgctcccatcagccctggccttgggaatgaagtggtcagagaaaatgatctcctcataaatgtctgatgaaaatcggcttgccaccctgggctgctcatcttgtaattctgagtcagaaagtttggggtggggcctgctgatctgtgcatttaaccaagactctgggtgagtctcatgatcacatgagtctcgcaagtcctcattgatgtctgaagctgtctctctggcatactccatagcagaatccatcactctataccctactttatttcttgtccattgatccttgacatcctgcagtcttatttgtgctgtaagattggatccagtcttgctatgctcctcctgcttcatggcttgatggtccagagaagacccattcatgatgagaagtgtgggccacat

SEQ ID NO: 140974 - DNA, 878 bp, Homo sapiens
ctttcctgaagattgaggatggtaagggatataaaggttttactgaataccaggagcctgagaaactgcttgggtgatttgactaataaaggccggtccattatcggacctccactgtgagagttatctaaagcatctgtgatggttcctgtaggcttctgaggcgatcgggcagcatcagtctttagccacttgactgtgcctttaacttgagccacctttttaagaggaaattgttgggcaggtggaggagggctagtcgcagaatgaaactgtaagcccgaccaggtgtgaggaggggaggtgataaaaggattatagggtcggggagcagaggctgaggaagaattgggacctggcttggcctggcgaggagcagcctggggaggagaggaggggtcagatgggtccgtagaaaaggaagattggaaagactcagcaacgcttggagttgggactgatttaaaattggtgagaagttccttgggctggttggtctgaggaccagaggtcgtaggtggatctttctcatggagcaaagagcaggaggacaggggattgatctcccaagggaggtccccccgatccgagtcacggcaccaaatttcatgcgcatccgtgtgaagagaccaccaaacaggctttgtgtgagcaataaagctttttatttcacctgggtgcaggggggctgagtcagtgccacccttcccatcacaggctctgagtgccaagacgtcccagggctgcttcaattttctgctccccatattccagtgcagcatttcttgactaccccagtcatggctcaaatgggccaaggtgcagctcgacctgccacactggaaggtacaagtcataaactgtggtggaatccacat

SEQ ID NO: 140975 - DNA, 858 bp, Homo sapiens; identical to SEQ ID NO: 119356

SEQ ID NO: 140976 - DNA, 1444 bp, Homo sapiens
atgacctctggtcctcagaccaaccagcccaaggaacacctcaccaattttaaatctgcatgctttaaaaggattaaagcctgttatcattcgcctgttacagcatggccttttaaagcctataaactctccttacaattcccccattttacctgtccaaaaaccggacaagccttacaggttagttcaggatctgagccttatcaaccaaattgttttgcctatccaccccatgatgttactaggggagatatcagtcaccaaggccttggctggctccctgataaaagcccttgcagtattccacactgcagaatccccaggctatgctctcctggattcttactacctgctccagaaagggagtgtttgcatctccatcctccaagaagaggaagcattttcttggccggggaaaggagagtgtcgagataagtcctgggcctctctgggcctaatacccgcatttccccagggaggacagtggaaacaggccctggggcttctggaccacagctgcctctgctttggggaattaggcaccaggttggcagccccagcatccttcagcaccttcccaataacaaaccgagagcgggagagaaaaactgacaagctgattccaaaattcatgtggaaatgcaagggacccagaataaccaaaacaatcttggaaaagaatgaagttggagaatttacacttcttgatttcaaaacttaccacaaatttgcagtaatcaaaactatgtggtactggcataaggacagatacattgatcaacagaatgacattgaaagtccagaaataaattcatatgtttatggtcaactgatttttgacaaagactcagcccgcctgcacccaggtgaaataaacagtcttgttgctcacacaaagcctgtttggtggtctcttcatatggacgcgcatgaaatttggtgccgtgactcggattgggggacctcccttgggagatcaatcccctgtcctcctgctctttgctccatgagaaagatccacctacgacctcgggtcctcagaccgaccagcccaaggaacatctcaccaatttcaaatccgtttttacctgaaaactatatcaaattgagtcatcctgtcccgttagactcctacgtgctctgccagtttctcaggttgtccttgtttttaatgaccttaacagttttaagaagcactagtcagggcaaaacgacagctgtgcttcaccattctggggtacttgctgtcaatgcacctgccctcacagtctgggacactgccaagccccaccatcccaaggactctgtgcagtatgcaggccaggaatccctcaggctgtgggtttccacatgtgcttctgcatggaaagctcccctggctgctgcaggatgtcctttgcagagccccatcctgtcctccttatcgcagctgcaggcagcctga

SEQ ID NO: 140977 - DNA, 2904 bp, Homo sapiens
atgtggaaaggccccaaaggattagacatgtatggaaagagctcagtgagccctaagacatcagatatactggggagagacactctcctgctggccttgaaggtgcaaacagtggtgttgcaaactgcctgtggagagggccatgtggcaggaaactgtgggaggcctctagaaactgaaggcagtctccagctgacagctactaagaagctaagggactcagtcctgcaaccaaaaagtcctgaattctgccaacaatttacaagagcttggaataggacccaagttccagatgagactgaagccccagctggcacctatgcagcccaatcgggggacctcccttgggagatcaatcccctgtcctcctgttctttgctccatgagaaagatccacctacggcctcaggtcctcagaccgaccagcccaaggaacatctcaccaattttaaatcgggtttcagaggtgtcagaccacgcagggacgcctgccttggtccttcacccttagcggcaagtcccgcttttctggggaaggggcaagtaccccaaccccttctctctgtgtctctaccccttctccgcctttctggggggcaagaaacacccaaccccttctccttcaccctgagtggcaagtccgcttttctagaggagcaagtaccccaacctcgtatctctgtgccccagtcccttatttccacgccccgacctcttatctctgtggcccaatcccttatttctgcaccccaacctcttatatctctgtgccccaatcccttatttccatgccccgacctcttatctctgcaccccaaccccttatttccacgacccaacccctttcccgcttttctggaaggagcttgctacaagtgccagaaatctggccaccaggccaaggaatgcctgcagcccgggattcctcctaagctgcgtcccatctgtgcgggaccccactggaaatcggactgtccaactcacctggcagccactcccagagcccctggaactctggcccaaggatctctgattgactccttcccagatctcggcttagtggctgaagactgatgctgcccaatcaccttggaagcctacaggaccatcacagatgctttgggtaactcttacagtggaggcacgctttaaaaagattaaagcctgttatcacttgcctgctacagcatggccttttaaagcctatcaactctccttacaattcccccgttttacctgtcctaaaaccagacaagccttacagctccttcagctatactcactctttattgagtctcccacaattaccattgttcctggcccagacttcaatccagcctcccatattattctggataccacacctgacccccatgactgtatctgtctaatccacctgacattcactccatttcctcttatttccttctttcctgttcctcaccctgatcacacttggtttattgatggcagttccaccaggcttaatcgttgctcaccggcaaaggcaggctatgctatagtatcttccacatctgtcattgaggctaccagtctgccccactgcactacctctcagcaagccgaacacattgccttaactcgggccctcactcttgcaaagggactacgcgtcaatatctctactgattctaaatatgcctttcatattctgcaccaccatgtggtcatatgggctgaaagaggtttcctcactacacaagggtcctccatcattaatgcctctttaataaaaactctgctcacggccgctttacttccaaaagaagctggagtcattcactgcaaggggcatcaaaaggcgtcagatcccattgctttaggcaatgcttatgctgataaggtggctagacaagcagctagctctccaacttctgtccctcacggccagtttttctccttcacttcggtcactcccacctactcccccactgaaacttccacctatcaatctcttcccacacaaggcaaatggttcttagaccaaggaaaatatcttcttccagcctcacaggcccattctattctgtcgttatttcataagctcttccatgtaggttacaagccgctagcccgtctcttagaacctctcatttcctttccatcatggaaatctatcctcaaggagatcacttctcagtgttccatctgctattctactacccctcagggattgttcaggcctcctcccttccctacacatcaagcttggggatttgcccctgcccaggactggcaaattgactttactcaacatgccctgagtcagataactaaaatacttcttagtctaggtagatactttcactagataggtagaggcctttcctacagggtctgagaaagccaccacagtcatttcttcccttctgttagacataattcctcagtttagccttcagcacctcaatagagtctgataacagatgagcctttattagtcaaatcaggcaagcagtttctcaggcctttggtattcagtggaaccttcatatcccttaccgtcctcaatcttcaggaaagctagaacggactaatggtcttttaaaggcacacctcaccaagctcagcctccaactaaaaaaggattggacagtacttttacctcttgctcttctcagaatcagagcctgtcctcgagatgttacagggtacagtccatttgaacttttatatggacgcactttcttgcttggccccaacctcatcccagacaccagccctctaggcgactatcttccagtcctccagcaggctagacaggaaatttgccaggctgctaatcttctcttgcctactccagatccccagccatatgaagacaccctagctggacgatcagttcttgttaagaatctgacccctcaaactctacaaccttga

SEQ ID NO: 140978 - DNA, 1578 bp, Homo sapiens
ctaagccaagatctgggaaggagtcagagagccttgggccagagttccaggggctctggaagtggctgccaggtgagttgaaccgtccgattttcagtggggtcccacacagatgggatgcggcttaggaggaatcccgggctacgggcattccttggcccagtggccagatttctggcacatgtagcaagctcctgatttaaaattggtgagatgttccttgggctggtgggtctgaggacctgaggtcataggtgaatctttttcacggagcaaagagcaggaggacaggggattgatctcccaagggaggtctcccccgatccgagtcacggcaccaaatttcatgcgcggcaccaaatttcatgcgcgtccgtgtgaagagaccaccaaacaggctttgtgtgagcaacaaggctgtttatttcacctgggtgcaggtgggatgagtccgaaaagagagtcagtgaagggagataggggtggggccattttataggatttgggtaggtaatggaaaattacagtcaaagggggttgttctctggctggcaggggtgggggtcataaggtgctcaatgggggagattttgagccagaaggaatttcacaaggcagtgtcatcagttaaggcaggaacaggccattctcacttcttttgtgattcttcagttacttcaggccatctggatgtatacccgatttaaaattggtgagatgttccttgggctggtgggtctgaggacccgaggtcgtaggtggatctttttcacggagcaaagagcaggaggacaggggattgatctcccaagggaggtccccccgatccgagtcacggcaccaaatttcattcacgtccgtgtgaagagaccaccaaacaggctttctgtgagcaacatggctgtttatttcaccttggtactttgggtgctcttctgggttgacagaggtggctccatcagctttccaggccttcacttgggtgtaatgaatccaagagtctattccagtgacctccactgccataggagtagaaagaaatacagtgtaaggtccctcccaatctgggcctaggtgtaagatctggtaaaggcttttaagaattttccatttgttcgcaactggtagataaaagcttgccatcctccaattgtagccattctggggactgaaaaatatgtccctgagagatggcccattctgtttctgcagcttcctctcaatatcaggggctgcctgagtaataaatttatcctttaggattaattgtccctcgactaaatcaggagatagagacatgtgctttaccaaggcccctcttagccgttccagaaaatcagtaggattctcatccattccctggtcgtgagggtctgcagcttcattcctgaagtcagcgagaccacgaacccactgggaggaacaaacaactctgggtgtgccacctttatgagctgtaacactcactgcgaaggtctgtggcttcactcctgaagtcagtgagaccacaaacccactggaaggaagaaactctggacacatctgaacatctgaaggaacaaactccagacacaccat

SEQ ID NO: 140979 - DNA, 1187 bp, Homo sapiens
gtggcggtggggggttcagtccacgttcaaagagccagaaacctggcaggggaagagatggggcagtgacacccaaccggaaaaataaaggaaactacaagaagaacccagctaagagatgtgaggcttctgaaagctcccatggaaaggttcgcagctcctccacctgctcggtccagctgccccaggtcaaggaagctctcaaaacaattcacatcaaggtaattgatgatgaggcatatgagaaaaacaagaattacttcattgagatgatgggcccccgcatggtggatatgagttttcagaaagatgtgacagacaggaagctgactatggaagaagaggaggccaagaggatagcagagatgggaaagccagtattgggtgaacaccccaaactagaagtcatcattgaagagtcctatgagttcaagactacggtggacaaactgatcaagaagacaaacctggccttggttgtggggacccattcctggagggaccagttcatggaggccatcaccgtcagtgcagcaggggatgaggatgaggatgaatccggggaggagaggctgccctcctgctttgactacgtcatgcacttcctgactgtcttctggaaggtgctgtttgcctgtgtgccccccacagagtactgccacggctgggcctgcttcgccgtctccatcctcatcattggcatgctcaccgccatcattggggacctggcctcgcacttcggctgcaccattggtctcaaagattcagtcacagctgttgttttcgtggcatttggcacctctgtcccagatacgtttgccagcaaagctgctgccctccaggatgtatatgcagacgcctccattggcaacgtgacgggcagcaacgccgtcaatgtcttcctgggcatcggcctggcctggtccgtggccgccatctactgggctctgcagggacaggagttccacgtgtcggccggcacactggccttctccgtcaccctcttcaccatctttgcatttgtctgcatcagcgtgctcttgtaccgaaggcggccgcacctgggaggggagcttggtggcccccgtggctgcaagctcgccacaacatggctctttgtgagcctgtggctcctctacatactctttgccacactagaggcctattgctacatcaaggggttctaa

SEQ ID NO: 140980 - DNA, 2926 bp, Homo sapiens; identical to SEQ ID NO: 136803

SEQ ID NO: 140981 - DNA, 1128 bp, Homo sapiens
atggacactgcttgtccctccttcaatgagccaaatgggccagcacagcactgggccagagacacagcctcgggcgatggacttgagggcacagtcctcatggagacagaggcctaccttggccatgggagtcaagggccctgggatgcttatgccatgggatgggaagaagaggcgaagtcacccactctgaatgcaggagataaggatctggagaacctgctgcccccaaatgcaggtgctccaagaagatgtggaagtggaacaggtgataccaccactcaccagaaaacagggaccaatgggccagatgggctactgctctttccctgggcaaaaatgagaaagtggttggaaagggaactcaaggatgtgagaactgcctgcaaaaaggcagctttcagcttgttttcacttcttttgggagggaacatgcagcctggcatttatctctcctcgccagcgaatgtcaatcaggaatcaaaaagccaaacagaggaggctttgaacggtgtcatcgggggtcgaagtgacttccagctgtctgtccataatcatgcagttacctcagatgtccctttccctctagccacaggtggcggtggggggttcagtccacgttcaaagagccagaaacctggcaggggaagagatggggcagtgacacccaaccggaaaaataaaggaaactacaagaagaacccagctaagagatgtgaggcttctgaaagctcccatggaaaggttcgcagctcctccacctgctcggtccagctgccccaggtcaaggaagctctcaaaacaattcacatcaaggtaattgatgatgaggcatatgagaaaaacaagaattacttcattgagatgatgggcccccgcatggtggatatgagttttcagaaagcttttactactacttacatcttccaacttcgcaaagtccaggttttgacaagtggcattttcctgaagtatttttgcttagaatatactgggtctgacacattggcacctgagtgtgagaggagaaaatgtatttatgtcgatgcagaaagcctaaagatccgtgggcagtttcgtgatgacatcttatgtctgtttatttgtgtgtttgtgtgcgtgttttaa

SEQ ID NO: 140982 - DNA, 577 bp, Homo sapiens; identical to SEQ ID NO: 136802

SEQ ID NO: 140983 - DNA, 501 bp, Homo sapiens
  misc_feature (1)...(501): n = a,t,c or g
gccggccggnnnaatgagaccccagtttgacangcaagngccgcggaannncttngggaggctgaggtgggcggatcacttgagaccaggagtttgagaccagcttcttgggaggctaaggcagcaggatcgcttgaaccctggaggcggaggttggagtgagttaagattgtgccactgcactccagcctgggtgacagagtgggactctgtctcaaaaacaaaaacaaaaaaccctttaaaagtgtgtgataaacatcagcttgacaaatatgaacccagcacccgtgaagcactggcactatgctgggtgctgagggagatggcatgaacagaaaagagagacacaggcccaaggagggaagtccagtgtttggtgggagatggggatgttaacaatcacacaggtcaggcacggtggctcacacctgtaatcccagcactttgggaggctgaggcaggtggatcacctgaggtcaggagttcaagaccagcctgacn

SEQ ID NO: 140984 - DNA, 352 bp, Homo sapiens
gaaaacaaggccactgggttcaagaagtaataggaaactttgagaaggtgatattcatgaaatgatgggatgagcaaagaattcaagaatgagtggtggccaggcatggtggctcacgtctgtaatcccagcactttgggaggctgaggcggggggatcacctgaggtcaggaattcgagaatagcctggccaacatggtaaaaccccatctctactaaaaatacaaaaattatctagttatggtgggaggctgaggcaggagaatcgcttgaacccaggagtcggaggttacagtgagccaagattgcaccactgcactccagcctgggcgacagagcaagactctgtctc

SEQ ID NO: 140985 - DNA, 621 bp, Homo sapiens
tagcatttgggagtggcgaaaaacaatgtaaaacttatgatgtcactcaccattctgataatgttcagggtgcctttctcctaccaggagagtactgtggcttagaggaaagaaatggtctatcaactgaacatgaaatggagcaggccaagaccttaggacattgggatttttgtgggaggagagtaataggtaattagacactgattgtgtggtagaaatactgcaggggaaaaggtcgccctcttatgcatcaaagagcaatacctgttgtttagcaaagagtgatgaaaaattgatcttgttttgaaattgaagagagaggccaggcgcggtggctcacacctgtaatcccagcactttgggaggctgaggcaggtggatcacctgaggtcgggagttcgagaccagcctgaccaacatggagaaaccccaattgtactaaaaatacaaaattagccgggcgtggtggcaggtgcctgtaatcccagctacttgggaggctgaggcaggagagtgcttgaacccaggaggcggaggttgtggtgagccaagatcatgccactgcactccagcctgggcaacaagaacaaaactccatctaaaaaaaaaaaaaaaaaa

SEQ ID NO: 140986 - DNA, 605 bp, Homo sapiens
  misc_feature (1)...(605): n = a,t,c or g
ttttttttttttttttttttacaggaacacanatttgttgttttaataaaaatacgatttctacaaaaggtgcttaacacggcccaggacgggctgtccggtggagtcagccgtaggacccctgaaggatttacaaagacagagccggctcaccagcacactcctgccagcaccgggacccactgcgaacaaagacagagccggctcccccagcacgctcctgctagccctgggacccactgtgagccactgcggggtgtccttcatttaaaaaaagtctggactgtgacactgcagaaggagtctgaaagcccaattcctgaatccctgcgttagaactgagagttccaggccgggcgcggtggctcatgcctgtaatcccagcactttgggaggctgaggcgggtggatcacctgaggtcaggagttgaagaccagcctgaccaacatgatgaaaccccatctctaataaaaacttgcccgtaatcccagcactttgggaggccgaggtgagtagatcacgaagtcaggagatcgagaccatcctggctaacacggtaaaacactgtctctaataaaaatacaaaaaaattagccaggtgtgg

SEQ ID NO: 140987 - DNA, 556 bp, Homo sapiens
ttttttttaaaatcacaaataatttattcttccgttagagttgatacagttttaaatagcaacaaagtacacagtggtggaaaattggcacagaacctacaagcatttcaatcacaataaggctgtccatgatttatctgttcaaacttgatgtccattttctactgatcaagttgaaagaaaaaacctattctggccaggcacggtggctcacgcctgtaatcccagcactttggaaggccgaggcgggtggatcacctgaggtcaggagttcgagaccagcctggccaacatggcgaaacctcgtctctactaaaagtacaaaaattagctgggtgtggtggcgggtgcctgtcatcccagctactcagggaggctgaggcaggagaactgcttgaacctgggaggcggaggttgcagtgagctgagattgcgccacttgaacttccagcctgggcgaccaagagcaagactccatctcaaaaaaaaaaaccaagaaccaaaaaccaaaaccaaaaaacctgttctgaccttgaaacacacaaacacacactct

SEQ ID NO: 140988 - DNA, 2453 bp, Homo sapiens
cccaggtaatccttatgtcaaggtgaacgtctactacggcagaaagcgcattgccaagaagaaaacccatgtgaagaagtgcactttgaaccccatcttcaatgaatctttcatctacgacatccccactgacctcctgcctgatatcagcatcgagttcctcgttatcgacttcgatcgcaccaccaagaatgaggtggtggggaggctgatcctgggggcacacagtgtcacagccagtggtgctgaacactggagagaggtctgcgagagcccccgcaagcctgtggccaagtggcacagtctgagcgagtactaatcctgttcttctctcctctaatccccgggggccaagctggggagggatgtggaggggaaaaagatgacagagaagtggactccaaacctcattttagttgtagaagaaaatttcttacaaaacaaattccacaaagaacaccctatatgaccacagctgcagatcagttcttagcaatgatgtttttttttctgctttgcaaggcgctagaatcttttattttactttattttttttgaggtggagtttcgctcttgttgcccgggctggagtgcaatggtgagatctcaactcactgcaacctctgccctccaggttcaagtgattctcctccctcagcctcccaagtagctgggattacaggcacccacgagcatgcccggctaattttttgtattttcagtagagatgggtttcaccatgttggccaggctggtctcgaattccagacctcaggtgatccacccgcctcggcctcccaaagtgctgggattacaggtgcgagccaccgtgcccggcctctggttttgttttgttttttttttttaatgggggacaaaagagagggaaagacccctataaaatctatatataacaatgtaaccatatacttgcatgtcttaatacaaactgaagaaattagcctaactgccaatatcaagttggcagattttaatccatggaaattgtgttttgtgctgaattgtatttgctgattacctgaaattggcttctttttattgggcttctctggagaatttctcccactccccacctctgcagaagaaaattttgctcttataaaacctcatgttttcatcattcccatcttttctttttattgcctcttatatctctgctctttgacctcaaggtctagaggtctgcagtaagccaagaaacaaaggtggggtggatgaggcaaggtttgcaggagaaagaggaattgagaaatggggtatttttgctatcagctcttctgctatgaagtagtaaaaggcagtctataattaactgacagacctaactgaagcacagagaatacatcagacttatgcatccaagacatcagaacttggattttatcaaacttgatgacttctctaaaaggagctttggaaacttcaaattcagctataggatagtaccaatgaacacatccagctgatcccaaaagctgttttcaggtataaggacaaggagaggagacaagtgacgacagccattcccctttgcagctatctactgtagtgacagccatttcttggttgatgggttggaagtcatcagaggtttgaagaattacactggcctttgtttttctggaaatgccgaccatggagatgctttagagtcttctcaaatagcttagatgttgtaatgaggttagctttgcttcataaaacaggggccctcagaagttctccttaaatttttcaataaaaatttagctcttaaaaaaataacagtgtgactgagtgaatgaagataagttggattctttcagagcattcttttcctcaaaacgagctgcataattcttggaatttatgtcttaccacatggtggagggatggaggaactacaggatgcaattcttcttctaccaatgggcaatagaggttgagagagattcagcatctttctgggattagaattcaagtctctttactcctacagcagctgtgtctccaacgttgagactttgcagatggcacagactccatggataataggtaaacttggggccgggcgcagtggctcatgcctgtaatcccagcactttgggaggctgaggcgggtggatcacctgaggtcaggagttcgagaccagcctgggctaacatggtgaaacccccgtctctactaaaaatacaaaaaaaattagccaggcttggtggcaggcgcctgtaatctcagctacctgggaggctgaggcaagagaatttgcttgaacccaagaggcggaggttgcagtgagctgagatcgtggcattgcactccagcctaggcaacatcagtgaaactccatctcaaaaaaaagtgcaccaggccaggcatggtggctcacgcctgtaatcccagcactttgggaggctgaggcaggtggatcacctgaggtcaggagttcgat

SEQ ID NO: 140989 - DNA, 396 bp, Homo sapiens
ttatataggagagctctggctggcatcagactggtgcccctctgggacaaagtttccacaggaaggagcaggcagcaatctttgctgttctgcagccttccctgatgatacccaggcgaacagggtctgaagtggacctccagcaaactgcagtggacttgcagaagaggggcctgactttacgggtccaagggccaatggcccccagacaagtatccgagaattctctgtactatctcttcggtttttctgtaaatctaaaactgttctataaaatgtcaggcctctgagccaaagctcagccattataacctctgtgacctgcacacacacatccaggtgccctgcaggagccaagaagtccatcagctccatgacatttccaagaacactcat

SEQ ID NO: 140990 - DNA, 564 bp, Homo sapiens
atcattgcctctacttgggactcttgcccctttgggttttgctggttctgaaatttctgatgcctgtagccaaagtgggacatttgagtgggcttctggaaatccaacattctagaagaaagccaaccaccaaaaacttttgaggaggaggagaaaacttctcctacccctggtaccttttggttggttgtgggtggttttcttccagtcccattgtacctgatgttccacctttttccctcctccttcctgcccaaaaaaagaaacctgctcctcccaaagccagagcccaagcctaaaaaggcccctgcaaagaagggagagaaggtacccaaagggaaaaagggaaaagctgatgctggcaaggaggggaataaccctgcagaaaatggagatgccaaaacagcccaggcacagaaagctgaaggtgctggagatgccaagtgaagtgtgtgcatttttgataactgtgtacttctggtgactgtacagtttgaaatactattttttatcaagttttataaaaatgcagaattttgttttttaaaaaaaaaaaaaaaaaaa

SEQ ID NO: 140991 - DNA, 812 bp, Homo sapiens
  misc_feature (1)...(812): n = a,t,c or g
acttcttggctcctgcagggcacctggatgtgtgtgtgcaggtcacagaggttataatggctgagctttggctcagaggcctgacattttatagaacagttttagatttacagaaaaaccgaagagatagtacagagaattctcggatacttgtctgggggccattggcccttggacccgtaaagaatataaacaccccaacctctcagaagaatagaacagctcaaactactgaaacgacccgcttaacgtacaaaagaacatacgacacgcgttgcgagatcggcgcgcgccaaacacacatgcgaacctacgtcgcacagagacctatgtacgtttcagtggtgtcccccggtgctttgtttgacgacaacaaggctctccctataatccgagcgataaaaaccacaacgtcttcctgttcaaatagaaagtgctttacggaagactcgccatgggccattgctggggccttagtctccagtgctccagagccagtagtgctcgcggcagttgagcgacagggcgaagccctcganagaagggctgaaggacataaagtcaaggtgaaggatgaaccacagagaagatccgcgaggttgtctactaaacctgctcctccaaagccagagcctgagcctaaaaaggcccctgcaaagaagacagagaaggtacccaaagggaaaaaaagaaaagctgatgcaggcaaggaggggaataagcctgcagaaaagagagatgccaaaacagaccaggcacagaaagctgaaggtgctggagatgccaagtggagtgtgtgcctttttgactga

SEQ ID NO: 140992 - DNA, 891 bp, Homo sapiens
gaattctaagaggctagaacgacccccggaccgaccaaagcccgcgcgccgctgycatgcccgsgtkccagcacctacgtcccgctgccgtcgccgccgccaccatgcccaagagaaaggctgaaggggatgctaagggagataaagcaaaggtgaaggacgaaccacagagaagatccgcgaggttgtcgtgctaaacctgctcctccaaagccagagcccaagcctaaaaaggcccctgcaaagaagggagagaaggtacccaaagggaaaaagggaaaagctgatgctggcaaggaggggaataaccctgcagaaaatggagatgccaaaacagaccaggcacagaaagctgaaggtgctggagatgccaagtgaagttgtgtgcattttttgattaactgtgttacttctgggtgactgtacagtttgaaatactattttttatccaagttttattaaaaatgcagaatttttgttttactttttttttttttttttaaaagctatgttgttagccccccagaacacttcattgttgtttttgggggggaagggggcatattgtcactaataggaatgtctcccaaagctgggattgatgtgggaggaaaacaccttttccccttcttagttttgaagagacttcctcttgggctcccgggggggaggggattccctggacttttgacacacatgggccaccttgggcaccaaaagccttgtggtatagaaaaacaaatttgtttttatgtcctcttctccctttccatctttcagcatagacttaactcccttaagcccagacatctgttgagacctgacccctagtcattggttaccagtgtgtcaggcaatctggactttccagtgatgccactgaggatggca

SEQ ID NO: 140993 - DNA, 9486 bp, Homo sapiens
tcagatcaaattatcctttattaaaatgaagcacagtcaagtataggaaaaaaataaaggtaacttcatctctcacatacaaacgtacacaaaaaaaatcaaagacaagtagtatttgccctgttaaagtatgactttctgcatgtttgggggggcactgttaagaggtaatatttcctaaaagatttaagattttttacaaaaaaccccaatcacactacagcttaaaacagaaatatgtcacctgttccacccaccaaaaacctagacatctgtccctatttctccagtttcaagttgcagtaaaaagccctcaaaccccattttagctagtaacccccaaatataattttggcattcttgacatttgtattctctccctccatcaatgtggtacaaacttattgagattattcctttgggtcccttaccattaggaccagtttagataccgcattgtcttgggcttatcaatactgtagtgctcatagcaactctgagacaaatacctggtggcctttatgactggcacttgtgggatacagagaatactattagtcttgtgctttctatgtgtgggtacactaatgtgtgaacacgattttgtgctttctatggactttagctttctatcatggaatataaactgttgtcacgtacctgttctcgatatacctatcaacctacaatggaaacacaacaaaattaagatcacagaacataagtaactttaagtttttaatggatataaaagaaacaacatttaggctacaacacaaatacagaactacctggtttcactgaacctaaataaaggctgcacataaagtatgtcaatgtaatgcatgtttttttttttttttttacttccttcactagttacgacaaaatttaagaggaataacaaatacaaattttctgttaagaacggaaaggtgcaaactagcagagtcaatactggtaaccagaaggcactaatccaaacacataaatttcaaaagctggttatattatggaataccatatatactggcctttgccagtttgggatttctgcaatagcaataagcctcgtttctgtttccaattataacaacaaaaagatgagttactaatgaacattccacttacagaagtctaggctatgttgataaattgaaaacttatctagactactctgtctaagagcaataaaaagtaaacactcttttatccagcagcactaggaaacagggtgaatttaccaagataaattaggttggggatacctactgccaacttgtgcggttgtcgaattcactgtaatatgtattcctcttattgatagagctctgaatgtaaacaacctagaagtgaggggaaaagcttcagtatcatggacaacaattatgttatagtgcttttcagtggtatagagcaaaaccactgttcccacactacgaaaaatctgagaccactgtgttttgtcttgatttgctcgctcttcagctgcttactttattctagcatcctttctcttcaagcaagctgtgaacccaggtaaccaaatttaagagtcattacataaagtacagttattggtttaagtcaatagcctcagactatgtatggtactgcccaaaaagtaaagtgcacaagattagcaatgatacagatataccaaacagtttttgtttatttctgagtgaaagactatatatgccaatggttagggttgttggttactggataaattaggtgcttaccccaaaacaaaaaaactaatccctctttttataaagaagtttagatggaaacagaaacagaaattacatcaattctcacaacattcctttaaaggtgaatcagtaatttaaagccttattctcagcattgaagagagtaaataaaaacatttatatgactactaagtgaataatggtgtgggactcaccactggcaaagccagttaattactttgaaccttaactaaattctctcctaggagtcaaagtagctgaacagctaaagtattccaacaaaggacagtctgacaaaaacattccatattaagtgaccttgatagaagaaaaagatttgcagccctaagttaaccaagtctagcaatcgaaagattaccttttcacaatccagcctcatacgttccagtacaaaagggttcctttatatgccaactaattccaaatttttacttttactgcaaaaaaacctttttggcatcaaaactccattgtttctctgcactctgacaccatcatttcaaaggggctcacataaatgatcactactgctctctccctaatttttgaaaaaggagttttgaggataaaacagtgcttttattattagccaacacaaagtgtgaggaaatcattcctgaggattaacattttaagctaacagaaattcagtatacttaaaacataattatatttaatgagtcattatttggatctaaaagtcctcaatactggggccaaacatcactttcacacaccatgccaatatgccttaaagtgaactaagctgaccaaaaaatccaaatttgaatttgctaagtgctgaaaagactaggtgtaggactgacacagcaatgtgaagggagacaaagagaaagaccagtctctctgaatggtaagtgggcatatacacatatagaaacagatcccatttgtaaagaagtctgctcaggctattatcaacactgaaatgccttcaacaacctagcatctggctaatgcaaaatcttacaaatactgaagcctcaaagcatttttctactaaattatctctactgtggtaacaaacttcgtactttataatgcttaacatcaaaccagggtttaaaaagctgaaacttatttattggtgccctgatttatatggggaggagtttaaagtagctgagagccaaggtgcttcaagctctaaatctaatgaaaatgattctacatatgcagattttaagctaatatttgttgtcttttaccaacgggctaatatctgtgtcacccaggtacttatctcacttaatcatttttctgatttcttaggaaattttgtcctggcaagtctctgtagtcacgtaatttaacaggaaaggtcttgtatacatctctctatccaaacctaggaaacagtgaggtgtcaccaccaacgacccatgtgatccctttccagtcatcatgcctctgatgaaaatgagccaggagaatcatcataagttaaccctgtaagctttaacactgccaagcaggaacagggaagacctaacctttgagtagcaagtaactgagtagctaataagccgctttatttggtggtaaagaatgaaaataacccacaggccacaccaaatgatattcaaagtcagaggggaagatccatatgcctactataaagaaaatgagccatggactgcgaatacagacacactctattggctctcacaagagttaaccccttgcttagcctcaagttacagaagtgcataacaaccccctcaactcagttcttaaaatgtgaagtttcacagagtgatgggtcccagctaatttcttgaggtatcatccctaagagctatggctacatgaccctggccaggctctttgtgccaaaatacaatggatcctttgagccaagtgaaaaggaagccctaggagatgagatctattgaatttaggccgaaggacacagcaccattgctattgcttgatgcttctctaatctaaagacaaagcataattacccccaggaaagaatagctggggaagaagaaatcggctcaagtgtttactctctgggggtggcagaacagaatattctgaaagatgaccagggaaattagaggtcccacaaaatatgcaataatcatcctgcataccaatgtaatatgcccttctcatcagatcttgagatgaaaattgcctgagaagacaaaagtctaagaactggggataccattaacacctggtaagacatttatttttctctaccttccaagaccagtgtcctcacctcattttgacttttagctattctagtcaatatcaagcttcaattctgaaccttagcttgagctaatataaaaatatacacatgttaatgtctaaagaccaatgtcatcatttaggacccatttagtcagtgtaaagtatgaacattttgctagcttaagacagtccatgtatgatcattccagggacaatcattctaatgaaatatagattgaagactggtccctgaattaagttgcaatcagcaattcacaaacttactcgagcacattatctatttactggaaagcaataagaaagacaagcttcagggactttagtctaaataaaatgatgtttatactggcaagaataaacaattctaatgaatatgctaatagtcattccttatttacagactttagtactctaaacttgacctactgctatatacacacagacacaagatgatgtaccttatgtatcttactaagacaagagcagaaagaaggtagagggaccctaattctccaaactactaggactcaatgttaaataaagggagaaaaaaaaaatcacagacacctcctattcatttacgctggatatggaagagataggctgcccagccaatatgtcaattatcagtgaattacacagtagtgtggttcaaagaaaattttagttcttacaacttaatgttaatttgaaaaatccaagatcttattactttcccaaacaccaaaaggttgtcccaaaggaagaacagttcctttgaaaaaacaggacaaaacattgacaaccatttgtccagacacatctgaacaaaccatgagtccagatttggagacctggtttctgttcttcccaaaagagacttcataaccttggacatgtcgcagcctcaacttccaaacaagaaaatgatgagctctatctatttggcccccaaattataaacctcaagaataaaattgagaaaaattctacgaggcactctaagctcttcagaaatacatgctattcatacataaattattttttcatttacagactcagtccttcagaaagcctcctgatcatgggaagacactatgctacctgacaatttctaaaattaactttggactaatcaagtccatcataatgaaactagtttatagactacaaaaaaattaaaaagactgagttttgattcaaaatctacaaaagtatttatgaaagtaatttccctaaatacaagcctagtaaaatcatgcaatctaaaaagtatcagagattaaagaaggtcaaagaaagtacatacataatttgcttccttcatctttcatggaggacaaaggacagtgttgagcatacgaagacacagaagtacgtaatctgtagagcttttctctaacatcttttgtaccctgtacccactagctgcaagtgggtgccaagccatgtcaagttagagtcctataattacacagtcctgtaataccctccacaagacacactactaaccccaaaagttcttgtttggcacctctcaaacatgctatccatcctacagaaagactatattgacaacctaacaacagcaaagtatgcactgagttttctgttaccgacggccggaattggcactgaaacatccttatgctctaagtcactacaacaaaaatgtggaggctgtgtccagatggaaagtctttggaggaaaaaaaaatcagggaaaaacttatcaaggatgcaataagatatcagaattaaattttccctctaaaaattcaaccttgatatatcatgatctaatcaagtagagcaatccagcacacaaaggcagcgtcaatttttcttcaggtttctggacatatcttccaactggatccacctaggaaggcatttggctaataatttttccaaataacaagaataaagctagaaaattagcagaatatatgagtaatcatctgattagcataagttaatcaaacactgcttagggggctggtcatttccaaactatataaacaaccttaatatgatcaataaatatggggatcatcagcaacatttacttcattttctcccccataatcatttaacaacacaatcatgacatgtaactttacaggcagacttgttggtcatttcagtatggttcacttaaacttgaaagtagaaagaaaaaaaaaaaggaactggaacaaagtttttccctaacattccatatactggtggtacaaaaatacctacaggaaaacattctttctttgggaaatcagaatccgtaggctcatgctaacaaaatgaacctggcaaatgaacttgtcctgaaacaagtatcacacaagcacattcgattttcagtacataactgattgtacaatgtctaagaaataagtttttcttaatggtaggagggattacagagacagaaaaaaaactttagaaatgagcaaatcttctacttcagggtaaggtctgccaagacttggcagtgcagacagtataccttaattcatggtaacttaacatatattctgctctaagtgctctgtgagaataattggtctcttcttactttggtatgcaaaatttaaaaccacatttgcacaattcagtctgttaggtttggcttcacttaagttgaagatttactttaatccatctctgggaaaataaagtcttgtaattagatgattttctgctaagtaaaatttggctaaaacctacagcgtaaacaatgcctgagagatgcacagttacataacttttttccccaaagaccagtcagtattgtcttaagttagtgtctcaccatatccttaagttcataaggagaaataaacaaacatgaaaattccaagtgaacacacagcaaaaagtccaatatttagtattactttaacttgccgagtctcttctagcatctgtaaacaaacagcctcctcttccatcaggtctctgagactcctcttgctgaggctcttacttttaaagccacaaaaccagtctatgaacttccagtaccgacctccatcatccgtttctttctttctctctttctcacccatgagagctgcttgcccattggagtaagcgtcaactggtgtttctgcctctgaatgacctaaggatgccactgggttgccctcctctctgcaggttaccaacagattaacatcttcaggctgaaggcccttaatgctgtcttcagatttcccgttgggaatgatgtggttgatggtctcattattctcactgcatctcagaatgctcttttcttgcatttggtatggttcctcttttggggagcagttctccttcaccaccaggttcttcttagaccaaaaggtggtggttcgaatctgttcctttgtgggaggtggtgtgagaaggctcacaattacagtaatgagtcccgtgacccaaaacaatcctgtggccacatacatataatggatgtctttgatgaagcccggcctattatcaggttggtcacattctggggcacggtaggcaaaggccagtatcaaacggactgctccaagaacaaagccagccattccaccatagaaagccccttgttcattgcagcgcttccagaaaattgccagcaggaacaaggctgccactgggggtgtcaggtaatctgctacctcctgaatgtaaaggtacatctggcctccttgcatctccacgatgattggcacccatgctatgctgatcaccaccataaatgccacaaatatcctccccacaatcattaactcccgggagcttgcgctcttgcggataagtttgtacacatcgagggtgaatatggtactggcactgttaaagatagagtctaagtcactcatcagagctgcaatcatcactgccatcattaaaccccgaaggcccacaggaaccagcttcatcaccaggcgtgggtaagcaatattggagcaaccagctctgcttccacacaccagcatgcagtgctctgggttgatgcaagctatatcatcagtaaacagtatcctggaaatcattcctgggacaactatgataaacattggcaggagctttaagaagccagccataagagtagagcctttggcatgagcaatgtttttggctgcaaggaccctctgcacgatgacttggtcagcacaccagtaccatactgaagctggggtctgcccaagaatgaatccaggccaaggaacatcttcatctgttggattccgcagcattttcagggcttctttcttaggggagacattacaagaatttgtgttggaaaggttgtatgtcaataagatggaagtgacatcgggtgaggccaacatgtaccttctcttaacttcctcaaacccgccaatctccattatgctaataatcataagtgtaagtgccccaatgatcatgagcagagcctgcagagtgtctgtgtagatcactgcaacaaggcctccggtgacagtcagcaaagcagtcatgccaatgagcaggatgacagacacataaagattccaacccaaagactcctggataaaaagggcacccgaatacagatccaccgagagcttggtgaaaatatagagaatcagagacaaggctgcaaaatagacctgaatcctatggccaccaaatcgcttggacaagtattcaggcatggtatatacccctgaccggatgtaaattgggatgaaaacccatcccagaagttgtaaaagcagtaaggcattgaattcccatgcgcccactgcaaatccacttgcagctccagatcctgccagcccaatgaagtgctcactcccaatattgctcacaaacagagaggcaccaattgttacccaggtcatagagcgccccgccaggaagtatccactcacggtgcttctattagatttccacatggcaaaaaaaccaatgcacatgaccaggataaaatacagggccactatggcaatgtctgctgtgtccagtacagctctcattctggtaacttgtgaataatagcgctccaatgacagaagtgtccaactttttatttatttttagtaaccccagccaagtctgtaaaccatacgtgaactggactacacagagcaacacagcagggtcaaagtctttgtcctttggtttgctgtcttgatggtggtggttgtgataaactttgaagaagacagtttaaattttccgcttcttaattgggattgagaacttagctcgtactcttaatccactctccacaagaccatcagcatttactcaggtgctggaggagaaattctgagttgcagctaagtctagtgaagcctactgtaccaaccccgctgcatggctttcaggattaaagccagctcgtagcggggcatgcctggaggatcggcgagtgcggctcggaagccaaccggttcccgggacgcgaaggggcgggacggcggggacagtggggacctagaaactgctgcgccggacggctcccaggcggcgaaagcacggtccg

SEQ ID NO: 140994 - DNA, 1428 bp, Homo sapiens
  misc_feature (1)...(1428): n = a,t,c or g
tacccctcgttccaggaggcagttagagttttacgtaaacagaaatgtgatctgatcaacatgctgtttgagaaggaccactctgggagcccgagagtagaagagggaagacccgggtcagtgaggcagatgaggaaactgaaccacagagttcagttacttgttcaagggtacacagtcattggacacaggcggtctggctttggctccatgctcttgaccaccaagctgtactgctgccaactagccacctttgaacagcgcattcagggacagaaggggaaaaaggagccagacacagggaccaaggagacaaaggaaaaccccaagagtacaggatcatggatggccaagaagagaccctcaggactgcagagagctgccagcgcctttaagcccgggctcgcgctctcggaccgtgctttcgccgcctgggagccgtccggcgcagcagtttctaggtccccactgtccccgccgtcccgccccttcgcgtcccgggaaccgcntcggcttccgagccgcactcgccgatcctccaggcatgccccgctacgagctggctttaatcctaaaaagccatgcagcggccagaggactgctgctactttgaaacgtacgatagagggccctgagggacagagaagcaatagtgagggacttgggaaaacctgggtgaacgaagcgcttccttaataggatctctgcccacaagtcagcaagcacaacagagggcgggtatttcttggtgggatttttatggcacccaccgcagctgtttgaaaggcatgggtgggagcacttgttttcgagatnttaggatgttgatttaggaggggatttttgttcaaacaccctcttgacccaggaactaaaagaatgttgaaagggattgtccccagttcccattcgcagaaaaaattatattccacaaagaagaggtaagaagtgggaagatttccccgaattttaacccttatatgtaaattcctttcacattttggggcagcatggacgagaagggaagaatttgccaagtttggccttttatataagccatgtgttgcaggtgcctgtttgatttttctaaggtattttaagccccttggatccccctttgccttcgaaaaggtggggaactgctcactgacagcttctctgtaaccttgcagtacccagtggatcgttccttgattttgttttcattagtgtcaatttctttgtcattggaggacttttcccctttacaacgagtaacaccattttttggaagnaggcaaaacttataatacctcctgggattgtgagctagtcattcagcctgtggtaaccatgtgggnaaataaaaatggacggaccaaggtaattatatgggacaacttttgctttgagtaataaacttgattgtaggaaaaaaaaaaaaaaaaa

SEQ ID NO: 140995 - DNA, 467 bp, Homo sapiens
catccatgattttttgaccaaggacagtagactgcctatatcagttgattcaccaaccagctgctgctgacagcaacaccactgcagcatctaatgtggacaaagtacaagaaagcagaaattcaaaaagcaggtctagggagcaacaaagctcctaattctattacccactacatgacatgtgggccaagtgctacacttagtcctgagatgtattttttctttaagtcttgaatgaatacaaaaggagcccattttataatataaaccttgatgtacatgttgagatatttggacaatgaaaatgccttaaaaggaatgcatatggataaagttgcacttataacacccttcaacaaaatctaattttaaattgtctttttcttttctattaagggttttctttttcagtgtctaccattgtacttataactgttattaaataccaaatcaaataatataaaaaa

SEQ ID NO: 140996 - DNA, 2673 bp, Homo sapiens
  misc_feature (1)...(2673): n = a,t,c or g
ataataaaccccagccccggggataaaaatttcctaaaaccaaccccggaagcaaaactttccaaccaccaagctattcaggtagtttttaccccctttacccctttaaaattttttattttccctaaagcctttaatctctgtaaggaggttgggccaatatgtcccccccccaaaataaaggtcccttcccaaaattcccaagtaggtttttattcggccccccataaggaaaaaaatttttccttgccatgcccgggttaaatttgggcccccccaagggttcttttaaaagggccccccctccnnnnnnnnnnnnnnnnggatacaaaaatcacctcagggttctatttctttttatactagtttgagacgtgaatggtagtccgaacttaatttttgaaggagaaacaaaatgaaaaatgttttttaaaaaacaaacagtggtatctcttgtcatgagttggatgcctgtgactgacatcaggtattgccaagtaataaacattttgccattcaactctaaatcccttattaggcattagttttaaagggaaatgttacaggcttttatattatttgatttgggtatttaataacaggttataaggtacaatgggtaggacactggaaaaaggaaaaccccttaatagggnaaaggaaaaagacaatttaaaattagattttgttgaagggtgttataagtgcaactttatccatatgcattccctttaagggcattttcattgtccaaatatctcaacatgtacatcaaggtttatattataaaatgggctccttttgtattcattcaagacttaaagaaaaaatacatctcaggactaagtgtagctcaccaagaaaaacacaaaaattcaccactcacaaaaagtaacttaaaatacaaaagtcatttaggtatacattattactccccattggtaattccagatttggggtcaggtatcttttttcatttccctggacataaaccattagggcaggcacagggctgtagtacttcattgtgaggtggctacaactctataatatgcacagtgattttaaaataggctttttgcatgcctttgccatggaaaaggtgctacatacaaacctgtttttgtggaactctttggtaaccaccaatttaaaaatttggatgaaagcatttccaccatggacagatctgaagcacattattggagcttctgagccaaagcttanttaccctgtatattgattcttcaggtttccttgaggggttagggtgttgatttagattacagccagataatttaaagcatgtcaggccccggttaggaaaatgaaaatggctccgattcgtttccagttggctttattattgtttggcagaagttgtttaggggagaagagtggcttcctacaaagtttgcttctcaaggtatactggagaaagtaaaatattcatgtggttacctactgtcctagttgtttccttgaaaagggtatgaaaaaaagtgtgatgaatataattgaagattattcatatttttgtagtctcaatgtgttcccttggttgtctctttaattgtccccttcctcagggtcagcctactcangaatccagtaactttaacacgttgttttccagcattttcctgcttgaaagcactaatgcacttaaacccagcatgttcctgtaattttaaggataattaagtgttcctggagaggtccaagctggaatgtcattcgccctcattgggctacatcacccaccccattaaatttcagcttttcagtaattgttctgggatgtgttcctagttgtgcaaattagatggctaggctaaaaataaaccctaaggttacccccaacctaactgtatttaggcccataacataatttcctatgtttacttttatcccaccctaaaaatgaatgtacattttttgacatgccaattgtctcctagactgctctgatacctattaccaatgtgctacttgaatcccagggagttatgacagagagagatgtttcaaaagtctacggaaaaggttttagatatttctgttgtgcattattttttgtatgttagtaagaatcctttgtatttccatttacatagcacctttcatccaagattttcaaaatgatttaatgttaacagcatttggtggtaaaacctaagttaccggtggcattgaagtacgtaagtaagctcaagttctctaagttccatttcaatttaaacatgctctcttttttattgatggtcttttggaaattagactgtgaacacaacattgctactggcctacgaaagagagagagaaagagggagagagaaagagagagagagagagagagagacttttcttatggttactgggttagtgatgaaacccacaactcataaaccacacactatggaatatggaattattccaaaaagttcttcagagctggtaatgaaagcctaagaagtacactgttaaaattttaaaaagtcagtatgtttctcatttcagaccttgaagattactctgatattgatgttaaataatgaatttgcattaatgagtatcaatgcattttttgatttcataagaaaataaaactgtgatataaaattggaactactaaaaaaattgatgtttccctgggttaactaaatctatttt

SEQ ID NO: 140997 - DNA, 989 bp, Homo sapiens
cttttgcttcagaaaaggaaagggaagaataaaacttgtcaatagtagggtagagcaccaagcaggctcctggggtccctggtttcagtccttggttgctggacaatatttctggacctgctctgggccagatgggagcccacttccctgaaaggagagacccaagcctggcatcattcatcacaagctgactgaagagctcgtaggcaggctcaacaccagatggaagctgccaaggcttgggccttccaccctctgaagccacagcccatgctctatgttggccccattcagccatagctggagtggctggatcacagtgcaccaagtccctaggctcttgaatgctttgctgcttagaaatttcttctgcctgataccctaaatcacccctttcaagttcaaagttccacaaatctgtagggcaggagcaaaatgccaccagtctctttgctaaaacataacaagggtcacccttgctccatttcccaacaagtttctcatttctatctgagaacacctcagcctggacattattgtccataacactatcagaattttgggcaaagccattcaacaagtctctatgaagttccaaactttcccacattttccagtgttctactgagccctccaaactgttccaacctctgcctgttaccaagtttcaaagttgcttgcacatttttgggtacttttttaaggagcacctcactccactggtatcaatttactgtattagtctgctttcaccctgctgataaagacatactcaagtctgagaagaaaaagaggtgtaaagaaaaagaactgtaattggacttaaagttccacatgggctggggaggcctcagaatcatggtgggaggcaaaaagacacttcttacatggcagcagcaagagaaaatgaggaggaagccaaagcagaaactcctgataaacccatcatatctcatgagacttattcactatcatgagaatagcacagg

SEQ ID NO: 140998 - DNA, 724 bp, Homo sapiens
agtgaggccaaccctttgccactacatccatttccttactgaggtatgccatgggttgcaagctggccctcggacctgtgtcaggactcctaggactcctagagctattcctgttttttctgtgacatataaaggaacgtcttgtcccattggcaagcttaacactggggcttgggttagggcctcctttagagcctggaaagccacttctgcttcaggtgtccattctactaaatgggtatcagctttctgagttttcttaattagtgtgtataatggcctggctatttcgctgtacctgggaatccatattcggcagaagcctgttatgccaaggaaccctcttaattgctttggggttttgggatgaggataagctggtataggctgaatacgttcctcactgaggaccctggtgcctttggataattttagccctaagtatttaaccttctgtgagcagagctgagcctttggtttggaaaccttgtagtcacaggtgatgaggaagtttaagagtgcttgggtggcttgatggcacaaggtttttgaacgggcagctaaaagtaaatcatccacatatacaacaacctcatcgataatcctgagatcttgcactaacctccactgtccgttgggtttctgtactcctaaaattggagtactgcaggggctattgcatggttttactaggccttgggcttttaggtccttaacaatcttt

SEQ ID NO: 140999 - DNA, 391 bp, Homo sapiens
gaatgggggaccccacgagggccatagtttcctcccctcagaatggccagccaccgaagaaggaaaaatacttatgcctgcagctaaccaatggaaattacttaaaacccttcaccatatctttctcttaggcattaatagcacccatcagatggtcaaattattatttactagaccaggccttttcaaaactatcaagcagatagtcaaggcctgtgaagtgtgccaaagaaataatcccctgcactgcagcccatacatttcaatccctttatctttaacctccttgttaagtttgtctcttccagaatcaaagctgtaaaactacaaatagttcttcaaatggagccccagatgcagtccatgactaagatctaccatggacccctgg

SEQ ID NO: 141000 - DNA, 1662 bp, Homo sapiens
gcggagcagggtttatctcctcagacaaaggtggaaaggctgatggcagtgtgggtcagggagggggtgttgccattactggggatggggaagctgtttcttctggcaaaaaagtttcatcagagtttacaaactcagtgtccccagctctatcagggtcctcccatacgtccccattccaagttgcagggtcccattcttttccaatcaatgccctcactttaacagtagacacctggcagtactgtgcatgcacccgaggccgatcaaggactccaaaagattgttaaggacctaaaagcccaaggcctagtaaaaccatgcaatagcccctgcagtactccaattttaggagtacagaaacccaacggacagtggaggttagtgcaagatctcaggatcatcaatgaggctgttgtccctctataccaagctgtacgtaacccttatactctgctttcccaaataccagaggaaacagggtggtttacagtcctggaccttaaggatgcccttttctgcatcgctgtacatcctgactctcaattcttgcttgcctttgaagatcctttgaacccaacgtctcaactcacctggactgttttaccccaagggttcagggatagcccccatctatttggccaggcattagcccaagacttgagccagttctcatacctggacactcttgtccttcggtacgtggatgatttacttttagccgccccttcagaaaccttgtgccatcaagccacccaagtactcttaaatttcctcgccacctgtggctacaaggtttccaaactaaaggctcagatctgctcacagcaggttaaatacttagggctaaaactatccaaaggcaccagggccctcagtgaggaacgtatccagcctatattggcttatcctcatcctaaaacccgaaaacaactaagagggctccttggcatcacaggcttctgccaaatatggattcccaggtacagcgaaatagccaggccattacatacactaattaagaaaactcagaaagccaatacccatttagtaagatggacacctgaagcagaagcagcttttcaggtcttaaagaaggccctaacccaagccccagtgttaagcttgccaacggggcaagactttttccttatatgtcacagaaaaaacaggaatagctctaggagtccttacacagcactatggagaggaaaggaattcctgacttccgacggaatacctatcaaacatcaggaagccattaggagattattattggctgtacagaaacctaaagaggtggcagtcttacactgccagggtcatcagaaaggaaaggaaagggaaatagaagggaaccgccaagtggatattgaagccgaaaaagctgcaacgcaggaccctccattagaactgcttatagaaggacccctagtatggggtaatcccctctgggaaaccaaaccccaaatcgaagctgtaagactacaaattgttcttcaaatggagccccagatgcagtccatgactaagatctaccacggacccctggactggcctgctagaccgtgctccaatgttaatgacatggaaggcacccctcctgaggaaatctcaactgcacgacccctactatgcctcaattcagcaggaagcagttaa

SEQ ID NO: 141001 - DNA, 954 bp, Homo sapiens
atggcccataggcccaagcccggtattcctagaccttttggaaagcccaaggttgagaggttcactcgaaccctgggagtggctgcaggtggagctgcctgccagtccagcaccgtgcacccgcactcctcagcccttgggcggtcgatgggactgggtactgtggagcagggggtggtgctcataggggaggctcccgcggcgccagagaccacggactcaccactgagcacaaaggcaatgttgggcatgctggtaaaggaccactggagtccagcagcccagacccctttctttgtgatcaaggaaggtgggaaaaggggtgcaggactgctacatggccaactaattttaaaggataagtttatcactcagtcagctgcagacattaaagaaaaacttcaaaagtccaccttaggcccagagcgaaacttaaaaaccctattgaacttggcaacctctgttttttataatagagatcaggaggagcaggcggaacgggacaaacgaggtaagaaaaaggccaccactttagtcatggccctcgggcaagcggactttggaggctctggaacgcggaaagcctgggcaaatcgaatgcctaatagggcttgcttccagcagtacccccttagacctgaggcccaacaaggactccaaaagattgttaaggacctaaaagcccaaggcctagtaaaaccatgcagtagcccctctgatactccaattttaggagtacagaaacctaatggacagtggagaattgaagctgtaaaactacaaatggctcttcaaatggagccccagatgcagtccatgactaagctctactgcggacccctggactggcctgctagcccatgctctgatattaatgacatggaaggcaccccccctgaggaaatctcaactgcacgacccctactatgccccaattcagcaggaagctgttaa

SEQ ID NO: 141002 - DNA, 2049 bp, Homo sapiens
gaacccagcccagctctaggactcacccctgagcgcaaaggcaatgttgggcatgctggtaaaggaccactagaatccagcagcccagacccctttctttgtggtcaagaaaggcgggaaaaggggtgcaggactgctacatcggtaagcataactaatccgataaacagaggtccatgggtggttacgcaccctggaaaggaactcacccctgagcacaaaggcaatgttgggcacgctgggagagacattctagcaaaagcaggggccattatacacctgaacataggagaaggaacacccgtttgttgtcccctgcttgaggaaggaattaatcctgaagtctgggcaacagaaggacaatatggacgagcaaagaatgcccgtcctgttcaagttaaactaaaggattccacctcctttccctaccaaaggcagtaccccctcagacccaaggcccaacaaggactccaaaagattgttaaggacctaaaagcccaaggcctagtaaaaccatgcagtaacccctgcagtactccaattttaggagtacagaaacccaacagacagtggaggttggtgcaagatctcaggattatcgatgaggccattgtccctctatacccagctgtacctaacccttatactctgctttcccaaataccagaggaagcagagttgtttacagtcctggaccttaaggatgcctttttctgcatccctgtacatcctgagtctcaattcttgtttgcctttgaagatccttcaatcccaatgtctcaactcacctggactgttttaccccaagggttcagggatagtccccatctatttcaccatacattagcccaagacttgagccagttctcatacctggacactcttgtcctttggtacatggatgatttacttctagctgcccgttcagaaaccttgtgccatcaagccacccaagcgcttttaaacttcctcgccacttgtggctacaaggtttccaaaccaaaggctcagctctgcttacagcaggttaaacacttacggctaaaattatccaaaggcaccagggccctcagtgaggaacgtatccagcctatatcggcttatcctcatcccaaaaccctgaagcaattaagaatgttccttggcataacaggcttctgccaaatatggattaacaggtatggcaaaatagccaggccattatacacactaattaaggaaactcagaaagccaatacccatttagtccgaaggaccagcttgcaacccgtggcatacctgagtaaggaaactgggaccagcttgcaacccgtggcatacctgagtaaggaaattgatgtagtggcaaagcgttggcctcactgtttacgggtagtggcagcaatagcagtcttagtatctaaagcagttaaaatgatacaaggaagagctcttactgtgtggacatctcatgatgtgaacagcatactcactgctaaaggggacttgtggctgtcagacaaccacaatgaagaaaaaatagaacataactggcaacaagtaattgctcaaacctatgccgctcaaggggaccttttagaggttcccttgactgatcccgacctcaacttgtatactgatggaagctcctttgtagaaaaaggacttcgaaaggcggcttacgcagtgttcagtgataatggaatacttgaaagtaatcccctcactccaggaactagcactcagctggcagaactaatagccgtcactcaggcactagaattagaaggaaaaagggaacccgaaaatccagcagacaatgctagctattcctgtgaacctctagaggatctgcgcctgctcttcaggcgacaaccaatcgaagctgtaaaactacaaatggttcttcaaatggagccccagatgcagtccatgactaagatctaccgcggacccctggactggcctgctagcccatgctccaatgttgatgacattgaaggcacccctcccaaggaaatctcaactgcacgacccctactatgccccaattcagcaggaagcagttaa

SEQ ID NO: 141003 - DNA, 165 bp, Homo sapiens
  misc_feature (1)...(165): n = a,t,c or g
cttcagtgcgatcaagttctacgtgcgagagccgccgaatgccaaacctgactggctgaaagttgggttcaccttgtctgttgagttgtaaatgtgagagaaaaagttatatgtgaatatatatcaagccagcatttgtattcgcatcattaaatnnnnnnnnnn

SEQ ID NO: 141004 - DNA, 831 bp, Homo sapiens
atggcgccgtccgccttgctgcgtcccctttcccggctgctggcccccgccaggctcccgagcggccgtcccgtaaaccgggagaggagacaccctccccggggcgccccttacatgaccactcccgagtcgtctgagggtccgcaagcccttaaacgaggctttgaaagcctcggacaggacaggtgcgtcctgtctaactcgccagtggccctgggcgaggcagtaagttacaaatttacagaccctcttcccctttcagcttcagtgcgatcaaagttctacgtgcgagagccgccgaatgccaaacctgactggctgaaagttgggttcaccttgggcaccactgtcttcttgtggatctatgtaagtactttactcccggatgtcgtgagactacaccagcgtgaaaagataaaaccagctaggcacttccccagtcgctacagactcagaagaggagctgcaagtgacagccaaagcattccccatggccagacaatgagacaaggagaagcagctggctatccccctcctttggactgttgggacacaggagatcagagaagggccgggaagccaagaaccgggacactctccaccattaatatttcggcgaatcagacaggaagaagagagttcatggctattataagactcatactaggaggtaggccttggaggggaaaacctgcacgtggtaccagtgcccacccaaggtcagagacatctgacactctaagattggaccccacaggaggatgctccgtgggtcctgtggacctcaacctgctcaaaggggatgctcttagcagaggctctgaggtctag

SEQ ID NO: 141005 - DNA, 640 bp, Homo sapiens
  misc_feature (1)...(640): n = a,t,c or g
ctcatccctactccagaagcgagaacaacggaggcagaggagctgaagactccagtatgcaactgactacaaggagacagaaggctgaggccggggtgctagagaaccttgccgtgctggaattcacgttgacgcccccacggagctctgctgcagagccctcgagtcccgcacttccggccgccaggtggcgctggttctgttgccaactcggagagactgagctgggccacgcaagatggcgccgtccgccttgctgcgtcccctttcccggctgctggcccccgccagggctcccgagcggcccttcagtgcgatcanaaagttttacgtgcgagagccgccgaatgccaaaccttgactggctgaaagttgggttcacctttgggcaccacctgtcttcttgtggatctattctcatcaaacaacaccaatgaagatattttagagtacaaaagaagaaatgggctggaataaacttttgaaacactaatgtagtatgctccgtatagtgattgtagctgttcctctggattcaccatctgttgagttgtaaatgtgagagaaaaagttatatgtgaatatatatcaagccagcatttgtattttgcatcattaaataaaaagaaataaaaataaa

SEQ ID NO: 141006 - DNA, 414 bp, Homo sapiens
atgcagagcagagctgagagccccagtcaacagtcagcagccacggccagccacatgactaatagggctgtagacatctggaacaaactcgtggacactctaaaactaagacgcactgttaagggcagctctccccggacccgagcccggagggaacggcaggcggacccgggcgcacaggtctgcgcggcggccccggcaatcggcacgggcaggatcggaggactcgcggaggaggaagccagtgccggcccgcgggactgcttccaggtacaaaggttcatttggacttctggtttgcaagggatgagggttaaaaaaaacaaaacaaaacaaacaacaacaacaacaaaaacaacccagaaagtatcttctagagccagccgcaagagctgtgagctgcttccaagttag

SEQ ID NO: 141007 - DNA, 2619 bp, Homo sapiens
agtggatagcaggaggaaaagctcagaggagcaatgtctgggtgagtgtgggtagcagctgagagcaccatgggcctgctgggagcagagggcactggaggacaacgcgatacccggccgggggacgacagggggcgacaaactgtaaggttttccctatgcccgaccgtgcagaaggctgcagcgagggctgtgtgctcccgatcgcgcacagctggctgcgggaaaggggccaggattgagacgaaggctcgcggactctgctaccggggagaaccaccccctctcatcgtgcgcaatccccagactcacccctctacagtagcccccagccacgggcggccttcacggggacgggggcggagttttgtcgggagcgctgggagtctcagaaacctcggctgttcctactctctcccctatgccctcttcctggtctagcacattcagcccaatgcctttggtgcttactgggctcaacctcagagctctcagatcctgaccccctcaaatcagttcaggggacccttggctaacccgccgggtgttttctccccctccggctcactcttgtctggcgcatccgcagagcagacgtatggcgaggtgaaccagctgggcggtgtgttcgtcaacggccgccccctgcccaacgccatccgcttgcgcattgtggagctggcgcagctgggcatccgaccctgtgacatcagtcggcagctccgcgtatcccacggctgcgtgagcaagatcctggcgcgctacaacgagaccggctccattctgcccggggccatcggggggagcaagccccgcgtcaccactcccaacgtggtcaagcacatccgggactacaagcaaggagaccctggcatctttgcctgggagatccgcgaccggctgctggccgacggcgtctgtgacaagtacaatgtgccttcggtgagctccatcagccgcatcctgcgcaacaagatcggcagcctggcgcagcccggaccgtacgaggcaagtaagcagccgccgtcgcagcctacgctgccctacaaccacatctaccagtacccctaccccagtcccgtgtcgcccacgggcgccaagatgggcagccaccccggggtcccgggcacggcgggccacgtcagcatccgtggttggccacacgtgtgcccagggcagattcggaggcaccttttaatccgtcctctctctcctgcaggggccctggctgggagcgaaggcaccgcttactctcccaagatggaagactgggccggcgtgaaccgcacggcccagtcggcctccaccctctctgccgtgggcggctttctccccgcctgcgcctacccggcctccaaccagcacggcgtgtacagcgccccgggcggcggctacctcgccccgggcccgccgtggccgcctgcgcaaggtcctcctctggcgccccccgctcaacgaaaccgtgtgttttcttttttttttgtgtgtgtgtgtgtgtgtgtgtgtgtgtcttgcacagaggtggttggcccagctctgcgcagccacagcaagttgcgcctgaggctgaggcgagggaagctgcaggagaaaaaaaaatccagagttccccttacttcaaatcgaggcgctccaagctccccctttaaaggaggacttggggaaaaaagaaaattgaaaataggcccctgtaggtataaacaaactgtggatcctagtgtaggagaagcagagtggctcaaggttgggaaaggaaaaacaggcttgcgcaatcgtggcgtcactttctggcttccggtggcaaaacttgggccccttcccaagcccctaaataatagagtaaggcgcagaatactgccgaggaatccaggccgctccagggaaatctctggtggctcatttcccgcaagatttccccctgcccacagcgagctccgagccgcgggtgtcagcggactcgacgcattggctgctcttcgcacttgtgcgggcgcctggggtttggaaagggtgagggtccgcgcaacgttagagtcctgttcccttctgcggaagtcgccatcagacctgaaaccttcccagccctctgcgcccttcacttcctttactgagcaggtggtgagggggttggacggcaacgggaattgcacctggccagcggtcagtgtttgcaaatggccttgcgaggagtcccgcttgccaaggctctccttgcaagtggctctcctagcgggagaggaagggctggagtcccagtgcctctcgcactgcgcggcgctaggtagtgatccgacgcctctgtgcttcctcccgcagtggctgacaggaagcctcccagctccggcagcaaggccccggacgccctcagtagcttacacggactgcccatcccggcctcgacctcctaggggcagctctccccggacccgagcccggagggaacggcaggcggacccgggcgcacaggtctgcgcggaagcagagtttgtgtagcaagtccacttagatcaattttatgtgatcatgctttgtgtcatgtctacagatccagaactggtgtgcagagacctcgtcctgcttggaaaacgcattcacctccagggggctgaaaagcctgtt

SEQ ID NO: 141008 - DNA, 2775 bp, Homo sapiens
tgggcctggggtcgcgggcgtggagagtgtcctgggagggggcagcagcggcggcggcaggccctggagcgggcggcagcgcgctccgctgccgcgcacagcgcgtctccagcccgcggctgggccgccgcggctctcggctctcgggcgccctccctctatgcctctcacgcggcggcggcggcgcccaagctctcccggactgcgccgggcccagccccggccaccccggccaccccggcgccaggcagctggccggcccgctcgctatggagcagacgtatggcgaggtgaaccagctgggcggtgtgttcgtcaacggccgccccctgcccaacgccatccgcttgcgcattgtggagctggcgcagctgggcatccgaccctgtgacatcagtcggcagctccgcgtatcccacggctgcgtgagcaagatcctggcgcgctacaacgagaccggctccattctgcccggggccatcggggggagcaagccccgcgtcaccactcccaacgtggtcaagcacatccgggactacaagcaaggagaccctggcatctttgcctgggagatccgcgaccggctgctggccgacggcgtctgtgacaagtacaatgtgccttcggtgagctccatcagccgcatcctgcgcaacaagatcggcagcctggcgcagcccggaccgtacgaggcaagtaagcagccgccgtcgcagcctacgctgccctacaaccacatctaccagtacccctaccccagtcccgtgtcgcccacgggcgccaagatgggcagccaccccggggtcccgggcacggcgggccacgtcagcatcccgcgctcatggccctcggcacactcggtcagcaacatcctgggcatccggacgtttatggagcaaacaggggccctggctgggagcgaaggcaccgcttactctcccaagatggaagactgggccggcgtgaaccgcacggccttccccgccacccccgcagtgaatgggctagagaaacctgccttagaggcagacattaaatacactcagtcggcctccaccctctctgccgtgggcggctttctccccgcctgcgcctacccggcctccaaccagcacggcgtgtacagcgccccgggcggcggctacctcgccccgggcccgccgtggccgcctgcgcaaggtcctcctctggcgccccccggggccggcgtagctgtgcatggcggggaactcgcggcagcaatgaccttcaagcatcccagccgagaaggaagcctcccagctccggcagcaaggccccggacgccctcagtagcttacacggactgcccatcccggcctcgacctcctaggggcagctctccccggacccgagcccggagggaacggcaggcggacccgggcgcacaggtctgcgcggcggccccggcaatcggcacgggcaggatcggaggactcgcggaggaggaagccagtgccggcccgcggggtgcacgcccagccagcccccaggcccagccctgcctctggccggacccaccacacttcctttattggtctgggtttttaggcttctctgaacttgggttttagactgccgtaccctcctcacaatccttgctctgacgtggcctccttcgctctgccagcttcaaatttcttttttgtcactcccttgtccgtctccgtctcgcctctctccctgtttccttcccccctctttctttctcactctccctcccttccctttctctttcccttcctccctaccttccaccccggctttccccgaccttccagggctccctctgcccttccactctcttttccttgctccgacctctgctccagtcccgcttcttcccccgtctcctctttctagtcctctatatgctatcagccctttttcctggtccatccctgtcgttccttctctctctgtctctggttctactgtcaagggccctagttccctttgttttactgcttccccaaccctccctcagtccctgaggagccctagagccatcttcgtgacagtcccttctctggcacctgggactttgtagccttcactcctctgagcccaccagccctaatggaggggggctcaaacctaggaagtggacagaaaagccacagcctttattttgtattttttttgtaataacaaaccctaaaaaaccctccatgaactgtcctctcccgtcgatccccgcagcatattgtctggaaatctgttttctttctcagagcccagtggccgccgggcttctcttcccttctgagatgatgtcaccccaaagaagactggggtaggagtagggagcacaggggttgttggtgttttcagtgcttagaaaactgggttgtcctgcaggtgtctcctcccacccctccactcgcaacacttgctagggaatccgaccagtggtaaacacatcagcactttttggtgttcaggggtcagcacaatttgttaatttaaaccacagactgcttccaggtacaaaggttcatttggacttctggtttgcaagggatgagggttaaaaaaaacaaaacaaaacaaacaacaacaacaacaaaaacaacccagaaagtatcttctagagccagccgcaagagctgtgagctgcttccaagttaggcgagctggtggtggtaccctggacataatgcaattctgtagtcagagcaatatccctggcgagagcctgacatcgcctgttaaaggtggctgcctctgaataaaggaaagcgtctgaaaggtgaa

SEQ ID NO: 141009 - DNA, 579 bp, Homo sapiens
tcacgtaaggatcccagactcatcagactcggttctgcagtaggggtaagcattccaggctttctcgtgtatattcagggctccctctggggccagcattcgaacaaacgtgggtactttgctctgcaggtggtagatcttgtgtgtgtactggcctttctcaccgtccttctcgtagggctcattcaccaggacctccacgccttcgccaccacccgtttcatttttactggcctcagccacagaatacagctgccccacttgatactcatctacagacacaggcaggattactcgatctaatgtgaccttcactcgcaccctttccagggctgcaacgctgcggccacagccagtgtctcggatgcccctgctcctcccccgtcccccgcccagggatgcacacacggggcacgagtcgggcaggaaggaaacgcagataccaggcaggccctgcatctccggcaccttggacttttcccttgcaggctcctgctgttgccttcggctgacctccccatggtccagcgccacagcatcggatgggcttgcatttgcctgtggactcccgtaggtcat

SEQ ID NO: 141010 - DNA, 1056 bp, Homo sapiens
atgacctacgggagtccacaggcaaatgcaagcccatccgatgctgtggcgctggaccatggggaggtcctggctgctgagcgggatggcagggctgtgtacagaagacaaggcgaccacagggacctggtggccaagaggatggctcttaaaaaaaagtccaacatcatcattatcatcttcatcatcatcatcgtcatggtagtgaagtcctttcacctgtgtaaggttcactacgtgccagacattgctctaagccctggtgaaatcctactatggaactgcaccaatccaagcagtacgagaaggccccataaaaagttccggagatcacattttgcaaatcagagacatagcaatcccatgctgacccacagccaggatgcacttaatggagccgcagcaaaatgcagcttaaagcaggaggtcatcatgccagttaacaggttccttgttagtccactgacaggactgagcctcagcaactccaaacatcagccaagggaaagaacacccaagaccaccagtgcagttacatttttctctctcctgttcttatacatcatctacagttccaacccccttgacaatacttactgtaataactgctccgaggcaaggacatggaaagaagagagaaaaagattaatgaagatgaagaaatatctgccccccaccccccacaaggaggacgaatggcagagtgtactttactccctgtggcttattccacggtcacctccaagccccaaaatacaaataccagaggaggagcaaaacgagacatggagaaaaagtgtgctggtgaggagactgagtgatggtgaggttcctccccgctggacagcactgctctcctcgcaccccggcactgaggtcctggaccctctggcgaggagactgggtgacggtgaggagactgggtgatggtgagactcctccccgctggacagcgctgctctcctcgcaccccggtactgaggtcctggaccctctggcgaccagactgggtgatggtgaggttcctccccattgcacagcactgctcctcgtgcc

SEQ ID NO: 141011 - DNA, 414 bp, Homo sapiens
atgcaaagttgcaatgtggaaaagccattttatccaaccggaatttcccagtcagtcatctaccttgagctagatgctggggagagtgtggtaagacaagcccttacttttgttgcgcagggccactggacatgggcaggcaatggggacggatgcaggtctgcttcggtcactagagacgtactggggcctgacaacatcaacaacgtcacaaccctgaggtctgaggtcccgggcatggcactttgtgaggtagtaaaaggactgtctgaaggtcttctccagcctctgctcaaggtttcaggaggtcccgagggctcggtattgtcagagaatgcttcccatgcctggaccctggaccttctggttgtgctgatggactcagcggacactggcaggacccagctatcctga

SEQ ID NO: 141012 - DNA, 2184 bp, Homo sapiens
  misc_feature (1)...(2184): n = a,t,c or g
ttttttttttacttttgaatcaaaggctttatctttaagaaagcagatttagagaatcagaattttctatccattttggttctattaagaaaagtataccaaattaaaaattaagaactattttttaatagataatacatgtacagtggcggtaccaaacaaaattcccanaaggagggntnacaagagggtgtacattgaaaagtcattcccacccctcttcccagaggcaattcaggctgccgggctgctagatatcctcccagagacatcctaggcatatggcaggtgggacatatgatatacacgtgtatacgtctgtgtgaaaacatatggcacacacatacatctacacactttctccattccaaacattagggataccatggggcttttttcctcactttaatcatggcatcttgggggcccattctatgggtaggtacacacacacaggggtccattgttttaaaattttcttacaaactaatcccattgtttaaagctgggccataatgtattttaaccattcccccggtaatgggtgggcactctccaactttttgctattacaatggtttcaacaaaaactccttgtaccacaaggtaccttgtacacaggtacaattcttaggagtagcattgctagttcaaagagcttatgcatttgcacttttgatagacaccgtccagctgtcccccatggagtgcctacatgtcacactcctgccaccaccgtatctagtgctgccacccacagccttgcactgtggtcccacttcttggttcacatggctgagacatttctgcccatcaagttacctttaggttcatgacacattttgagccaaaacataccttatctctaacattagtgtagttcttccctctctttttcccttcttagggaataaaaaaaaaaaaatctgtaaaagggcaatcccttggaaagattcaaaaccctctgaacaccctgtttcaacctcaaacttcaaggttaacagtaataaccatactctgagaagagacccctcctaaagttgtgaaaaactgttctcaatactaagcatcaagtagaggaaaggttcaatctaaattttccctaatagaagatgccaaagttgccaatgtggaaaagcccattttatccaaccggaatttcccagtcagtccatctaccttgagctagatgctggggagagtgtggtaagacaagcccttacttttgttgcgcagggccactggacatgggcaggcaatggggacggatgtaaggctggcgtggaactatccacggtattccctgtgttgtcaagtatgttgcagatctgcaacagattctccagttttgcacatttattgagtagagggaatactattatagcattaaccttttacaatgcatcttcagcctgtaatagaaggaatgctctggacttcatgaaaaggatcaagagaggcgcctgggggattctgaagatgcacagaacaaggcactttccttggcaatcccaaccatggggacagatgatggcatccatcctatggggctctttattgtactgttctgcattaagatgttcttttactttgaggccaacaccagccatgagtaaatcataaagtgcttccttaaagtgttcttcctcaaatgcatgtttcaacatctgcacttcagaacaagtggtcaggctcaaagtaactgtgctactgctagatacctacctcccttttagggtgatcatcagtcacctacagagtgggcaaacaagaccatatgaggcagcagaaatatgagggcacaggttagagccagggctcactgtccggagtgccctttcaggcaggtctgcttcggtcactagagacgtactggggcctgacaacatcaacaacgtcacaaccctgaggtctgaggtcccgggcatggcactttgtgaggtagtaaaaggactgtctgaaggtcttctccagcctctgctcaaggtttcaggaggtcccgagggctcggtattgtcagagaatgcttcccatgcctggaccctggaccttctggttgtgctgatggactcagcggacactggcaggacccagctatcctgaaaatattaagggctacgagctcctcgtgccaagctggncgtntcggatgcactcagtnctcattncacgccccgctactcc

SEQ ID NO: 141013 - DNA, 647 bp, Homo sapiens
gttgacgcgtcgaccaacgcgggcggaagccaggaggccgggatattgatgctcctggctctgtgtgctgccattctcatccgtgtgctcaaagctctcaggcacccacgatggccttctcaggccgagcgcgcccctgcattatcccagagaacgaagaaatcccccgagcagcccttaacactgtccacgaggccaatgggaccgaggacgagagggctgtttccaaactgcagcgcaggcacagggacgcgaaagtctacaaggagatctgtgacttttatgcgaaattaaacctgcccagtcctcaagtacctgctcaagatcttctccaggaagctttcttgacattccaggccttatcgatcttctgttcagcagccatagcacccactgtgtgtcccatgcaggcatggtggctagcaccagcttcagtggcactggcccctcaaaagttttacagcagagtgccttggaccctgatggtgcatgcagccagcagcacccatcccttggcagtcagctatgtagggggtaccttgggtgagggaactcactgggaacagccttctctggtattggaaaggaggatttccagcaatctgtgccagcgacttttctgcatgcagcatgccctggtagtgtga

SEQ ID NO: 141014 - DNA, 275 bp, Homo sapiens
atgaatgggaaagagttttttctccagcccaatctcacgctgataactgccggcttcaagagccagacctccaggaaggcattagagcagttccccgagaggatccccaatggaactatcaggcagattccccagcaagccaaactcattgccttaactcaggccctcactcttgcaaaaggagtacatgtcaatgtttatactgactctaaatatgccttccatatcctgcaccaccatgctattatatgggcagaaagaggtttcctcactac

SEQ ID NO: 141015 - DNA, 272 bp, Homo sapiens
aaagagatttcctcactacgcaagggtcctccatcattaatgcctctttaataaaaactcttctcaaggccactttacttccaaaggaagttggagtcattcactgcaagggccatcaaaaggcatcagatcccatcactcagggcaacgcttatgctgataagtctgataatgggccagcctttattagccaaattgcccaagcagtttctcaggctcttggtattcagtggaaccttcataccccttaccgtcctcaatcttcaggaagg

SEQ ID NO: 141016 - DNA, 1005 bp, Homo sapiens; identical to SEQ ID NO: 120810

SEQ ID NO: 141017 - DNA, 1794 bp, Homo sapiens; identical to SEQ ID NO: 120803

SEQ ID NO: 141018 - DNA, 567 bp, Homo sapiens
tcacatgacaacttcactgctagcacaatcaggattccagaaaaccagtgcactaaacaaaattacaaccaagggatcacactgagtccagtttacttcactgctacctccaccagagcgggtgctggtatccatggctgagagaccatggggtggataggcaaaacaatttggttgataaggctcagatcctgaactaacctgtaaggcttgtccggtttttggacaggtaaaatgggggaattgtaaggagagtttataggctttaaaaggccatgctgtagcaggcaagtgataacaggctttaaccctttcaaagcatgctgtgggatgggatattggcattaatcggggtaaaagtggttaggttttaatgagatggtaagggatgcatgatcggtcaccaaggagggagtagaggtatcttatatttgtgggttaaggtgggggaatataagaggaggacgcaaaggaggctttggactgggaagaagggcagcaatgagatgtagctgtaatccaggaatagtcagggaagcagataatttagttaaagtggctcgccct

SEQ ID NO: 141019 - DNA, 892 bp, Homo sapiens; identical to SEQ ID NO: 120808

SEQ ID NO: 141020 - DNA, 552 bp, Homo sapiens
atggcccatcttctaatccatactggagagaaactttacaaatatagtgaatgcggcaaggtcttcggacacaagttatacctaatcaaccatcagataattcatactggagagagaccttacaagtgtaattcatgtggcaagacagggtgtctcgtggagtatttagccccgctcatcttgatgagtattgagctctcagcagagggtagctcctctctgcagctggccgtcccattgtctgttctgctctggctgagcccagggcttttaggggacttaaacggcaggaagtacctgctgatttgtccatggctgaagcaggtgtccggagtggtggagggtccgggcctgggggcgggtcccgaccatgcgaaggtgggcgtggcctggtcagctgcttcaggggcgcggggcacaggttccagtggtgccactgctcttctgcagctgctcctgccatcaccgctcacacctcccttctgctgccagcgcgatggtagcggctgctccggatggcccgtgactgccatcagtagtgcaggagtttag

SEQ ID NO: 141021 - DNA, 459 bp, Homo sapiens
tcaagcatagtcacctttggggggcattctgtctaccacaatcctcaaggaaaaggctttacactcaatgaccgctgttgagtttagtggggaagacacattaaccaaataactaagtaatttcatgtgggcctcgtgcactttaggggaaactgacttcatctggggggtcaaggaaggcctttctgagggcagacattcaagctggaaacttagggcaaaggtgaggctgaagttgcctggaggtatgcgatgaacaaggaccagagaaaagcaaggcagcgagccctccggggagtcagttctgtgactgaagacactctcaacatttgcagactttgctggcagccactcccagagcccctggaactctggcccaaggctctctgactgactccttctcggcttagcggctgaagactgttgctgcccgatcgcctcggaagccccgtagaccat

SEQ ID NO: 141022 - DNA, 657 bp, Homo sapiens; identical to SEQ ID NO: 130336

SEQ ID NO: 141023 - DNA, 324 bp, Homo sapiens
atgaagaaaatcaagctcatgcagatatgtaattggcaaagggatgagtattgtgatagacttttccagataattgtggctgttcttcttgatactagaccaaaactcaacaagtggcagtttcttaaagctgtcctgagtgggcacttccccagcaaaggcagcaagctgaagaaggctggaataagattgatgacactggttagtagcttcaatgcatggcggacttactgcatacagggccgccctggtctaaactggaaaaattctgccaaccaagaggaatccttatttagtggtgttgtcaacgtggcttttcaatag

SEQ ID NO: 141024 - DNA, 476 bp, Homo sapiens
tcgaacgacgcttcacatagccggctaggtggacgcttcacctggacgcgcatgagacttggagccgtgactcagattgggggacctcccttcggagatcaatcccctgtcctcctgctctttgctccgtgagaaagatccacctacgacctcaggtcctcagaccgaccagcccaagaaacatctcaccaatttcaaatccagactccactggaaatcggactgttcaactcacctggcagccactcccagagcccctggaactctggcccaaggctctctgactgactccttctcggcttagcggctgaagactgatgctgcccgatcgcctcggaagccccgtagaccatcacggacgccgagcttccggtaactctcacagtggaaggtaagcccgtccccttcttaatcaatacggaggctacccgctccacattaccttctttccaagggcctgtttcccttgcctccat

SEQ ID NO: 141025 - DNA, 1245 bp, Homo sapiens
tcactgaatcatgggggtcccgtcgcggctggcggggttgtcgctcggtgtgctggcgtgcggttgcgtgtgggttgcgtggggcgtgttctgttggtggtttgtttccggcgcacgtccgggccgatgcgctgcgatggcctctttcgttaggtcgctgtcaccgcttctgcgtctactcgtcccttgcgtcggtcgctcttgtgatgaatatgctgccaacggccttctcgcgaaacgggacgtaaatggccgcgacatggatactcctcgcgtaaggcgggtcatgggggtcggggtacccagtaggatgctgcatccgatgggacgacttttccaggcgggttccaatcgccctcgggttatgcgccggagtacgttcctggttcgcgggtgtttcgcccaacactgctgaacttcgtagtcgtccgagttgttctgtggatcgcctggttccaggggctgtctggtagcattaccctcgtggcctccctcattatccacggagcccggctccacgtggcacaccagggcagggccggggagggtgtgtgcagacaccacctgggtatcttggaaatcagctaattccctgttgatgtcatccaacaggagcatccagttccatgtctggttctctggaaactcttgctctggaggaagccagccaccaagtaagaaatctgacaaccctgagaccgccatgctggagaggccacatgtggatgcattggctgacagcccctgcatcaacaccagccacgtgagcaagacacctgccttgttgagctcagtctccaaaacactcggctttttctttttcttctccccgcttccccccaccctttcctggcggccctgtatgcagtaagtccgccatgcattgaagctactaaccagtgtcatcaatcttattccagccttcttcagcttgctgcctttgctggggaagtgcccactcaggacagctacagattcagggatctgcaggccggccacagccagcaggccggggttgttcccagcacggccgcccgcattctgcctcctccagagtgagtatccgggcagtttcctggggagacctgggttcccatttgtatcacaatgacaacagctagtttctggcacctggcagccactcacagagcccgtggaactctggcccaaggctctctgactccttctcggcttagcggctgaagactgacgctgcccgatcgcctcggaagccccgtagaccat

SEQ ID NO: 141026 - DNA, 453 bp, Homo sapiens
tcgaacgacgcttcacatagccggctaggtggacgcttcacctggacgcgcatgagacttggagccgtgactcatactgggggacctcccttcggagatcaagcccctgccgtcctgctctttgctccgcgagaaagaaccacctacgacctcaggtcctcagaccgaccagcccaagaaacatctcaccaatttcaaatccagactccactggaaatcggactgttcaactcacctggcagccactcccagagcccctggaactctggcccaaggctctctgactgactccttctcggcttagcggctgaagactgatgctgcctgatcgcctcggaagccccgtagaccatcacggatgccgagctttaggtaactctcacagcggaagtgtctttatgagaaggggaaattagaaggtagacacacgcagagaatagaccatgtgaagat

SEQ ID NO: 141027 - DNA, 663 bp, Homo sapiens; identical to SEQ ID NO: 115467

SEQ ID NO: 141028 - DNA, 522 bp, Homo sapiens; identical to SEQ ID NO: 114701

SEQ ID NO: 141029 - DNA, 516 bp, Homo sapiens; identical to SEQ ID NO: 114704

SEQ ID NO: 141030 - DNA, 615 bp, Homo sapiens
ttagaggtctaaaagatcctttgagaaaccatcaaataatctctctgtcttcatctccatgatcttgtcctcctttgccccttccactgtactggtgtccccaatttcaaaaggtttcaggtgttctgttgaacaaatcttttgtttctcattactcttcccttccatctcttcacttctctgcctggtatttagaaataaggctgatctccttacagtgaataattctctggtgcaggccacgagaggagcctggacttcgtcctccttgtggcagtaaagaggagcctctcccctctcttcaatttcaaatccagtaagcggcctctttttactctcttctccaacctccctaaccctcagcctctttctcctttcaatcttggcgccacacttcaatctctcccttcttttaatttcagttcctttcattttctggtagagacaaaggagacacgttttatccgtagacccaaaactccggtgccggtcacggactggcagccactcccagagcccctggaactctggccgaaggctctctgactgactccttctcagcttagcggctgaagactgacgctgcccgatagcttcggaagtcccgtagaccat

SEQ ID NO: 141031 - DNA, 1764 bp, Homo sapiens; identical to SEQ ID NO: 115471

SEQ ID NO: 141032 - DNA, 579 bp, Homo sapiens
gtgtcagaccacgcagggacgcctgccttggtccttcacccttagcggcaagtcccgcttttctggggaaggggcaagtaccccaaccccttatatctctgtgccccgatcccttatttccgcaccccaacctcatatctctgcgccccaatcccttatgtccgcaccccgacctcgtatctctgtgccctgacccctttcccgcttttctggaggcacataagaacttccaaacgactgaaccgcagcagccaggcgttcctccagaacctcctcccacaggagcttgctacacgtgccggaaatctggccactgggcaaaggaatgcccgcagcctgggattcctcctaagccacgtcccatctgtgtgggaccccactgaaaatctgactgttcaactcacctggcagccactcccagagcccctggaactctggcccaaggctctctgactgactccttcccagatcttgggcttagcagcttgaagactgacactgcccgatcgcctcggaagccccggagaccatcacggacgccgagctgccagtaactctcacagtggaagctatctggtc

SEQ ID NO: 141033 - DNA, 794 bp, Homo sapiens
ctagagctgaagcccaaacgcctccagggttttccattcatattccgttaccacctgttcaccgatcttgtctccacagtgagaggtgacagcgtgctggcagccctcacttgctctcagtgcctccttggcctcagtgcccactctggccacacttgagaagcccttcagcccgccactgcactgtgggagcccctctctgggctggccgaggcggagccggctccctctgcttgcagggaggtgtggagggagaggcacgggcaggaaccagggccgcgcatggccctcgtgggccagcgggagtgcgtgagggtctgtggcttccttcttgaggtcagtgaagtcaggaatccaccaattttggacacaacagcatatgtcaaggctgtttttctgatgtggcagctgccaccacacctccccggcaggagagccacatgccagagaggccgctctctgagatgctcaaagtccatgttcctacacagctctttggcagctgtctctctatacttgtacaactggaattcaaattctttgtacatctggttattctgcttctcattgagattgagggaaggtgagagcacctggcagctgaggaattctagaagaatcttgtcaggtccagaagtcttaggaaagccgcctgtatggcccaagtccttggaatctggcagccactcccagagcccctggaactctggcccaaggctctctgactgactccttctctgcttagcagctaaagactgacattgcccgatagcctcggaagccccgtagaccat

SEQ ID NO: 141034 - DNA, 1971 bp, Homo sapiens
atgggagccatgttcattgtgggtgccgggaaactgcctttcctctccctggaagagcttcaagaaggaggtaaaactccagtttcattctgcgagcattcgtggaggtgcgtggaaggggctgaattgaagggagaaagccgtgaggaggaccaggtctccacaggagcctcccgttcctctattagatgccagcagggcaaggggtctgtcacgcagatcccttggtttctagctgggggaagcacatggtcctgtgagagcttccaatgtcacaccccggtgctcctaagagcactttgtggatctctcatcaatgccttcacaccaagcagcaacttcaaaacatgcctaagtcacagcagagaggctgcaccattttccctttcatcacctctagcaattggtaacctcagtgcaggggaagacagctgggagagaagacaggccccatcagagcctgcctcagccatggtgtgggagaatcttagtttcaatccattttcttcattcagtatgcaaggagatgacccggaagtgattgtgttatttcccgtggctccttgcatggattcatttgtcttcaattgctcatatcagtcctctattgcattcacctcttcactgcccagttctcaaagtctggcagccctcagacttgggctgagatgtgcagcttcccgagagatcagggagagcatagatatatccctttttcagttcagaggaaaacacctaacaacaacctcaacaaacacaacaacaacagcaaaaggacgaagcgtgagccagaaattccatctgcaatcagctccaacagggagaggcttggacatgcccgccattgacgctgccaggcctcgaactctcctgagagttggatttttcccagtctgtgctatctcactcttatttgaggaatttgagtcagagcaaaatgtgggcagagaaggagaaggaacaccaacacctcaattattgagggaaaagacgtgcaggttttctgtagcagtgaacctgaaggaagacactgctttgtgtctggctcccaaagaaaaaggccaagttgatctttcctgtgaaacagctgaagcaggatgtcttgagggtccccaggccattgtgtgcatgaagtgtgctcgtccctctgcaggtgacaccccggcttgtggtgaaaccctggctagtggatatgccggcatcccctgggattccagtccatcaaggtggccaccggccaccagggcttcacatgcttcactgagcgctgtcccctgtccccggcacacgggttccctgccttgctgtgtgttaccttctgaagataccaccgccatgatgagaagaggccgtgcctgcaattcacaaggtcaccacttttgctccgtcatggatccgggtttggctgttgttcagcatgcagcacctgctttcgattctgagatgcatcccacatggtccagcacgaagcgttctttggacagaacgcctgccatgaatgtcattcctcactggcctaccgtggtgctcaggtgttcaccgttgggggtagcaggtccccggagtgtgatgttccccttcctgtttagcccctttggtgtgtgtaactgtcaacctcaggatttctttgtcaagctcagcagagtatgcagagcagagtctaggaaggacagcttagatttttggaaaaccacgccagaccacaccggaaaacacaaaactttgagccttgactcccagcgagaggcgttcagctacggcaagaggggctggtctcagcgtctcttaatcagccccagggtggtttatctaagtgaagtaaggttgcccgtaagctatgctctctcccctaaactctctctggctgtgatgtctgggtcctcaggtcccaaatcttggcagggacagcccgtgagtgctggagccgggtccggtggggaagcagggatgtgtgcctcttccactggctga

SEQ ID NO: 141035 - DNA, 963 bp, Homo sapiens
tggtaaacattaaaggcttgaaaaaccatattttgttagccctaaaatgtacatttttcttcccattttaacttatctgaaattgggatgcatctcattactgtcaaccaggtgatagtcatgtaacgctcctaccgtgtgcatgtgtgaatttacagcttgtcatcgtgtcatccctttaaccaacatgtgttttgttggtatcaaatgtgtcaggtttaattgacattttaaaatgtcttcaaaaagatcacactatgattcagcattgaaacgaaaagttattgtgtatgcagaaaagcatggaaacagagcagcagggcgtacatttgatattagtgaagcaaatattcgtcgctggagaaatgatcgcaattccatattttcctgcaaagcaacaacaaaatgttttacgggacctaagaaaggtaggtacccacaagtagatgaagctgtactacgtttcgtcagtgagacacgtgcaaaaggattgcctatcacacgccaagcaatggcaattgaaggcaggagaagttgccaaaaccctaggaattgatgaaacaaaattcaaaagccaccaagaggcttggtgtgtaccggatttccatgcgtcgagccaggactatcaattaaggcatcaaacatcgtttttgtcccaagctccccactgccattaaacagaagacagtgttggagcactctttcaagaagtgctgcataaccagtactcttgacaacaccgggagagacgttctgtggaaaaatgcagacatcaatgactgtggtttgaaaagtgattcagaagagttggattccagaatatgaagttataattataacttaaccaatttatttcacacattttctttacatatgcacaagattgatgtgataaaaatctgtttaactcaaagcgctgtttcaataaatataaacattttctgtgaaaaaaaaaaaaaaaaa

SEQ ID NO: 141036 - DNA, 560 bp, Homo sapiens
ggcagagctagctgaggttttattttggaccaaaaaaaaaaagcaattgaattgttttgtagctggaggcatgggcaaggggggtccccaggtagtaaactccccaggtgggctgagggctagggctgagcctcaggtgggtctcctgttcccagtgctaccctgcatagcggcctccttcccaggctctggggcagcgcaggaggggtaggctgggaggggctgccgcagctgttcacttgggcaggacgtcagaggactcagacaccagcttcccatcacgtgtctcgatcttcttcacaaccacggccctggaggagctggtgcggctgaaggagctggagcccgcgccagagccaaagctggagcccaggctgtagctgaggccggggcttgtgaggcccccataggccgagctcagaccacctgcatagccgctggtggtcttcgtatgaatactcatgttctgcatcccagactccagccggctctcctcgccctccagcagcttcctgtaggtggcgatctcgatgtccagggccagcttgacgttcatcatg

SEQ ID NO: 141037 - DNA, 1971 bp, Homo sapiens
atgggggcagactttccccttgctgttctcatgatagtcagattagccatttcagaagagagctggatctgctccaacacaaggaccccaggtttacttactggtgattttgattcagaggcctcaaaacgccagccactcagcagaaatgagaccatgttaactgtcaaagccttgagagagaagaccaatttttacacatttccctactactttgccataaaatataatcctgagggtttcactctgtcaccgaggctggcgttcagtggtggtgctattacagctcactggagtctcaaactcctgggcccaggcagatcccaaatgtggcagcttttagcagcagcatgctggatgcttcttcttggatctatgtatggttatgacaagaaaggaaacaatgcaaaccctgaagctaatatgaatattagccagattatttcttactggggttatccttatgaagagtatgatgttacaacaaaagatggttatatccttggaatttataggattccacatggaagaggatgcccagggaggacagcagaacaagatgctggagaccatgtggagcctgcagcagcagaagacagctgggagaacgtggacaacatggagagctgcatcaacaacttgctgcggcagctggacacatgggaccagaagctgaaggtggaggtggagcttgacaacatgcaggggctggtggaggacttcaagacggaccaaacaggagagggcgccgtagcttcaccggaacctggagctgatgaatgtcaagctggccttgggcatcgagagcgccacctacaggaagctgctggagggcgaggagagcccgctggagtctgggacgcagagcagtccagctttgactgtggtggggactccggctctttcagccgcaccagctcctgcagggccatagttgtgaagaagattgacccctgcaatgggaagctgcatggcttaattgcatctgccagtaactggatttgcaacctgcccaacaacagtttggctttccttctggcagatagtggttatgacgtgtggttggggaacagccgaggaaacacttggtccagaaaacaccttaaattgtcaccgaaatcaccagaatactgggccttcagtttggatgagatggctaaatatgaccttccagccacaatcaattttatcatagagaaaactggacagaagcgactctactacgtgggccactcacaaggcaccaccatagcttttatagcattttctacaaacccagaactggctaaaaagattaagatattttttgcactggctccagttgtcacagttaaatacacccaaagtcctatgaaaaaactaacaaccctttccaggcgagtagttaaggtgttgtttggtgacaaaatgttccaccctcatacattgtttgaccaattcattgccaccaaagtgtgcaatcgaaagctattccgtcgtatttgcagcaacttcctatttactctgagtggatttgatccgcaaaacttaaatatggtaggtgaggatttgagaagaaagcttttctgccaacaattctcatctcttcttacccgaaacgtccttcgcttagataaaggctatggttttgatatttatcttgctgtgcctacgccttatgtcagacccactgaagtagaatctcaggggcttgcagaatttcaacagcagactgctgcctctctgaatataaatcatgatgagaataattttaaactaaaaatcaggactaaattggctgttaattctggtcagctccaagcttttgattggggaaactctgatcagaacatgatgcacttccaccagattgaaatgactgaaatgacagatacacagttcagaatctggacggcaacagagatcattgaaattcaggagaaagttgaaactcagtccaaggaatctaaggaatccagtaaaataatttaa

SEQ ID NO: 141038 - DNA, 836 bp, Homo sapiens
cagagaccactgtgcaagcgtaatcacttcccaagaagggttttgctttaaagttttgttatgagttgctaaaatggtgaaatgctgctccgccattggatgtgcttctcgctgcttgccaaattcgaagttaaaaggactgacatttcacgtattccccacagatgaaaacatcaaaaggaaatgggtattagcaatgaaaagacttgatgtgaatgcagccggcatttgggagcctagaaaaggagatgtgttgtgttcgaggcactttaagaagacagattttgacagaagtgctccaaatattaaactgaaacctggagtcataccttctatctttgattctccatatcacctacaggggaaaagagaaaaacttcattgtagaaaaaacttcaccctcaaaaccgttccagccactaactacaatcaccatcttgttggtgcttcctcatgtattgaagaattccaatcccagttcatttttgaacatagctacagtgtaatggacagtccaaagaaacttaagcataaattagatcatgtgatcggcgagctagaggatacaaaggaaagtctacggaatgttttagaccgagaaaaacgttttcagaaatcattgaggaagacaatcagggaattaaaggatgaatgtctgatcagccaagaaacagcaaatagactggacactttctgttgggactgttgtcaggagagcatagaacaggactatatttcatgaaataatttcatgttacgttccacctaaaattgtcattggtacaaatttttataaaatctcatttaccatcactaaataatatccatcatttaaa

SEQ ID NO: 141039 - DNA, 670 bp, Homo sapiens
atgcggattggtttcatcaagggcctagaaggtgcaagatcagaaggttatattatcactgaaataccatcactttcacaggatgccatgactaccttacagcaaatagaattaattaaaaacttaaacctgaaacctgatgttataatcaatataaagtgtcctgactatgatttgtgccagagaatttctgggcaaagacagcacaataatacgggatacatatacagtagagaccagtgggatcctgaagtcattgagaatcataggaaaaagaagaaagaagcccaaaaggacggaaaaggagaagaggaagaagaggaagaagagcaagaagaagaagaggcatttattgccgaaatgcagatggtggctgaaattcttcatcatctagttcagaggcctgaagattatttggaaaatgttgaaaacattgttaagctttataaggaaacaattctccaaactttagaagaagtaatggctgaacacaatccccagtatctcattgagctaaatggaaataaaccagcagaggagctctttatggtgagtgcagtgttaagcaggaatacttcacagcatggaaaatttaaatctattgacagtattgtacttcttttaataaacagaagcatatttatatttgaaccccattaaaaaaaaaaaa

SEQ ID NO: 141040 - DNA, 669 bp, Homo sapiens
atggtgaccactaagctgactctgaaaaaagaaattaaagttcaccagatggtcaagagagaatatggcttttggaaacactgccaagagagcttgttcacccatttccaccatgtgaggacacagcaacaaggcaccatctatgaaccaggaaatgggtcctccccagacatcacatctgctggtgcctcgatcttcgacttcccagtctccagaactgccccagtggttactgtcaaaatgggcaagttcctgaaacctcggaaagtggtgtttgtcctggctggatgctactccagacacaaagctgtcatcgtgaagaacattgatgatggcacctcagatcgcccctacagccatgccctggtggctggaattgaccactatccctgcaaagtaagagctgccatgggcaagaagaagatcaccaagaggtactctgtggatatcctcttggacaaaactgtcattaataaggatgtctgcagacaccctgctcttaaacccaaggctggacaagaagccaagatcaagtttgaaaagaggtgtttggccgtttccataaacctaggtcaagaatcacttcctcaacgacagagtgaacaggaggcaattaaaacaggtacggacctggtatgggaaaaacgattgctggggaaagaactgtaa

SEQ ID NO: 141041 - DNA, 608 bp, Homo sapiens
ttttttttttttttttgctggtaggccccgggtggttgcctgccgaaaatgggccaagttccatgaaaccctgggaaaggtgggtgctttgtcctgggctggacggcttactccgggaccgcaaagctgtccatccgtgaagaaacatttgatggatggcaccctcaggatcgccccctaccagcccatgctactggtggctggaaattgaccggcctacccccccgcaaaagtgaacagcctgccatgggcaagaagaaagatcgccccaagagatcaaagataaaatctttttgtggaaagtgytataactaccaatcaccctaatgccccacaagggtactctgtgggatatccccttgggacaaaacttgttcgttcaattaagggatgtctttcagagatcctggctccttaaaccgcaaggccccgacgggaaggcccaaggttcaagtttgaaagagagagtacgagacagggcaagaaaccaagtgggttcttcccagaaaacttgcgggttttaagaatgcctttggttttgattcattaaaaattataaagaaaaaaaaaaaaaaaaaaaaaaaaacaacaaaaaaagggcggccgct

SEQ ID NO: 141042 - DNA, 3328 bp, Homo sapiens
tctcagatcctgacggtgcagcagcccgcagcctcagccagggagtcccagccgctttcaatggaggagaagcccggccagccacagcctcagcaccatcacagccaccaccatccgcaccatcaccctcagcagcagcagcagcagccgcaccaccaccaccattattatttctacaaccacagccacaaccaccaccaccaccatcatcaccagcagcctcaccaatacctgcagcatggagccgagggcagccccaaggcccagccaaagccgctgaaacatgagcagaaacacaccctccagcagcaccagggaaacgccgaagaagaaaacaggctatggtggaactaaacggtaatgcctggaggaaaggaggaaaatatcctttaaaaagaacccctgagttcctgattgaaagccccaccccaaccccctatttccaggggttccttcaatgggcaacccagcaagttgtaggacactaggccttgaaggcagactgttaaagggcccaacaccctttgggaaagcaggaattaaaacccaagaatttcattcagaaaaacagtatggacaaaaagaatgggaagtcttatgaaaataaatctggagagaatcagtctgtagataagtctgatactataccaattccaaatggtgtggtaacaaataattctggttatattactaatggttatatgggtaaaggagcagataatgatggtagtggatctgagagcggatatacaactcctaaaaaaaggaaagctaggcgcaatagtgccaagggttgtgaaaaccttaatatagtgcaggacaaaataatgcaacaagagaccagtgtcccaaccttaaaacagggacttgaaactttcaagcctgactatagtgaacaaaagggaaatcgagtagatggttcgaagcccatttggaagtatgaaactgggcctggaggaacaagtcgaggaaaacctgctgtgggtgatatgcttcggaaaagctcagatagtaaacctggtgtgagcagcaaaaagtttgatgatcggcccaaaggaaagcatgcttcagctgttgcctccaaagaggactcgtggaccctatttaaaccacccccagtttttccagtggacaatagcagtgctaaaatagttcctaaaataagttatgcaagcaaagttaaggaaaacctcaacaaaactatacagaactcttctgtgtcaccaacttcatcttcatcatcttcatcatctaccggggaaactcagacccaatcatcaagtcgcttatcccaggtccctatgtcagcgctgaaatctgttacttctgccaacttttctaatgggcctgttttagcagggactgatggaaatgtttatcctccagggggtcagccactgctaactactgctgctaatactctaacacccatctcttctgggacagattcagttctccaggacatgagtctaacttcagcagctgttgaacaaattaagactagcctttttatctatccttcaaatatgcaaactatgctgttgagcacagcacaagtggatctgccctctcagacagatcagcaaaacctgggggatatcttccagaatcagtggggtttatcatttataaatgagcccagtgctggccctgagactgttactgggaagtcatcagagcataaagtgatggaggtgacatttcaaggagaatatcctgctactttggtttcacagggtgctgaaataattccctcaggaactgagcatcctgtgtttcccaaggcttacgagctggagaaacggactagtcctcaagttctgggtagcattctaaaatctgggactactagtgagagtggagccttatccttggaacccagtcatataggtgacctgcagaaagcagacaccagtagtcaaggtgctttagtgtttctctcaaaggactacgagatagaaagtcaaaatcctctggcctctcctacgaacactttgttaggctctgccaaagaacagagataccagagaggcctaggaaaggaatgatagctgggggttctttttgacctgagggctgctattgtatatcacactaaagaaatggaatctatttggaatttgcagaagcaagatcccaaaaggataatcacttacaatgaagccatggatagtccagatcaatgaaggaccagactgcctattcgtaacctttctgcagcattagagccatcgttcatgggggacacaaggcttttatgctcctagatcttcaacgcagcagaggaaccataagtagaatcacaggataatatatacaaatatatatatatacatatatatatatatagttatttaaaaaaaggcaacctgaaaagtaaattagacctccttaaggaatcaaatttatttccaagagacctacctcatggttatttaatctccggtactgaataggttttttttccttctgttagtttttgtttttaagtgtgaatgcaagtgattaatgaatacagacttaacaagtgtggttctaaagttcctgctgtcatcaacttgggcaacaaatgacccactggaaaggcaaatccacttaaaagatctctgtatcttgttctgtgactgaagtgatacactaatcacggggaacccagaatgattcaacattttccccccactcctcccttgatctttttggttttactttaattaagcccctgcgagaatgctggataaaatgcccttgaagttagccagggtgtatttttttagcgaatatgatttgcatgtcttgccaggagttaagcggcctctggggtgttggggaaatactttatttctttccatttattttttgtggggcggggataggggagggcattgaagttctacaattctggaatagttagttgatggtacatagttaaccttggctttggttacatattggactttaacaactgattaatctatgcgtgttatttaaatataagttgcataacaagcatttggcttagatatacaatctggaaaaatattcctgtgcccatattttaatgtaattgtataactgggagcaaaaatatattctgcttttcaactgtaggtgctccagacttgctctccgtcactaacactaaatgtgctgttttccttgtttttcatcaaacatttaagacaaacttagacctttctgtaaattatcttttaatttctcagcaaaatctaaaaggggaagaaaaaagtccatgaaaactaagacttttcatgtttttagccagtgagaagataataaaccctgactgtagaaggtgtgttttcatgca

SEQ ID NO: 141043 - DNA, 1422 bp, Homo sapiens
atgcctctcattccttgcaacttgccgttaaggcaggaatatgaatgtgggttgaaagtggatgaatggaagcttggaaagggaataagagaagcccagggcacagtcacttcctgtagctctccaattcaaaggcatcccgggtgtaagcccacagttcagtgtatggctgagatgaactacctggcgattaaactgcagccagctgccttcaggcatcaaagaacctgcggatatgttcggttgtatggcaaaaataacttggcagatgtggtccacattgtggaccttgtgacagatctggaggagcctggattatctggtgccactaccgccacgggcctcaccatctcctctttcttctcccacctctttgacaagaagcagatgcacattctgatggttggattggatgccgctggcaagacgaccattccgtatgaactgaagttaggggagatagtcaccaccattcctaccgttggctgcaatgtggaagcggtagactataaaaacattcgtttcacagtatgggatgctggtggtcaagatagaattaggcctctccggaagtattacttcccaaatacccaatatcttatatttgtggtagatagcaataatcgtgaaagaattaaggaggtagcagtctcgtctgctgctgcagggagccctgcagtactggaaaacagccagcagctgtcacggatgcgccagcagcttctgcttctccgtgtaatgcacgtcccccatgcccctagctttggggacttgccgtttgccccagcaccggctggcacagggatgtgtctgtggagggggtcacagtctacaggacaaatcagtgcaggtaccagacccatgctgattatcaaacactataaatacagcaggaagggcaaggaagagggagagtccaaactcgcctgggcacgcgtgtgtgcgcagcagccccggcagagcaggcacctccgcaggtcccctccatttaataatgtatggcctaatacagtacatggtggtgggtgtcatgaagacacgttacacttcgagggcctgaatgattggggtcaaaggctctgtggacagttttatagcccaaatcacatgcactgtatcaaagtcatctggtgtgtactttatatagttcttctgggacatgctgcccagttgaaatgcctaaaactgcttcctgggagcatttgcagtatgaacatgcttttctactgcgtagggcttgacatatgtgttattatggctgtcaaaaggaagccagacccagaagctgctgccacactgtggtgtaactttttcttggaatgtgaattctcccgctatacagagggaattgcagaaactagagtggtcctgtcagaacggaagctagatcttggtgtttctctgctccaagtcctgcaatga

SEQ ID NO: 141044 - DNA, 880 bp, Homo sapiens
cctgagggctctccagttggaccacgagggtctgacatccaggaggatttccaggagagagcaaccgtcactagggaatatgctgcccagcactgactgtactgagcagcagtgttgtgtgcctgttgggttgatgccatggatagccaggcgttcagaactgaacacgacacctaaaaggcaaacacgaactgtgaatgtgccagtgtcagatgctgccttggtggtcatgtgtgggctggcaggattgcaccctgtgccctctttgaatgcaggggcatgtcaaggccaagggtcaggaagagagctttggcctcgccagcctggtccccagagtggaagtggcagggcaggaggggtgtggcagacagagcacatatcgcccccagccttgcccccagatgttgagtgctgggtgccggagtgcagaggggaacaaggcctggaccctgcctggggagaggcagcacctgggagatctttgtggcttcagatcccatgtggtcctccagatgctcccattgtgaccattttgtttgctctgctgcctcatcctgggccacttcaatttgggtggctgctcagcgttcaggtggagtcgggccactttccacagccatctcatctgtggcctgtgcctccacttccaggaccaagagtccccccaggatgcccaacatcagggcaggcaccatgtagtggagagtggggccaggggccatctgccatggctgtttgggctggggaaggagagcagtacttctggagcatgtgctgtgctcagggccagctccctgtagggtgctggagcagggaccagggaaaggagagagtcacttggtctgaactgggggtcttggatgtgatcatcttcctgtag

SEQ ID NO: 141045 - DNA, 4454 bp, Homo sapiens
ctcgctcgccctcagcgcggcccccgccatgacggaggcgggtgccggtgccgttgccgccgctgccgtcgcagggggggagtcgggttcccagaaagtagcttgatgagtgtccaaagtagcagtggaagtttggaggggccgccatcttggtcccagctctccacgtctccaaccccgggctcggcggcggcggccaggtccctgctgaatcacacgccgccatccgggaggcccagggaaggtgcaatggatgagcttcatagtctggatccaagaaggcaagagttattggaagctagatttactggagttgcaagtgggagcactggaagtacgggcagttgcagtgttggagcttaaaaataaaccccagctctctagctaccttgagcaaagaagggaagttattgatcgaatatcagtcaattcacagaatgatttggaagcctggaagaccagagttgcacaggaaccagggcaaccttgggtgatgaagcaacagaaactgctcatccttttgattgtgggatctccagtggattaaaaaaaaaaagacggccgggcgcagtggctcatgcctgtaatcccagcactttgggaggctgaggctggcggatcacgaggcctcaacaaataacgaaagctctaatcacagttttggaagcttgggatctttaagtgacaaagaatcagagaaacaactggcaggcagctgaaaggactgtgcaagtgacgggactttatctgcagtaggttcccttgagacaccggagaagaaacaatcggaatcatccaggggaagaaagagaaaagcagaaaaccagaatgaaagtagtcagggaaaaagtattgggggacgtggccacaaaattagcgactattttgaataccagggtggaaatggctcaagtccagtaagaggcatacctcctgcaatccgttctcctcaaaattcacattcacattccactccttcctcatctgttcgaccgaatagcccttctcctactgcattagcatttggggaccaccctattgtacaaccaaagcaattatcctttaaaattattcagactgatctcacaatgctgaaattagcagcattagaaagtaataaaatccaggacctggaaaagaaggagggacgtatagatgatttgctcagggctaactgtgatctcagacggcaaatagatgaacaacaaaaattacttgaaaaatacaaagaacgattaaataagtgcatatcaatgagcaagaaacttcttattgaaaagagtacacaagaaaagctgtcaagcagagagaagagtatgcaagatcgattacgcctcgggcactttacaacagttagacatggcgcttcatttactgaacaatggacagatggttttgcatttcagaatcttgtgaagcaacaagaatgggtgaatcagcaaagggaagatattgaaaggcaaaggaaacttctagccaaacgcaaacctcccacagctaataattctcaggcaccctctaccaattctgaaccaaaacaaaggaaaaacaaagcagtcaatggagcagagaatgatccctttgttagaccaaatttaccacaactgttgactttggcagaatatcatgaacaggaagaaattttcaaacttagactaggacatctcaaaaaggaagaggcagaaatccaggcagaacttgaacgtttggaaagagtcagaaatcttcacatacgtgagctgaaaagaataaacaatgaagataattcacagttcaaagatcacccaacattaaatgaaagatatttattacttcatctgcttggtagaggtggctttagtgaagtgtataaggcttttgacctttatgaacaaagatatgctgctgtgaagatacatcagcttaataaaagctggagagatgagaagaaagaaaactaccacaaacatgcctgcagagagtatagaatacacaaagaactggatcaccccagaatagttaaactctatgattatttctccttggatacagatacgttttgtacagtgttagaatactgtgaaggcaatgacttggatttctatctgaagcaacacaagttaatgtcagagaaagaagctcggtctattgtaatgcagattgtaaatgcactaagatatctcaatgagatcaaaccccctattatacattatgatcttaagccaggaaacatcctactggtagatggaacagcatgtggtgaaatcaaaatcactgattttggtctgtccaagattatggatgatgatagctatggtgtagatggaatggatctaacttcccagggggcaggcacttactggtatttacctcctgagtgttttgtagttggaaaagagccaccaaagatttccaacaaggttgatgtatggtcggttggagtcatcttctttcagtgtctttatggtagaaagccatttggtcacaatcaatctcaacaagacattcttcaagaaaatacaatattaaaagccacagaagtccagttccctgtaaaaccggttgtaagcagtgaagccaaggcatttataagacgctgtttggcatatcgaaaagaagatcgatttgatgtgcaccagctggcaaatgacccataccttctcccacacatgagaagatcaaattcttcaggaaacctacacatggctgggctgacagcatcccctacacccccttcttcaagcataattacttactgactttcctccaagattggcatgatatctttgaatttgcttccagatgcacacttaagtttgagagcatttgagtgtttgttttctttttcttttttttttttttttttacacaagacgtggttaagaactgtttgtgaactgaagttcctcatagtgtcatttgtatgagagaggatcatggacaatgaataaatgcacacttctgactataattttgagcagtgaaggaaggatgactgcctgttacacagaaacaggaataccatgttaagatagaggaaaaaaattttgtttatttgggggaacactgtaaataacgtttataatacttaaatacatttggttgttactagagagttctaatatgaagggtagtttttcattatttaaaaacacatggaaaaatatgagacatatttctaacatacgaactatagtgcctggatacattcttcagcatttggcagttaatctgctgaaaccaaagtaagaactgaatgacagtgacagttgtgttttatagtaatagaatgtgagagttagaatctttggacaaagttaggctttgtcatttgcctattcagacttttaccaagttgtacctcgagatcacatgtccgttttctttcactggttatattaaagggagagctattatttctaaatactttacacctttgacaaaatgagctgcttgtgttgaaatcagttgaattcactaaattataatattgccagtgttttcaacacgttagaattgataacaggtatttttcttttgttaccaggccttgttcatcaaaacaggtgacagtgagtaaccaaatgcagaccagttctatgcaggataatgataaattcccttctagctctattgtaaattgttgtacagatgtcatatttcaattactaagtttcagcagcttattcttgtacaaatgtttaaaatatggcttttctaattggatattgtattttttttaagtcttcttgaaggcactctaattgctgctaaatgatgttgcttctttgctaaaaaattaaatgacctagaaggtgcaagttgactgtacatcatagatattaaaaagcagacagtcattaacaatcaagatgtaaaagtgatccatgttggacataattgagtttttaaatcagtttattgggttctagggctgtagaacacatagatactagatttttaatttgttcatggttattctacatttctagaaagttcttatcagcaagatggtcccataagcaaatttcttgtggtttgtacagatttgttaaaatgtgaacgttttctaactgcctcgtagggtagaaaccaatatttttcaggatgctgtatttcactcctgtaaggactttttctttattgtcacattcataatgctgatacttacatgtaagttgttcatgttgcagaaaaaggttatacgtaccacggattctctttaatattgtacagttaaactgtatttctgatgttgcaagccattttgttttttcattgtacatagacacattgtctctttaaaatgctgctgaaattgtagagagtatagccaaaacagtaataaacaatgacagttaaaatgtaaagactatgaaaattacattggaagggagctttcaagatggtaggatattgactaactgagctccttcacttaaaaatcagctgaataaattccttaagtatacttc

SEQ ID NO: 141046 - DNA, 726 bp, Homo sapiens
ctattctggggtgatccagttctttgtgtattctatactgcaggcatgtttgtagtagttttcttttttctcatctctccagcttttattaagttgatgtagcttcacagaagcatagctttgttcataaaggtcaaaagccttatacacttcactaaagccacctctaccaagcagatgaagtaataaatatctttcatttaacattgggtgatctttgaattgtgaattatcttcattgtttattcttctcagctcacgtatgtgaagatttctgactctttccaaacgttcaagttctgcttggatttctgcctcttcttttctgagatgtccttgtctaagtttgaacatttcttcctgttcataatattctgccaaagtcaacagttgtggtaaatttggtctaacaaagggatcattttctgctccattgactcctttgtttttcctttgttttggttcagaattggtagagggtgtctgagaattattagctgtgggaggtttgcatttggctagaattttcctttgcctttcaatatcttccctttgctgattcacccattcttgttgcttcacaagagtaactccaataaatctagcttccaataactcttgccttcttggattcagactacaaagctcatccattgcaccttccctgggcctcctggatggtggtgtgtgtttcatcagggacctggctgccgcttgccgctgagc

SEQ ID NO: 141047 - DNA, 4299 bp, Homo sapiens
gaagtatacttaaggaatttatccagctgatttttaagtgaaggagctcagttagtcaatatcctaccatcttgaaagctcccttccaatgtaattttcatagtctttacattttacctgtcattgtttattactgttttggctatactctctacaatttcagcagcattttaaagagacaatgtgtctatgtccaatgaaaaaacaaaatggcttgcaacatcagaaatacagtttaactgtacaatattaaagagaatccgtggtacgtataacctttttctgcaacatgaacaacttacatgtaagtatcagcattatgaatgtgacaataaagaaaaagtccttacaggagtgaaatacagcatcctgaaaaatattggtttctaccctacgaggcagttagaaaacgttcacattttaacaaatctggacaaaccacaagaaatttccttatgggaccatcttgctgataagaactttctagaaatgtagaataaccatgaacaaattaaaaatctagtatctatgtgttctacagccctagaacccaataaactgatttaaaaactcaattatgtccaacatggatcacttttacatcttgattgttaatgactgtctgctttttaatatctatgatgtacagtcaacttgcaccttctaggtcatttaattttttagcaaagaagcaacatcatttagcagcaattagagtgccttcaagaagacttaaaaaaaatacaatatccaattagaaaagccatattttaaacatttgtacaagaataagctgctgaaacttagtaattgaaatatgacatctgtacaacaatttacaatagagctagaagggaatttatcattatcctgcatagaactggtctgcatttggttactcactgtcacctgttttgatgaacaaggcctggtaacaaaagaaaaatacctgttatcaattctaacgtgttgaaaacactggcaatattataatttagtgaattcaactgatttcaacacaagcagctcattcttgtcaaaggtgtaaagtatttagaaataatagctctccctttaatataaccagtgaaagaaaacggacatgtgatctcgaggaccaacttggtaaaagtctgaataggcaaatgacaaagcctaactttgtccaaagattctaactgtcacattctattactataaaacacaactgtcactgtcattcagttcttactttggtttcagcagattaactgccaaatgctgaagaatgtatccaggcactatagttcgtatgttagaaatatgtctcatatttatccatgtgtttttaaataatgaaaaactacccttcatattagaactctctagtaacaaccaaatgtatttaagtattataaacgttatttacagtgttcccccaaataaacaaaatttttttcctctatcttaacatggtattcctgttcctgtgtaacaggcagtcatccttccttcactgctcaaaattatagtcagaagtgtgcatttattcattgtccatgatcctctctcatacaaatgacactatgaggaacttcagttcacaaacagttcttaaccacgtcttgtgtaaaaaaaaaaaaaaaaaaaaaaaagaaaaagaaaacaaacactcaaatgctctcaaacttaagtgtgcatctggaagcaaattcaaagatatcatgccaatcttggaggaaagtcagtaagtaattatgcttgaagaagggggtgtaggggatgctgtcagcccagccatgtgtaggtttcctgaagaatttgatcttcgcatgtgtgggagaaggtatgggtcacatgccagctggtgcacatcaaatcgatcttcttttcgatatgccaaacagcgtctaataaatgccttggcttcactgcttacaaccggttttacagggaactggacttctgtggcttttaatattgtattctcttgaagaatgtcttgttgagattgattgtgaccaaatggctttctaccataaagacactgatagaagatgactccaaccgaccatacatcaaccttgttggaaatctttggtggctcttttccaaccacaaaacactcaggaggtaaataccagtaagtgcctgccccctgggaagttagaaccattccatctacaccatagctatcatcatccataatcttggacagaccaaaatcagtgattttgatttcaccacatgctgttccatctaccagtaggatgtttcctggcttaagatcataatgtataatagggggtttgatctcattgagatatcttaatgcatttacaatctgcattacaatagaccgagcttctttctctgacattaacttgtgttgcttcagatagaaatccaagtcattgccttcacagtattctaacactgtacaaaacgtatctgtatccaaggagaaataatcatagagtttaactattctggggtgatccagttctttgtgtattctatactctctgcaggcatgtttgtggtagttttctttcttctcatctctccagcttttattaagctgatgtatcttcacagcagcatatctttgttcagaaaggtcaaaagccttatccacttcactaaagccacctctaccaagcagatgaagtaataaatatctttcatttaatgttggatgatctttgaactgtgaattatcttcattgtgtattcttttcagctcacgtatgtgaagattcctgactctttccaaacgttcaagttctgcctggattcctgcctcttcctttttgagatgtcctagtctaagtttgaaaatttcttcctgttcatgatattctgccaacgtcaacagttgtggcaaatttggtctaacaaagggatcattctcagctccattgactgctttgtttttcctttgttttggctcagaattggtagagggtgcctgagaattattagctgtgggaggtttgcgtttggctagaagtttcctttgcctttcaatatcttccctttgctgattcacccattcttgttgcttcacaagattctgaaatgcaaaaccatctgtccattgttcagtaaatgaagcgccatgtctaactgttgtaaagtgcccgaggcgtaatcgatcttgcatactcttctctctgcttgacagcttttcttgtgtactcttttctataagaagtttcttgctcattgatatgcacttatttaatcgttccttgtatttgtcaagtaatttttgttgttcatctatttgccgtctgagatcacagttggccctgagcaaatcatctatacgtccctccttcttttccaggtctaggattttattactttctaatgctgctaatttcagcatcgtgagatcagtctgaataattttaaaggataattgctttggttgtacaatagggtggtccccaaatgctaatgcagtaggagaagggctattcggtcgaacagatgaggaaggagtggaatgtgaatgtgaattttgaggagaacggattgcaggaggtatgcctcttactggacttgagccatttccaccctggtattcaaaatagtcgctaattttgtggccacgtcccccaatactttttcctcctgctgtacgacccatttcccaataggccaaggactggaagaccgggaggttggggaacccctgactactttcattctggttttctgcttttctctttcttcccctggatgattccgattgtttcttctccggtgtctctgattctttatcacttaaagattccaagcttccaaaactgtgattagagctttcgttatttgttgaggctttagctccaacactgcaactgcccgtacttccagtgctcccacttgcaactccagtaaatctagcttccaataactcttgccttcttggatccagactatgaagctcatccattgcaccttccctgggcctcccggatggcggcgtgtgattcagcagggacctggccgccgccgccgagcccggggttggagacgtggagagctgggaccaagatggcggcccctccaaacttccactgctactttggacactcatcaagctactttctgggaacccgactccccccctgcgacggcagcggcggcaacggcaccggcacccgcctccgtcatggcgggggccccgctgagggcgagcgagagagcgagggctgggaggggagagtcaaggggatgggggaggaaaccgagaagaggggaggtggggaggaaagaggtgagggaaggagagggtacagggaggcccgc

SEQ ID NO: 141048 - DNA, 1209 bp, Homo sapiens
atgaggtacagtggtaaagcatgtgagatgtccagtttcaggggaacaatgggtgcaggtgagtacaagtccatgggaatgtccaacctgacaagactctctgaatttattctcttgggactctcctctcggtctgaagaccagaggccactctttgccctctttcttatcatatacctggtcactttgatgggaaatctgctcatcatcttggctatccactctgatcctcgacttcaaaaccctatgtattttttcctaagcatcttgtcctttgctgatatttgctacacaacagtcatagtcccaaagatgctcgtgaacttcttatcagagaaaaagaccatttcctatgctgaatgtctggcacagatgtatttcttcctggtttttggaaacatagatagttatctcctggcggctatggccatcaaccgctgtgtagccatttgtaacccattccattatgtcactgttatgaaccgcagatgctgtgtgttgctactagcattccccatcactttctcctatttccactctctcctacatgtcctcctggtgaatcggctcaccttttgtacatcaaatgttatccatcattttttttgtgatgtcaaccctgtgctgaaactgtcctgctcctccacctttgtcaatgaaattgtggccatgacagaagggctggcctctgtgatggctccatttgtctgtatcatcatctcttatctaagaattctcatcgctgttctcaagattccctcagcagctggaaaacacaaagccttctccacctgcagctcccatctcactgtggtgattctgttttatgggagtattagctatgtctatttgcagcctttgtccagctatactgtcaaggaccgaatagcaacaatcaactacactgtgttgacatcagtgttgaacccatttatctacagtttaagaaacaaagacatgaaacggggcttacagaaattgataaacaagattaagtctcaaatgacttctagtcaagccacttggggcccaagaaccagccctccaggacactttaacaccaaagtcactgctcagcggcaagcggcagccaggtccctgatgaaacacacaccaccatccaggaggcccagggaaggtgcaatggatgagctttgtagtctgaatccaagaaggcaagagttattggaagctagatttattggagtt

SEQ ID NO: 141049 - DNA, 2264 bp, Homo sapiens
aacttccgtgtcgacgatcccgcggggcttggcctctgcccggccacagagccggagctggagttgctgtcccgtctggcggcgatccccgggcagggcccggggccggggtttgaagatgctgaacgtcccttcccagtctttcccggcccccaggtcgcagcagcgtgtcgcctccggggggcgtagcaaggtacctttaaaacagggcagaagccttatggattggattcgactgaccaaaagtggaaaggatctaacgggattaaaaggcaggttaattgaagtaactgaagaagaacttaagaaacacaacaaaaaagatgattgctggatatgcataagaggtttcgtttataatgtcagcccttatatggagtatcatcctggtggagaagatgaactaatgagagcagcaggatcagatggtactgaactttttgatcaggttcatcgttgggtcaattatgaatccatgctgaaagaatgcctggttggcagaatggccattaaacctgctgttctgaaagactatcgtgaggaggaaaagaaagtcttaaatggcatgcttcccaagagccaagtgacagatacacttgccaaagaaggtcctagttatccaagctatgattggttccaaacagactctttagtcaccattgccatatatactaaacagaaggatatcaatttagactcaattatagttgatcatcagaatgattcctttagagcagaaacaattattaaggattgtttatatcttatacatattgggctaagccatgaggttcaggaagatttttctgtgcgggttgttgagagtgtgggaaaaatagagattgttctacaaaaaaaagagaatacttcttgggactttcttggccatcccctgaagaatcataattcacttattccaaggaaagatacaggtttgtactacagaaagtgccagttaatttccaaggaagatgttactcatgatacgaggcttttctgtttgatgctgccaccaagcactcatcttcaagtgcccattgggcaacatgtttacctcaagctacctattacaggtacagaaatagtaaagccatatacacctgtatctggttccttactctcagagttcaaggaaccagttcttcccaacaataaatacatctactttttgataaaaatctatcccactggactcttcacaccagagcttgatcgtcttcagattggagattttgtttctgtaagcagtcctgagggcaattttaaaatatccaagttccaagaattagaagatctctttttgttggcagctggaacaggcttcacaccaatggttaaaatactgaattatgctttgactgatatacccagtctcaggaaagtgaagctgatgttcttcaataaaacagaagatgatataatttggagaagccaattggagaaattagcatttaaagataaaagactggatgttgaatttgttctctcagcacctatttctgaatggaatggcaaacagggacatatttcaccagctcttctttctgaatttttgaaaagaaatttggacaaatccaaagttctcgtctgcatttgtggaccagtgccatttacagaacaaggagtaaggttgctgcatgatctcaacttttccaaaaatgagatccatagttttacagcataatgaagagctgtcattgtcctttattcaactagtttatctaaatttgtgattgcttagggttttttaagagaacatttttgtacataacaaaaggttaactaggaatccagccttcagtttcttaaatggaaatcaaatgttccttcagtacagggtaacttcttgggctttcttttggtacccacaactttatttttactactggatatttgacccgggaaagttaatccatggccaaccaaataccataccaggattcctttgttatgaatccacaaatttcccttgcccatttaaattatatcacctgttcctacaataagcacttgtgttttatgacatgataaagtaaatgatcaccttcgatcatgtttcctatgcctgtaaaatgtcttattagcaatacagattaaattttaccttgcactgttaactcaggaaatgatcatttatgtccttgttattaatgttaaaacatagaatgttataacttattaagtgatccaaacatttttttgtgtgtgtatggcattgatgcagaatagaataaaattatacttaagttctttttaaaaaaaaa

SEQ ID NO: 141050 - DNA, 1389 bp, Homo sapiens; identical to SEQ ID NO: 125531

SEQ ID NO: 141051 - DNA, 474 bp, Homo sapiens
atggttatggctagcgatttctacctgcgctactacgtagggcacaagggcaagtttgggcatgagtttttggagtccgaatttcagctggatggaaagcttagatatgccaacagtagcaattacaaaaatgacgtcatgatcagaaaagaggcttacgtgcacaagagtttaatggaagaactgaagagaattattgatgacaatgaaatcacaaaagaagatgatgaagcaggaatggtttctttacctgtgggtctaagtgttccagtgctgtttgaggacctggtgtggggctccttcccagcccatctcaaaggtctagagcgggacttccaggtgaagtcactgtccccagacttgcaatcacaaggtggggaagctggagctgctggaagtcattttgctgccttggagagagacacttttgagaatggggtccagccagagaagctaggccctgctggcatttga

SEQ ID NO: 141052 - DNA, 666 bp, Homo sapiens
cgtcactgcaaggcgccgggggacacgttggctgcgttttcggcgggcttcccgggtacaaaaatggctgtggctagccgatttctacctgcgctactacgtagggcacaagggcaagtttgggcacgagtttctggagttcgaatttcggccggacggaaagcttagatatgccaacaaccatcaattacaaaaatgatgtcatgatcagaaaagaggcttatgtgcacaagagtgtaatggaagaactgaagagaattattgatgacagtgaaattaccaaaagaagatgatgctttgtggcctccccctgatagggttggccgacaggagcttgaaattgtaattggagatgagcacatatcttttaccacattcaaaaataggttctcttattgatgtaaatcagtcaaaggatcctgaaggccttcgagtattttactatttggtacaagacttgaaatgtttagttttcagtcttattggattacacttcaagattaaaccaatttaaattgtatgttttcaggctgtttgtatatttaattaagggatgggaggggttatttgtcatttacagtattggggtttttatgaatgtgaagcaaacaaaaaaaatttgtatgtaaactgaaaataagaaaatacattagcaagcttaatggt

SEQ ID NO: 141053 - DNA, 798 bp, Homo sapiens
  misc_feature (1)...(798): n = a,t,c or g
atggaggacccagacagcgtgccccccatcgatgtcctctggatcaaaggggcccagggaggtgactacttctactcctttgggggctgccaccgctacgcggcctaccagcaactgcagcgagagaccatccccgccaagcttgtccagtccactctctcagacctaaggatcagaaaatctgatggcaccctacaggaacatgacggtatctgcgagatccatgttgctaaatatgctgaaatattcggattgacctctgcggaagccagtaaggatatacggcaggcattgaagagtttcgcggggaaggaagtggttttttatcgccctgaagaggatgccggcgatgaaaaaggctatgaatcttttccttggtttatcaaacgtgcgcacagtccatccagagggctttacagtgtacatatcaacccatatctcattcccttctttatcgggttacagaaccggtttacgcagtttcggcttagtgaaacaaaagaaatcaccaatccgtatgccatgcgtttatacgaatccctgtgtcagtatcgtaagccggatggctcangcatcgtctctctgaaaatcgactggatcatagagcgttaccagctgcctcaaagttaccagcgtatgcctgacttccgccgccgcttcctgcaggtgagaaaaggtgatgagcccactctaaagccaactctatggcccatgaccgtggtctgggacactttgagcagaaagcgtcctgttctccttggagtcaaaggattggtgacagtgtctgccatgctgtag

SEQ ID NO: 141054 - DNA, 980 bp, Homo sapiens
atggggctgcgtgcaggaggaacgctgggcagggccggcgcgggtcggggggcgcccgaggggcccgggccgagcggcggcgcgcagggcggcagcatccactcgggccgcatcgccgcggtgcacaacgtgccgctgagcgtgctcatccggccgctgccgtccgtgttggaccccgccaaggtgcagagcctcgtggacacgatccgggaggacccagacagcgtgccccccatcgatgtcctctggatcaaaggggcccagggaggtgactacttctactcctttgggggctgccaccgctacgcggcctaccagcaactgcagcgagagaccatccccgccaagcttgtccagtccactctctcagacctaagggtttgtagcgaaggtgaggtgcccctgtcttctgtgagtaaactcctcctgtgcccgctgggctggaatgagagtgaagatggtcgccccctcctgaaacaacttttccttcttgcagagaagacccaaccagacagcgctaagggccctgccaggcactgcgaaggaggtgcagaacagattcggagtagagggaagctgcctggagcaatcaagaaaggcttcccaggggaggtggcccttgaacagaaacttgataaagttcattctccttccactcatttgacagatgaggaaatagaggcacagaaagtggacagctggctgcacaatctgagggcccctgcaaccaaatgtctgagggcttctgagggccacaagacctgttccttccccaagacccttaccccggccctggctgaggacagctctcacactgtaaacaactgtccttttcagtctattcagtgccacattttacaaatttttgtgtcttccgctggtgattgtactgttgacaatggccccgggcatggtgctgaggtgctgtctaatgttcctaagcaccagaaggctttgatgtgccttacagagaagatcat

SEQ ID NO: 141055 - DNA, 1212 bp, Homo sapiens
atgcatggacagacctttagcctcaatgagacctgctggatcacaggctttggcaagaccagggagacagatgggcagcatccctcctgtcactgtgactggccaccagcattgtggaccgagaccctcctcaaagtccaggagttgctacaaaacactagcaagtcctccagccactctgagcaggagaaatgtgcggcccagaaattccacctgctggaggccaaagccacggctcctggggtgccccagtggatgttcttaagtgaaactggcaagtatgtggaggtgaagaacagtcactacaagtactgtgcagctgcttcagacagatgtgtttttatccgagcaggtgatgagtgtgaagtcaccgaagatgaagaagaaaccaaggctcaaaaaggtgctcaccggacaaccgaggttgcccacagggattttgccaacagcttctcaatcttgagatacaactccaccatccaggaaagcctccacaggtctgaatgcccttcccagcggtatatctctctccagtgttcccactgcggactgagggccatgaccgggcggatcgtgggaggggcgctggcctcggatagcaagtggccttggcaagtgagtctgcacttcggcaccacccacatctgtggaggcacgctcattgacgcccagtgggtgctcactgccgcccactgcttcttcgttaatgagttcagtgtgtactttgtcctgtctgaatttgctgagggtaataatactgagatcttatcagtacaagcccttgaccctgtctggacccgggagaaggtcctggagggctggaaggtgtacgcgggcaccagcaacctgcaccagttgcctgaggcagcctccattgccgagatcatcatcaacagcaattacaccgatgaggaggacgactatgacatcgccctcatgcggctgtccaagcccctgaccctgtccggtgagtccaggtttgacgccttctccgggggctgggtgtccaagtgtgagacctcgtctggaagctccctggttgccttctggaaagacacctgcccacctctggctactccacacccagaggctattggcagcacctgggacccaccttctgctccctcaacgccccagggagagtgtaggccagccatcaggcccatttgtaccctggtcatttcctacctgggtcatttccatgtggagtga

SEQ ID NO: 141056 - DNA, 1035 bp, Homo sapiens
atggctattggaaaaagtcaaaaaatgacagatgctagaaaggttgtggagaaaatggaacacttatatggtgttggactcctgtgccgggtagtcacaggtactgtagaatcctcgttgagttctagtccattgaattggcctccagaaaaggctgaagcccaatggccacaaaacagccaagtctcctcatctgtaaaatgggcgcagtacccagctcctagggtggtggtgaggggaagtgagataatgcatgcaaagagcatatcccagggcctggcacacgtgccacaggacaggatggtggcgccgcaggctgctgtgcagtacaacatagacggcggccactcaaattctccactacacagagacaaaggagacacgtggacccaaaactccgtggacccaaactccgtggacccaaactccgtggactcaaaactccagcgccctctgggggaggggcaagtacccctcaaccccttctccttcacccttagtggcaagatgttcttaagtgaaactggcaagtatgtggaggtgaagaacagtcactacaagtactgtgcaggcggcagccccaagggggacgtggacccgttctactatggtaagcctgggcccctgcgcacccttcctgagccctcaggaccccttccaccaagcagcggcctctcccagccccaggtccatgctctgtgccccttatctcccctggttaccacgggctgctgcgggcaggctgcggagagagacagctgctgggagagaccacccatcccgctcctcttgccctctctttccggagactatgagaccgttcgcaatgggggcctgatcttcgctggactggccttcatcgtggggctcctcatcctcctcagcaaatcaatgaagatgagccgtaacagcaggatctgccagaatcctgaagagaccgctgagaagcagacaacggaatgggagaagggcctgtcgaagtgggtggccatgaaggcggccgtgcatgctcagcccacggatgacaagctctga

SEQ ID NO: 141057 - DNA, 1020 bp, Homo sapiens; identical to SEQ ID NO: 137181

SEQ ID NO: 141058 - DNA, 453 bp, Homo sapiens
atgaataacggaagaaattatagatgtcagaatttggtagacaagggcgtaggagagaaccggggaccggcggacaaccggatgttagtggcccaccagtgcagccgggaggaaaaactaaaggaacccgatgaacacagtgacacccgcagtttgtcagcaggactcgctagcgatggagcgtctggggaagaagccccacggcggaggaaaaggtacccgagacaacgacacgttatctgggctccgggggttgaagcaccaggcgacgacgcagagaggcgtcgcacgagaagccagtggacctgcgacacggcactccccattgggaaaatgaggtacgttagtgttcgcgattttaaaggcaaagtgctaattgatattagagaatattggatggatcctgaaggtgaaatgaaaccaggaagaaaaggccctcaacaaattggatga

SEQ ID NO: 141059 - DNA, 765 bp, Homo sapiens
gcccctattgagtgtggcggaattccgtcacttccggttctctgtcagtcgcgagcgaacgaccaagagggtgttcgactgctagagccgagcgaagcgatgcctaaatcaaaggaacttgtttcttcaagctcttctggcagtgattctgacagtgaggttgacaaaaagttaaagaggaaaaaggcaagtttgcttcagaaaaccctgtaaagaaaccaaaagacaggtgagacttccgagagccctgtcatctttctaaacagagccagccagcagccagagatgataaccatgtttcagattgggaaaatggaggtacgttagtgttccgcgattttaaaaggcaaaagtgcctaatttgatattagagaatattggatggatcctgaaggtgaaatgaaaccaggaagaaaaggtatttctttaaatccactaacaatgggagcccagcttgaaggaacagatttctggaccattgattgatgccagtaagaaaacttgtaaaatttccgagcccatattaattaaaccctgtactgttccagttgttttaatctggcttttttccattggcttttgttttctaaatgttctccgaagctattgtatgtttggattgcagaagaatttgtaaggtggaatacttttttttaatgtgcattattaaaaatattgagtgaagctaattgtcaactttattaaggattactttgtctgcccaccacctagtgtaaaataaaatcaagtaatacaaaaaaaaaa

SEQ ID NO: 141060 - DNA, 572 bp, Homo sapiens
  misc_feature (1)...(572): n = a,t,c or g
ttgttcaggtatccaggnacggttctcacctctgtcttttctccttgcaggtgactcctgcacctgcgccggctcctgcaaatgcaaagagtgcaaatgcacctcctgcaagaaaagtaagtgggatcctctctttcctctaccccttccctgtcctccagcctgtcccctctccaccatcctcaggggaattaaagcagtctggggatgccccattgcgcggaaattgttgcctcctcagtgatccttatcagggagagcaggaatccttattcccggtgtcgctagtactcatctctgccgcctcctgtctgcccccaggctgctgctcctgctgccctgtgggctgtgccaagtgtgcccagggctgcatctgcaaaggggcgtcggacaagtgcagctgctgcgcctgatgctgggacagccccgctcccagatgtaaagaacgcgacttccacaaacctggattttttatgtacaaccctgaccgtgaccgtttgctatattcctttttctatgaaataatgtgaatgataataaaaccagctttgacttgaaaaaaaaaaaaaaaa

SEQ ID NO: 141061 - DNA, 597 bp, Homo sapiens
  misc_feature (1)...(597): n = a,t,c or g
gtttaaataaaaaatatggcaaagtgatcaaatgtcattttcaagaccacctggggggttttcaagatttgtcatgttcacattcgggaatttagggccggatcaacttgttttgctttttattatcttttttcaagtcaaaagctgttttaattatccattccacattatttccatagaaaaaggaaatataacaaaacggtccacggtccagggttgttacataaaaaaatcccaggtttgtggaaagtcgcgttcttttacatctgggaagcggggctgtcccagcatcaggcgcaccagggtgcgacttgtccgaggcgcctttgcagagtgcagcccctgggcacacttggcaccagcccacagggaagccaggagcangcgccttttcttgcaaggcaggtgcatttgcactctgttgcattttgcacggatgccggcgcaggtgcaggagacacctgcagcggcacaggagcagtttggggatccattggcgagctgaaagaggcggctccacccgggcccgcgccctaggcttcaaggctcaccgcagcggccctcctactcgtcgcggcgtagcgtccgcggggctcc

SEQ ID NO: 141062 - DNA, 1314 bp, Homo sapiens
atgcaaactaccatcagagaatactataaacacctctacacaaataaactagaaaatctaaatgagatggataaattccttgacacatacaccctcccaagactaaaccaggaagaagttgaatctctgaatagaccaacaacaggttctgaaattaaggcagtaattaatagcctaccaagcaaaaaaaaagtccaggaccagacggattcacagctgaattctaccagagagaataaaatacctaggaatccaacttacaagggatgtgaaggacctcttcaaagagaactacaaaccactgctcaacgaaataaaagaggacacaaagaaatagaagaacattccatgctcatggatatgaagaatcaatatcatgaaaacggccatactgcccaagttttttccactctctgtgtgcccttcaaggacaagaaccatgtcacattcaccagtgggtccacagcaccaagctcagcagcagatatagaaaagatagtcattatacctagccctgaatatggtctccaaaggccacaatcaaaaatggcatcctacaccttactgctacatgacatctgcacactgaaggaacacctgagacatgaagtgagacgagagaagttcatcaacccttccttacatcccattgctatcctggtaataaaggttcatcctcaaggagtatttctgactgctcaaggacaccacgtggaccagaagagcctgtttttcaaacctatgagattgtgtaaactttctctcatcatacaccggaaggccaattcagggaaagaagcagtggagggccgagactgttgtggcgacggcgacctctacggcaacggcttaagctctcggaggagtggcagagtacgatctgaaggaggggcttctgctgaagcactgagccctggtccagtcacttgtggccacagaagtaaggttggttttatgcattaccagtcacacagatatgctacagatatgcttttttgtgtatgccacagtcacacaatagttgtattgtgtctggagttggttcctgcctgtgggttcacggtctcactgacttcaagaatggagccccagaccttcgtggtgagtgttacagctcttaaagatggtacggacccaaagagtgagcgggtcctgctgattggtgcattttacagagcgctgattggcgcattttgcagagcgctgactggtgcattttacaatcctcttgtaagaggaaagttccccaagtccccactcgacccaggaaatccagctgtcctcacctctcagtatgactatagcatattttaa

SEQ ID NO: 141063 - DNA, 729 bp, Homo sapiens
atgaatggatccaatatggcaaatacatcaccgagtgtaaaatccaaagaggaccaggggttaagtgggcacgatgaaaaggaaaacccatttgcagagtacatgtggatggagaatgaagaggatttcaacagacagcctctgaatgaaatatatgttgttgaaaacataaaacaattttcactagctttgttaacactcactgacatgctcttaaccccagtgatcaggattgcaccagggctattagaagccagatgtctgagctgtgggtcagctgtgcactcctacattcaagagtttagcaaactcagagacaagtgttttcatggaaaatttgtgttaatgggaaaaggtgaggaaatttattttatgaaaggaagttgttttggtctaatgccctgtgttattgggtgtagatttgtgggaaacagcagctatatgcagacaggtcagcatggcatgcctcaaatgggaactcgggattggcaggatgtggaggaggaactgcaagagcaagacttcttggaccgctgcttccaagagatgctggatgaagaagaccaagactggtttattccatcacgagacctgcctcaggccatgggacagttgcaacagcagttaaatggactgtcagtcagtgaaggtcatgattctgaagatattttgagcaaaagtaacctgaacccagatgccaaggagtttattccaggagagaagtactga

SEQ ID NO: 141064 - DNA, 712 bp, Homo sapiens
cgcggccgcgtcgacgcttctcgggtgctgtgcttcacgttttggtactaaaggccgagactgttgtggcgacggcgacctctacggcaacggcttaagctctcggaggagtggcagagtacgatctgaaggaggggcttctggttagcccaggttccatcataatgaatggatccaatatggcaaatacatcaccgagtgtaaaatccaaagaggaccaggggttaagtgggcacgatgaaaaggaaaacccatttgcagagtacatgtggatggagaatgaagaggatttcaacagacaggtggaggaggaactgcaagagcaagacttcttggaccgctgcttccaagagatgctggatgaagaagaccaagactggtttattccctcacgagacctgcctcaggccatgggacagttgcaacagcagttaaatggactgtcagtcagtgaaggtcatgattctgaagatattttgagcaaaagtaacctgaacccagatgccaaggagtttattccaggagagaagtactgagccgagaaagctttgaggaagacttgtctgtccccacatctggggatagtaatgcacaaaatggtggagctgaagagggggatggggcgggcgaggggtgcacagcgggaaggggagtggtggtctcacgatactgtgactctgagtaactaatatgctcagtctaattctaagaa

SEQ ID NO: 141065 - DNA, 966 bp, Homo sapiens
atgcgtgccctggatagctcttcgcttctcactggctctgtgaggatcaccagaggaagaagaacctacagagtgagaagaaacagtgagataagtgaagttggtgggaaaaaatgtaagactgaaagcagggtatccctgaagcctgaagaagagagcatttcaagacagaatcatcgcaggtgtcaaacgctgctgagaagcagctttcctcctgaggaccctgaagcaaaaagcctgaaacctagctccccacagaagacgctgcctctttttagaacactctcaatttctttggtggggctgaccttcccttggcccccatactctccaattccagagcatgatcttccaccacaagaaaaacaaggctggcttttgtcttccagctcaaaggaggccaaggtgcaacttctttcagtcgtcctgaatcggattcatctgacacaagctgcctccaccatgctgctgaagtttgaccccaatgagattagagtcgtatacctgaggtgcaccgggggtgaagtcgatgccatgtctgcactggctcccaggataagacccctgggtctgtctcccaaaaaggttgatgatgacattgccaaggcaactagtgactggaagggtctaaggattacagtgaaactgacgattcagaacagacaggcccagattgaggtggtaccttctgcctctgccctaatcatcaaagccctcaaggaaccaccaatagacagaaagaaacagaaaaacattaaacacagtggaattatcacttttgatgagattgtcaacactgctcgacagatgcagcaccaatctttagccagagaactctctggaactattaaagagctcctggggactgactactgcccagtctgtgtctgcaatgttgatggccaccaccctcatgacatcatggatggcatcaacagtgttgtggtggaatgcccaactagttaa

SEQ ID NO: 141066 - DNA, 652 bp, Homo sapiens
cttaaagccgctgcctcccagagaccttcccggtgttgcgccgccccggccaagcctcagcctttctgggccttagcttcttcacgtgtaggtggggagggaggactggaccacctgtggcggcttgggagcccgcacgccctaggtatacctgaggtgcaccggaggtgaagtcggtgccacttctgccctggcccccaagatcggccccctgggtctgtctccaaaaaaagttggtgatgacattgccaaggcaacgggtgactggaagggcctgaggattacagtgaaactgaccattcagaacagacaggcccagattgaggtggtgccttctgcctctgccctgatcatcaaagccctcaagggaaccaccaagagacagaaagaaacagaaaaacattaaacacagtgggaatatcacttttgatgagattgtcaacattgctcgacagatgcggcaccgatccttagccagagaactctctggaaccattaaagagatcctggggactgcccagtcagtgggctgtaatgttgatggccgccatcctcatgacatcatcgatgacatcaacagtggtgctgtggaatgcccagccagttaagcacaaaggaaaacatttcaataaaggatcatttgacaactgag

SEQ ID NO: 141067 - DNA, 501 bp, Homo sapiens
cacagagcctcgcctttgccgatccgccgcccgtggccacccgccgccagctcaccatggatgatgatatcgccgcgctcgtcgtcgacaacggctccggcatgtgcaaggccggcttcgcgggcgacgatgccccccgggccgtcttcccctccatcggcgtgatggtgggcatgggtcagaaggattcctatgtgggcgacgaggcccagagcaagagaggcatcctcaccctgaagtaccccatcgagcacggcatcgtcaccaactgggacgacatggagaaaatctggcaccacaccttctacaatgagctgcgtgtggctcccgaggagcaccccgtgctgctgaccgaggcccccctgaaccccaaggccaaccgcgagaagatgacccagatcatgtttgagaccttcaacaccccagccatgtacgttgctatccaggctgtgctatccctgtacgcctctggccgtaccactggcatcgtgatggactccg

SEQ ID NO: 141068 - DNA, 1626 bp, Homo sapiens
atggtgccatcagcggcggcagcagcagggatgcgctgcctcatcctcaagggtgttgacagcatcggcaagactgagaggaccctccaagagattgggtctccctgtgttgccctggctagtcctgaactgctgagctcaagagatccagtagctgtggactcccaaggtgtggtgggttttttgcattcccttttgtaccggtcatttggcatctgctgtgcataccacacgcagtgcaatgaccatgccagccatgtgtggctcaaggttcctgtatcaggcagcacagctcagctttctcttagttgtaagaaagaaaaagacatcttgcatgaaaatagtacgttgcgggaagaaattgccatgctaagactggagctagacacaatgaaacatcagagccagctaagagaaaagaaatatttggaggatattgaaagtgtgaaaaaaaggaatgataatcttttaaaggctctacaattgaatgagctcaccatggatgatgataccgctgtgctcgtcattgacaacggctctggcatgtgcaaggccggctttgcgggcgacgatgccccccgggctgtcttcccttccatcgtggggcgccccaggcagcagggcatgatggggggcatgcatcagaaagagtcctatgtgggcaaggaggcccagagcaaaagaggcatcctgaccctgaagtaccccatggaacacggcatcatcaccaactgggatgacatggagaagatctggcaccacaccttctacaacgagctgcgtgtggctcccgaggagcaccccgtcctgctgaccgaggccaccctgaaccctaaggccaaccgcgagaagatgacccagatcatgtttgagaccttcaacaccccagccatgtacgtggccatccaggctgtgctgtccctgtacacctctggccgtactactggcatcgtgatggactctggtgacggggtcacccacactgtgcccatctatgaggggaatgccctcccccatgccaccctgcgcctagacctggctgggcgggaactgcctgactacctcatgaagatcctcaccgagcatggctataggttcaccaccatggccgagcgggaaatcgtgcgtgacatcaaagagaagctgtgctatgttgccctggacttcgagcaggagatggccacggcggcctccagctcctccctagagaagagctacgagctgcccgatggccaggtcatcaccatcggcaacgagcggttccgctgccccgaggcgctcttccagccttgcttcctgggcatggaatcctgtggcatccatgaaactaccttcaactccatcatgaagtctgatgtggacatccgcaaagacctgtacaccaacacagtgctgtctggcggcaccaccatgtaccctggcatggcccacagaatgcagaaggagatcgctgccctggcgcctagcatgatgaagatcaggatcattgctcctcccaagcgcaagtactccgtgtgggtcggtggctccatcctggcctcgctgtccaccttccagcagatgtggatcagcaagcaggagtatgatgagtcaggcccctccattgtccaccgcaaatgcttgtag

SEQ ID NO: 141069 - DNA, 1832 bp, Homo sapiens
  misc_feature (1)...(1832): n = a,t,c or g
ggcacgagcgcgtccgccccgcgagcacagaagcctcgcgctttgccgatnccagccgcccgtccacaccacgccagccagctcaccatgtgatgatgaatatcgccgcgcttcgtcgtcgacaacgagctccggcatgtgcaagggccggcttcgcgggcgacgatgccccccgggccgtcttcccctccatcgtggggcgccccaggcaccagggcgtgatggtgggcatgggtcaaaaggattcctatgtgggcgacgaggcccagagcaagagaggcatcctcaccctgaagtaccccatcgagcacggcatcgtcaccaactgggacgacatggagaaaatctggcaccacaccttctacaatgagctgcgtgtggctcccgaggagcaccccgtgctgctgaccgaggccccccttgacccccagggccacccgcgagaagatgacccagatcatgtttgagaccttcaacaccccagccatgtacgttgctatccaaggctgtgctatccctgttacgcctctgggccgttaccactggcatcgtgatggactccggtgacggggtcacccacactggtgcccatctacgaaggggtatgccctcccccatgccatcctgcgtctggacctggctggccgggacctgactgactacctcatgaagatcctcaccgagcgcggctacagcttcaccaccacggccgagcgggaaatcgtgcgtgacattaaggagaagctgtgctacgtcgccctggacttcgagcaagagatggccacggctgcttccagctcctccctggagaagagctaccagctgcctgacggccaggtcatcaccattggcaatgagcggttccgctgccctgaggcactcttccagccttccttcctgggcatggagtcctgtggcatccacgaaactaccttcaactccatcatgaagtgtgacgtggacatccgcaaagacctgtacgccaacacagtgctgtctggcggcacccaacatgtaccctggcattgccgacaggatgcagaaggagatcactgccctggcacccagcacaatgaagatcaagatcattgctcctcctgagcgcaagtactccgtgtggatcggcggctccatcctggcctcgctgtccaccttccagcagatgtggatcagcaagcaggagtatgacgagtccggcccctccatcgtccaccgcaaatgcttctaggcggactatgacttagtttgcgttacaccctttcttgacaaaacctaacttgcgcagaaaacaagatgagattgggcatggctttatttgttttttttgttttgttttggttttttttttttttttggcttgactcaggatttaaaaactggaacggtgaaggtgacagcagtcggttggagcgagcatcccccaaagttcacaatgtggccgaggactttgattgcacattgttgtttttttaatagtcattccaaatatgagatgcattgttacaggaagtcccttgccatcctaaaagccaccccacttctctctaaggagaatggcccagtcctctcccaagtccacacaggggaggtgatagcattgctttcgtgtaaattatgtaatgcaaaatttttttaatcttcgccttaatacttttttattttgttttattttgaatgatgagccttcgtgcccccccttcccccttttttgtcccccaacttgagatgtatgaaggcttttggtctccctgggagtgggtggaggcagccagggcttacctgtacactgacttgagaccagttgaataaaagtgcacaccttaaaaaaaaaa

SEQ ID NO: 141070 - DNA, 438 bp, Homo sapiens
agccgatctgctgcaggtcagcaactgtgtcgtgagcagctgccaaccaccagcctttctggtgctgttctccagttcacgtctgccagctggtgagggcagaggcagacctggtcagacccagcgcccctcctcccttgagggagcatggcacagcgtcacacttgaaagacggtgtttggtttcccatctaatcaacttaagggaagccggcatgtacccttcaaggccctgtcaccacctatttcctgatcagttggtataaactgagggtggcttttagagacccagacttggttggcagcgctgccatggaacaccccagcaagcaccttcccagcctgcctttcggagcaagcacccaaggaagggaatgccggcgctccagcaacaaccaggttcaggcctgtgcagacccctgccctgccgctgcagaaa

SEQ ID NO: 141071 - DNA, 494 bp, Homo sapiens
tgcggccgcgcccccttaacggcagtggcactcacccggctcgcgcggccccggcgccccacgcgcgcgcgtcgttctcccgcccgctcgctccccggcgctcacacctgagctcactcgcgcacgcccgcccggcccgagaaccgcgccgccgcctcggccccgcggaagccccgccgcgccatgtcttcgcctcccgaagggaaactagagactaaagctggacacccgcccgccgtgaaagctggtggaatgcgaattgtgcagaaacacccacatacaggagacaccaaagaagagaaagacaaggatgaccaggaatgggaaagccccagtccacctaaacccactgtgttcatctctggggtcaatcgcccggggtgacaaagatttccgcccggcggatgcgcaggtggctcaccagaagccgcatgcatccataggacaaacatccttccccaagaacccagcacatccagcagccacgcaagtga

SEQ ID NO: 141072 - DNA, 1179 bp, Homo sapiens
atggaggtgaaagctggtggaatgcgaattgtgcagaaacacccacatacaggagacaccaaagaagagaaagacaaggatgaccaggaatgggaaagccccaggaagaaagagggcaagagatatcgccttgcctggaaaaaaagttcctggaaagttaatgaaacactgcttttcttggtaagaggattaacaggaaagatgtgtggacagagttctggggacttgggttctatgttttcaaactcagaaaccacgcagaaacccacagatctttgcaaccccacagaaatacagacaaccatcagagaatactgtaaatacctctgtgcgtataaactagaaaaccaagaagaaactggtaaattcctgaacacatacaccctcccaacactgaaccatgaagaaaatggacccctgaatagaccaataacaagttctgaaattaagggacactggtgggtgctggcctgggggttcctcacccacaaacaccatgcttcctgcagggacgttgatgggcgctggcctggacgttcctcacatacaaccgccatgcttcctgcagggacgctgggtgacaaagatttccccccggcggctgcgcaggtggctcaccagaagccgcatgcctccatggacaagcatccttccccaagaacccagcacatccagcagccacgcaaccgatctgctgcaggtcagcaactgtgtcgtgagcagctgccaaccaccagcctttctggtgctgttctccagttcacgtctgccagctgcccagaagggacagatatcatggaaagggcagctcgggggtctgaaggaggcaagagagactggcagtcagagaaactcaggggagctagtcagcaggatggcaaggagccatttgaggaaagtcgaggaaaagagaaaacctggaaggacccgctcctggagggagacgaagtaccctggcgacagtttcctgttcgtgggtaccagggaggagaggagaacagggggaccctagttcaaatgtgtaccgtggagtgtcgtgccaccctcgagcacccatgttcaaagaacccgtcctatagcgtccaggttctgtcagaactgaataacgcgggcgccccttttcttgtcttcacagctgctgtgctggttaaatgctgctttttacaaattcgaaagtaa

SEQ ID NO: 141073 - DNA, 307 bp, Homo sapiens
atctgacaggcatagatgaccgcaagtgcatgacaacagtgagctgggacggagacaagctccagtgtgtgcagaagggtgagaaggaggggcgtggctggacccagtggatcgagggtgaggcccaggcagacaaccttgtcccaaggaatcagcaggatgtgtgggccaggatccccctctttgcacagcatgaggcaaaaatgtccagccacccccaggcatctgttagcagagtctgtctcttggctttgtcacttttccttttcttaaaacaaagccatgccaataaagtgatctgtgttca

SEQ ID NO: 141074 - DNA, 403 bp, Homo sapiens
gaccttcagagccccacagatctgtgttcagacctggttcttctactgaacaacatgggtgaacttggcaagtcccttaagctgatctgtgaaaaggagatgctaatccctgctcacgtggataggcatgaggcttcagagacagcacagagagtgcctggcagagcaggtaggcagctaacagctgccatttgtaccttcactgggttatttatatctaaggtcattctccctgtgagatgaagagcgctttgagggcaggggtggggtctttttggtatcccaggacttagcataggttgaaacaatgaatggatgaatgaagtgtctggggatggtcagggtacactctgagaagtctgcccctcaccataagattctggaaaacatccttcacccctca

SEQ ID NO: 141075 - DNA, 951 bp, Homo sapiens
atgtatgtcatagctgaaaacaagcaattgtctcttgtgcctctgagtgaatccggaacccttcatatgcacagtagccttctggataaacacatgaagagaagatcagttgatgaggaaaccaaagagcagacttactcctatgcaaagctgggggagcacatgtggctccacctgcctccctcgtgcatgtgtcgcattgcaggcttcaccccaacagcagggggcagtagtgatcagcaggcccagcatgcccagcacatggcagggctcacagtgctcagggaagatgtgggggctcaaatgtggggtgtagagggtgtcacagtgctcatctgtgctctgccaagcccaggctgggctgtgggatcttcctcgccttcctcctcagttccctggtgccctcctgatgagctcctaagtgtacttcccgctgtcccacctcaggccttcaccgggtgctccattcttctctccttagagcccagccctagtgaatcccactccctggactctcacctgggctcccacagcctctggcctgtaaccctggtgaccatgaacgcttcaagaagcaatttagtccattggggtggggaccttcagagccccacagatctgtgttcagacctggttcttctactgaacaacatgggtgaacttggcaagtcccttaagctgatctgtgaaaaggagatgctaatccctgctcacgtggataggcatgaggcttcagagacagcacagagagtgcctggcagagcaggattgacaaatgtgtctctttcttggcagacaacagtgagctgggacggagacaagctccagtgtgtgcagaagggtgagaaggaggggcgtggctggacccagtggatcgagggtgatgagctgcacctggagatgagagtggaaggtgtggtctgcaagcaagtattcaagaaggtgcagtga

SEQ ID NO: 141076 - DNA, 744 bp, Homo sapiens
cggagggcgctcatttccgggccgcccaccacccgcgtagcaccggcagccgctgtcccggcagtctccagccgtcccgcccgcttgtggccaactggctccagtcactccccgaaatgccagtcgacttcactgggtactggaagatgttggtcaacgagaatttcgaggagtacctgcgcgccctcgacgtcaatgtggccttgcgcaaaattccccaactttgctgaagccagacaaagagatcgtgcaggacggtgaccatatgatcatccgcacgctgagcacttttaggaaacttacatcatggaacttcccaggttgggaaggagtttgaggaggatctgaccaggcatagatgaccgcaaggtgcatgacaaacagtgagcttgggacggagacaagctcccagtgtgtgcagaagggtgagaaggaggggcgtggctggacccaagtggatcgagggtgatgagctgcacctggagatgagagtggaaggtttgggtctgcaagcaagtattcaagaaggtgcagtgaggcccaggcagacaacctttttcccaagggaatcagcaggatgtgtggccagggatcccccctctttgcacagcatgaggcaaaaaatgtccagccacccccagggatctgttagcagagtgtgtgtgcttggctttgtcacttttccttttcttaaaacaaagccatgccaataaagtgatctgtgttcaaaaaaaaaaaaaaaaa

SEQ ID NO: 141077 - DNA, 640 bp, Homo sapiens
  misc_feature (1)...(640): n = a,t,c or g
ctgggataggggctgtggcagtacgcggggacccggctgcggtggctgcgggactgacgaatggagaggagaaaacctatggtggctgtgaaggacctgatgccatgtatgtcaaattgatatcatctgatggccatgaatttattgtaaaaagagaacatgcattaacatcaggcacgataaaagccatgttgagtggcccaggtcagtttgctgagaacgaaaccaatgaggtcaattttagagagataccttcacatgtgctatcgaaagtatgcatgtattttacatacaaggttcgctacactaacagctccaccgagattcctgaattcccaattgcacctgaaattgcactggaactgctgatggctgcgaacttcttagattgttaaataaaataaattataataaactgttaactcttttcagtatttaatacctgtagttcagttagtaactttttcatatatagcatgttgcctgtatgcagttgaactatataaagttcattgcaaagcagaatatcnttngtttttttgcattagnaatccaaagtttgaaaatttgtttgcttncatcaaacaaattaagggacattttnacaaactgagaaataaaaccaaatatgcctaaaaaa

SEQ ID NO: 141078 - DNA, 1062 bp, Homo sapiens
atggcttttatcgtgcccgatgttaatgcacgttcttttttgacaataaattcatggccatcagataatatcaatttgacatacacggcatcagggccttcacagccaccatacatcagctacatggaagcaggaaaccaaacaggatttttagagtttatccttctcggactctctgaggatccagaactacagccgttcatatttgggctgttcctgtccatgtacctggtgacggtgctgggaaacctgctcatcatcctggccatcagctctgactcccacctccacacccccatgtacttcttcctctccaacctgtcctgggttgacatctgtttcagcacttgcatcgtccccaagatgctggtgaacatccagaccgagaacaaagccatctcctacatggactgcctcacacaggtctatttctccatgttttttcctattctggacacgctactcctgaccgtgatggcctatgaccggtttgtggctgtctgccaccctctgcactatatgatcatcatgaacccccacctctgtggcctcctggtttttgtcacctggctcattggtgtcatgacatccctcctccatatttctctgatgatgcatctaatcttctgtaaagattttgaaattccacattttttctgcgaactgacgtacatcctccagctggcctgctctgataccttcctgaacagcacgttgatatactttatgacgggtgtgctgggcgtttttcccctccttgggatcattttctcttattcacgaattgcttcatccataaggaagatgtcctcatctgggggaaaacaaaaagcactttccacctgtgggtctcacctctccgtcgtttctttattttatgggacaggcattggggtccacttcacttctgcggtgactcactcttcccagaaaatctccgtggcctcggtgatgtacactgtggtcacccccatgttgaaccccttcatctacagcctgaggaacaaggatgtgaagggagccctggggagtctcctcagcagggcagcctcttgtttgtga

SEQ ID NO: 141079 - DNA, 881 bp, Homo sapiens
attcggcaccggaggggctgtggagtacgcggggacccggctgcggtggctgcgggactgacgaatcttgctgtgtggcccaggctggagtgcccggctggtctcaaattcctgacctcaagtgatctccctcccaaagtgttgcgattgcaggtgtgagccactgcacctggctgctgagaaatctttgcctacagtgagggaaactactaaagttcctgggggaagcaaagtcagaatttccattaagaaccaaaatggatggagagaggagaaaacctatggtgggctgtgaaggacctgatgccatgtatgtcaaaattgatatcgatctgatggcccatgaatttattgtaaaaagagaacatgcattaacatcaggcaccgataaaagccctgtttgagttggcccaggtcaagtttgctggaggaacgaaaccaatgagggtcaattttaggggagataccttcacatgtgcaattcgaaaggtatgcaatgtattttttacgtacaaggtttcgctacacctaacagctcccacccgagattccctggaaattccccaatttggcacctggaaatttgcactgggaacttgcttgatggcttgcggaacttcctttagattggttaaattaaaattaaattataattaaacctggttaactccttttcagtaatttaatacctgtagttcaggttagtaacctttttcatatatagcatgttgcctgtatgcagttgaactatataaagttcattgcaaagcagattatcttgtttttttgcatagcaatcaaagttgaaatttgtttgctacatcaacaaattaaggacattttcacaaactgagaaataaacaaatatgccaattaaaaaa

SEQ ID NO: 141080 - DNA, 2403 bp, Homo sapiens
atgctggaagattgtcaggtttccctctgggtaagactcacatggtgccagctggcctctctgacaagagctctccgaacttctgctatcagtgaggccgcattactggaaatgacacggtggaagactcgggccacagagaaactgatcacctggccccagatcccagaacaaggtgctgtgaaaggaagcaccatcacccctctttcctcatttccaacggtgcagggggcatgggtcctctcacaacaagtaggaattatgggagctacaattcaagatgagatttgggtggggacacagaaccgaaccttattaactagtgtcatgagaacaggaagaggcgccagaggctgcctgttctccctttctctctctctgtgcatgcacagagaagaggccaagcaagctcaaagtgaaaaggcactgtctataagcaggaagagaggcctcagcagaaacggttgctccaaatgtctaaacagtaatgtcatcatcagtcaaacaactacaagcaaacatcaagcagatccagtgaatcctacagatggggtcagaggactccttcccaaagaagctgggggaacacatgaaaaatcccatgacgctgaattcgacagccacctacaaaccataaaacatggaaggatgtccctgtgtggccctgtgtgcactgccttggtcactgggaaagacaatgaagtttctaattatccaacagatatgaatgctgaccattacatttgtaccttaattacagggaaggttattgtttacagttctgataagtggctgttttactcagtgtgcaaagggctttccgtttatcctcctggcttttctaggcatctaattacactgttggggacatggatgcccagcctagaagttgatcccaactgcttctgccctacgcacagccagtctctccaggctgtattagtccatttccacactgctgataaagacatacctgagactgggcagtttacaaaagaaagaggtttaattggacttacagttccgtatggttggggaaacctcacaatcatggtggaaggcaaggaagagcaagtcccattttacatggatggcagcaggcaaagagagaatgaggaagatgcaaaagcggaaacccatgatcaaaccatcagacctcgtgagattcattcactaccaggagaacagtatgggggaaaccgcccccatgattcaattagctcccaccaggtccttcccacaacacactggaatcatgggagtacagttcaagatgagatttgggtggggacacagccaaaccctatcacaggctctgtcggttctgtctcctcaatgtttcttggcttcgtgcccttttcacatctccatgagaacagtctcagccaccccaccttctgtaggcccacacagactgcctggtcactctggggtcttcacaccctgtctccccagtacagccctggcaaccttacctgcaactgcaagcaaggcacatctccaacagggagacagtgggacatctgtgtgtccattgctacagccagaaggattctcaaaacagagcctggaactgaagatgcttgggaaggacctgttgaaatgggattggagactggcctgggcaaaaaagcaagacctcatctccaagaagaagatgaaagagagcaagagaagaagaggaagaagaagaagaagaagaagaagaagaagaagaagaagaagaagaagaagaagaagaagaagaagcagcaggagaaggagaaggagaaggagaaggagaaggagaaggagaaggggaggaaggggaagggaagggggaaggaggaggagaagaagaagaaggagaaaaagacggaggaggaggagaagaaaaactgctttcccggctctaagctccaagtgctatcaccttcagttgaccagctgcgtctttgtccctccccacatcactttctgcagccagggcagcactcctggacaggaagccatgaacttgcaattccaccatttcttccagttgcttttggatctgtggcagggtctttgtggaatgagggtcttcgagggagaaggagaaagggagagagtgacctttctaggttttatggcttgctgtgggtgtttgtgagcccaatatttcacggccatgtgacaaggacccagctcttagatgaactaaggagaaggtactacaacatttttggtgctcataatgtgaggcttgagaagggccatggaactccaacggtcatgcaaccaaagcctctgataatggcgccttcttctgggaacccttcgatcagcctcggagggaacgctgactgccatttcccccaaaacagcgccccctaccagcagaaggcagttaagactggtcttcatccttgcgctaatccttaa

SEQ ID NO: 141081 - DNA, 425 bp, Homo sapiens
gtataaaattaacaaaaattttatctccttttccattgtaatagaagtatccatttttatctaggcaaatagccagctacattagaaacaaacttttcccgcaaaagaccacagaataaatatttcaggctttgtgcgacatgtagtctctgtcaactgttcagctctgccattataggggaaaagcaaccatacacaacatgtaaacaaaacagtgttgctgtattcccataaaattccattgacaaagcaggcagcagaccagatttgtcccgtgggccatagtttgctgaccccggattactgagcacctactatatgccaggcactattttagaagttggcaatgcaatagtgagcaacacagtcaaggtctctgctctcacagagcctggaaaatcttgttcacagctgtgtcctcagca

SEQ ID NO: 141082 - DNA, 1166 bp, Homo sapiens; identical to SEQ ID NO: 115633

SEQ ID NO: 141083 - DNA, 173 bp, Homo sapiens
  misc_feature (1)...(173): n = a,t,c or g
cagaaggccaaactggccgagcaggctgagcgatatgatgacatggcagcctgcatgaagtctgtaactgagcagatggctcgagaatacagagagaaaattgagacggagctaagagatatctncaatgatgtactgtctcttttggaaaagttcttgatccccaatgcttc

SEQ ID NO: 141084 - DNA, 1050 bp, Homo sapiens
atggacaggaagagcaccttaagcaaagatggacttgccaccactgccattttgacatgtgaagtcaccacactgacacataaatcctggaataattatgggaaagcagacacccttataactaaatcctttctctccagtgctcagagcatgaaaattttctgctgttttgggaaatttgtctgcaaacagcttgaaggaaacttggcccaagggctcaccagcaatagcgttgttgaagaacacaaacatccagtcatggaaaaaaatgagctggttcagaaggccaaactggctgagcaggctgagcaatatgataacatggcagcctgcatgaagtctgtaactgagcaaggagctgaattatccaatgaggagaggaatcttctctcagttgcttataaaaatgttgtaggagcccgtaggtcatcttggagggtcatctcaagtattgaacaaaagacggaaggtgttgagaaaaaacagcagatggctcgagaatacagagagaaaattgagatggagctaagagatatctccaatgatgtactatctcttttggaaaaacatctatcaacaatgcagacaaataatttgaatcctggttcggccatttgctacaaatatgctcttgggcaaattactggtcctgtctctgaactttcctcatttacaaaatatgtaaggactaaaataatagccatggtgtttgtaccaaatcatttcaagagactacgtggcatgtgtaatgaacagtatctagaaatggagaggatcgacacagtgcacgaggctctttatggagacaagagctgcaatctttatttaatattagtgagaagaaatgttgctgccttcaaaatggttcaagtatgtggttggcagtgtccaggtctggcattgatggtgtcagcagtacaagctggtagaagctggaaggcaagtgaggctgtcaatgccatccataaacatcagcatcccagggcagaaagagggtgggaaatgatggagacatatggagaaaaagaggatatccagtacattggctga

SEQ ID NO: 141085 - DNA, 1513 bp, Homo sapiens
  misc_feature (1)...(1513): n = a,t,c or g
tcccacctcggcgcctcactcattgtcccctcgcgcagtcatcgagcgcagatcccgcgctctcgattggaacgcctccccatcgctgagcgatcctcaggggctggacgcctcactcccgtttccgagccataaaaggtctaggaccgcttcccccgagccagcagaacatccagtcatggataaaaatgagcctggttcatataggccaaactggccgaagcaggctgagcgatatgatgacatggcagcctgcatgaagtctgtaacttgagcaaggagctgaattatccaatgaggagaggaatcttcctctcagttgcttataaaaattgttgtaggaagcccgtaggtcatcttgggagggtcgtctcaaagtattgaacaaaagacgggaaggtgcttgagaaaaaacagcagatggctcgaggaatacagagaggaaattgagacggagctaaggagatatctggcaatgatgtactgtctcttgttgggaaaagttctttgatccccaatgctttcacaagcaggaggagcaaagtcttcttattttggaaaatggaaagggagattacttaccctttactttgggctggagggttgccgctgggtggatggaccaagaaaggggattgttcgatccagttcacaacaaggcatacccaaggaaggctttttggaaatcagccaaaaagggaaatggcaacccaacacatccctatcagactgggtctgggcccttaacttctctgtgttctattatgagattctgaactccccagagaaagcctgctctcttgcaaagacagcttttgatgaagccattgctgaacttgatacattaagtgaagagtcatacaaagacagcacgctaataatgcaattactgagagacaactttgacattgtgggacatcgggatacccaagggagacggaagctggaaggcagggaggaagggaggggggaaaatttaaccgggcctttcccaactttttgttcttggcctcattcttaaaatttttaccacagttggacccttttgttccttccctggctgttccccacaattagtttttttgttttacggttttttggacgggttttggtttacttctatttggaatttctatatttcccatgtggtttttatgtttaatattagggggagtaggagccagtttaacattttaggggagttatctggttttcatctttgaggtgggccaatatggggatttgggaattttttatcacaagttataagtgtttggcatagtacttttggtacattgtggcttcaaaagggccagtgtaaaactgcttccatgtctaagcaaagaaaactgcctacatactggtttgtcctggccggggaataaaagggatcattgggtccagtcacagggtgtaagtaaattgtggggtaccttaaagggtttggagcncttacnaggccggtggtaagaancatacccccatggataccccccatatttaggcccntgta

SEQ ID NO: 141086 - DNA, 477 bp, Homo sapiens; identical to SEQ ID NO: 120080
  misc_feature (1)...(477): n = a,t,c or g

SEQ ID NO: 141087 - DNA, 1293 bp, Homo sapiens
atgaaggcacagatggagaaagaggtaaaaactgtactgaaatttgcaatcttcaatgtgctgactggacatagagaacacaataaggaggggatcaaaagtgacttcaatgatcccaatttgtggatgtatggtaatgccattgctcattgcaagaaatatgagagggaaagcagatctgtatgcaaagataaagaattccatacagatctttccaaacattccagtttcagttgttttgaatctgaggtgccactctcagatacagccgacaccatgggtttcggagacctgaaaagtcccgcgggcctccaggtgctcaacgattacctggtggacaagagctacattgaggggtatgtgccatcacaagcagatgtggcaatatttgaagccgtgtccggcccacagcctgctggcttgtgtcatgccctacgttggtataatcatgtcaagtcttatgaaaaggaaaaggccagcctgccaggagtgaagaaagctttgggcaagtatggtcctgccaatgtggaagacgctacaggaagtggaggtacagatagtaaagatgatgatgacattgatctctttggatctgatgatgaggaggaaagtgaagaagcaaagaggctaagggaagaaagtcttgcacaatatgaatcaaagttagccaaaaaccctgcacttgttgccaagtcttccatcttactaaatgtgaaaccttgggataaggagacagatctggcgaaattagaggagtgcgtcagaagcattcaagcagacggcttagtctggggctcatctaaactagttccagtgggatacagaattaagaaaccaaatacagacatgtttgttttgctaattcctactcatccccaacaagttaaaatgcagtatctcattcctttacttaatttcgaaaagcaaaacacagtctttccacaatgcgtcaaagaagtccaccctgatagcggcccaaagcagtcagcaaaacatccaatcttggggccatggtcaaagagcctgtgctgcttcaggccaggtggtgtttggtttctcccacccacttctgttcttatctcttcatcaccaaccacaaaatgggattctgtcccaaactgtaagtggaatggggaactcaagagccgacggtgggcagtcactgcctcatctgagagcagcctggaaggccaactaggaaggttccgcatctctgccatggacgacgcccgtgctacgggtcatgctgtgtcttggaagaaagccaagaagaggcaaggcctcctgggttaa

SEQ ID NO: 141088 - DNA, 1183 bp, Homo sapiens
gctacgacttttttttttttttttttttttaatctttcaatcttttatttaaatgccatggatccaggatggattttagatcttggttgaaagcagccacatgccagtggactgcacatagtcctcaaaaagcagtgatctgctcctccagcatatctgttccaactttatcatcttcaaactacaacactgtatttgaagttcttaaattccggtatccccactggaactaagtttagatgagccccagactaagccgttcttgcttgaatgcttctggacgcacttcttctaattttcgccataatctggtctcatcattcccaaggttttcacatcttagtaagatggaaagacttggcaacaaagtgcaaggttttttttggctttctttgatttcatattggtgcaaagacggttcttccccttagccttctttgctttcttcacttttcctccttcatcatcagatccaaagaggtcaatggtcatcatcatctttaactatctggtagctccacttcctggtaagtggcttccacatcgggcaggaccatatttggcccaaagcttttcttcactcctgggaaggctgggccttttccttttcggtaagactttgatgtgattataccaaacgtaagggcatgagcaccaagttcggccagccggtgggctggacacgggcttcaaaatacttgccacatcttgcttgtgatggcacatacccccctcgatgtagctcttgtccggccaggtaaatcgttgagcacctggaggcccggcagggctttttaggtcttcggaaacccatgggtgtccgctggatcccgagagctggggagcagcagaaagagagcgcgcaaattgtgggcgccccacgctgaagagaggaaaaaggacccgaagagaccggaaaattccttatatagagacggaggcgtttccctccaccgcgccggaccgaaggttaaaggtcaaagtacttttgcattcccacttctccacgtacgaattgggggccctgaattaaatggcccacaaattgtccatggacctttcgttgcgtttggaagtaaattaataaaataggcatgtcttaagttcgtacctccacggctcccgaagatgacgggaaccagccctagaagcgccatgggcgcgaattcctaaggcggtctat

SEQ ID NO: 141089 - DNA, 1357 bp, Homo sapiens
tcccttattagagaggaggcaagccccttacctacttttgttataattggcccttcaccctgctgaggtgacggacaggcttaggcagtgctaataatggcctggctttagctccaataaacactccacaggcttccccacaaaaggccttattgggagcttgggagggcgggggccagatttaaggagctggaagggtaggagaagacagcctgatatggaatggaacagggatggccagccttagtcctactgggatctatggctttcctaatctcccaagaggtagcttgtgtaagatggatgaatggggccagtagtttttaaatgaagcccagatggctagtacagggcctcccccagctttcctcaacccctgcaccattgattgaccttggactctgcctcagggcagaaatcatcaccatctcaccttcttcccctttaccctgttcaggaaagaaagaaccgaaccgagggcccagagagcaagtttatttcggtgaatgctgacggccaaacatcatccaaagggggaccaggatgggaaagttgcttgaagacaagaaagccttagggaaaacttttaggcttagattccaaaattcaacacaggaaaaggcaacggaactctgggggagactgggaaaggtcctcagccattcagcacccatgcgggacgagctctctcttcatagttggataccaacccattggctgtccttcatggccctgcccacccagcatctcctaacttccttccctctgtccatcttcctcaaccccagtgtgaacaaagaacaatgccgggaatttcaagcaccccatgaacgggtgcccatttcccttcccttgtcaaacaccccgaaagtcctttcggacataaatcctccataaggtgcccttggtcccttgtttcttgggccactggtctggcaggcatggggcaggaaagtggctcaaaagtccaggcaccttcgcattcaatctcatcacttctttggggggttccccagggacctttgagcaccccttgccggtgggtagggggttttggcccagggccctcactcacatccacacacttgggtgtacagggaatcttgccatcacgctggtttgggtcaaacaggtgggaagggcctctttgaactccacaccacctaaaactcacccagtgcttgggatcagatctgcggtctggttcttcggtgaagtcacatgtcggactgctcagctctgctcagctacaggccagaatgcatcaccttccgtgaagaatgactgctcagaagcctgtcataaaggattatatgctagaaactttggagtacaggtttctgatggtattgcttaa

SEQ ID NO: 141090 - DNA, 351 bp, Homo sapiens
gggattcccagctctttctgcttgctgatcaggactgcacacagagaactcaccatggagcttgggctgagctgggttttccttgttgctattttaagaggtgtccagtgtgaggggcaattgggggagtccgggggaggcttagttcagcctggggggtccctgagactctcctgtgcagcctctggattcgccttcagtagccattggatgcactgggtccgccaagctccagggaaggggctggtgtgggtctcaaatattaatcctgatgggaatgaaacatactacgcggactccgtcaagggccgattcgccatctccagagacaacgccaagaacacgctttat

SEQ ID NO: 141091 - DNA, 637 bp, Homo sapiens
ctgggattcccagctgtttctgcttgctgatcaggactgctcacagagaactcaccatggagtttgggctgagctgggttttccttgttgctattttaaaaggtgtccagtgtgaggtgcagctggtggagtccgggggaggcttaattcagcctggggggtccctgagactctcctgtgcagcctctggattcaccttcatcagtagctactggatgcactgggtccgccaaggtccagggaaggggctggagtgggtctcacgtattgatagtgaaggcagtaggacaagctacgcggactccgtgaagggccgattcaccatctccagagacaacgccaagaacacgctgtttctccagatgaacagtctgagacccgaggacacagctgtgtattactgtactagagacacagtgaggggaagtcaatgtgagcccagacacaaacctcgctgcaggggcatctgagaccacgagggggtgtcctgggccctgtgaactgggctgctctccgtggcagcggctggtggtgctaaaggctgattttctctcagcatctggggctgattcatcaagtttcctcagagaacctttcagattaacaattctgtacttacgtttaatgtctctgaatg

SEQ ID NO: 141092 - DNA, 693 bp, Homo sapiens; identical to SEQ ID NO: 119964

SEQ ID NO: 141093 - DNA, 1116 bp, Homo sapiens; identical to SEQ ID NO: 135400

SEQ ID NO: 141094 - DNA, 1063 bp, Homo sapiens
aaggagtggacttgtggggggcggaggaggctgtttccatctaggagctgagttgcctgtgagacaccagtgggtctctagaaacaggatctaaagccctggaaagaaacgtaggctagaagccaatgatgtcaacagaggggcactattcattctctccgtccaagtgtacaacaggcaaatatccctgcttgcgtggagctgacagcaatgaaatgtaataagtaagtacatttgtataagcgaaggtaccagctcctatgggaaaaaacagagcaaggagaggggaattgggagtgcaggggctggagatggggtgtgatttcaaatagggcagtcagagtaatccttgttgagaaggtggccttggagcaaagccatgaaggagatgagagtgggctgtatgttaactgcagaaagcctctcagatggagggaatagtcaccagaggactctcagcatgtttgaagaaagcaaagaaagtcagtgtgaggccaggaggggactgcgtgggaggaatgactccagcaagccggcagctgacccgtctctggcctgcatgcctccccctgtggtccactgccggtggtcttcagctctctcctcgtcccacccccatggtctgctgacagcccagcccagtgcatccctgccatctctgctctaccgctggtcctcccaacaaccaacttacagctggggctcagctatccctgtgtccccagtccagagcctgcctctcagccctcccaaggcggccttgagcgctgctcctgctcctccaggggagaggtcagctggggagagcaacagggagaagaggacagggagaggttggttaacaaatacaaacttacagctagataggagtaatgagcacacctatgacaccaagctgggaatcgacaagtgtgacaactcctccacgtccctgaagatgggatacacgcagggcgctcatcagagcggccaggccttcggcatgggcctacagatatacgaccccaggtactactggggaggcccagtggcccacggcgctccctcgggctccggcccctga

SEQ ID NO: 141095 - DNA, 386 bp, Homo sapiens
ttttccttactagataatttttatttaatcctttatcaactgttaattgcttttcaaaagaagttccttttaaactaggccctttatagcacatttcaaaagttatctgaagaatcaaacatcttttgaaagctgagtagggagagggaaaaaagaaggtatacttgccttatttgtagcagtagcactggatccagcgtggctgtgatagttgcaaggatcatgggtcacttcgggtttggagaggatttgtgggtccatccttggaacaattcctctggctcatgaggtcactgatacccaacacggcagaatggtataccaggttgccacggcaggcttttgaagttcgctgggtgcagccagcataggcacgcaaggccttg

SEQ ID NO: 141096 - DNA, 1020 bp, Homo sapiens
atgcactcgcggagggagagagcccggggcttgcggggggctcatcacccgctcgtagacaacgggcccccgcaatccctgcgggctccgccgctgctctcaccgctcaaaacggcaggtgcaaaaagcatttgggagccgcttgccagcgcgcggagacccgaaacccctgaaagaactccactccagaagacgccagaacaagttcccacgaatttcatgggcgcccttcacatgaaaacctcagctcccctatcctcaaggaacggggaagggcgccggggagggacttcggtggccagctgtccctgggtcgtgggcgctgtttgctctgcggagcgccagccctgcacacagcgggtgcgggaagcgttgatgggaggctggagggcgggggcgcagaacaacagggcagaggatcaggtggacgaattcacagaagtaggcttcagaagatgggtaataaaaaactatgatgagctaaaggagcatgttctaacccaatgcaaagaagttaagaaccttgataaaagcatacacccagaaatatccaggcttcatgaatttataacgacaacgcacactttgcctgttataggcggtaaagtaagcctcctgtcaaaatgccaagacaatgcggagcagaaacaatctcaaggatgtagccaagaaggccatgaagtgtatgacccgaggctgaacagcagcagcagcagcagctccagcggcggggggcagagcccggggctgcggcgctgctcaacctcggcggcggcagcggcggcgctggaaggtgctgctctcaagcccatgcccgtccatgcaggtctcgtgggctccggcgagggcggcggcgcgggcgccgtggcgggcccgtgtagcagatggggcgccaccaccgccgcagcaagcagcgcgcagccggcgcagccagtccgcggcggcagcagcggggcgcaggggcatcgtggcggccggaggcggcaggcagggaaagggggacctgcaggcagcagctga

SEQ ID NO: 141097 - DNA, 949 bp, Homo sapiens
tcaaacatcttttgaaagttgagtagggagagggaaaaaagaaggtatacttgccttatttgtagcagtagcactggatccagggaccacaggtacgtttgtcacttgaactgaaagataattattatctatgagtggccaggccccttctactttgcatgtttggaagttatccttgaaagttctgaggtgaggatctccaaacaagccacaaaaaaaggtaactgggagggttctggtcccctctcctgtgttccctggctccagcgtggctgtgatagttgcaaggatcatgggtcacttcggggttggtagaggatgtgggtccatccttggaacaattcctctggctcatgaggtcactgatacccaacacggcagaatggtataccaggttgccacggcaggcttttgaagttcgctgggtgcagccagcataggcacgcaaggccttgcaaaactcagagtcaaagccgtcaacggcagagttcaggtgagaagtcagggacacgaagtccgtggtgcatttctggattcgacattgggctggctgttggcagtcaccattcaagacagtttctttaacaccaggactacacgtgtgaatttcgagattaactcccaggtttgcaaaatctggtaaaaatctttccatctggtgtacttccttcgcctcgccgccacccccaactccagaaaagcagcacaaggctccttgtctccctccgaggcggctgcgtggagcagcccgaggctgaacagcagcagcagcagcagctccagcgcggggggcagagccggggcgtcggcgctgttcaacctcggcggcggcacggcggcgctggaaggtgctgctctcaagcccatgcccgtccatgcaggtctcgtgggctccggcgagggcggcggcgcgggcgctgggcggggtctgggcccgtgggtgcggcat

SEQ ID NO: 141098 - DNA, 1886 bp, Homo sapiens
  misc_feature (1)...(1886): n = a,t,c or g
atggacctgcagaagtttgggctcagcctatacctggtgcaggccctgtttggaatcatcaacatcccggccatgctggtggccaccgccaccatgatttacgtgggccgccgtgccacggtggcctccttcctcatcctggccgggctcatggtgatcgccaacatgtttgtgccagaagccaccgagaactctgctccaggggaagtggaaattggaagcgctccactttcggttctaggcgccgaggaactcgggcgagagcgtggagcacggctgcagggcgggaggggtagagattcccagtgggtgactggaggcttgggagtgaagcaagtgctctcagaagaggagattgacgagaacttcaaggccctcttcaggcagctggcaggggaggacatggagatcagcgtgaaggagttgcggacaatcctcaataggatcatcagcaaacacaaagacctgcggaccaagggcttcagcctagagtcgtgccgcagcatggtgaacctcatggatgtatccttccgtttgcttttgtctcctgagtggggttttgggtggagccccaagtcgacttgccggctcggcggccatctccccttctgcacagttgcccactctcccatgactggtctaagtgatggaatttccttcttaacggccacccagcgtgatggcaatgggaagctgggcctggtggagttcaacatcctgtggaaccgcatccggaattacctgtccatcttccggaagtttgacctggacaagtcgggcagcatgagtgcctacgagatgcggatnnccattgagtcggcaggcttcaagctcaacaagaagctgtacgagctcatcatcacccgctactcggagcccgacctggcggtcgactttgacaatttcgtttgctgcctggtgcggctagagaccatgttccttgtggagtggatgcccacacggggccggactgtggcgggtattttgctggggtattccttcaccctgggccagctcatcctggctggggtagcctacctgattcgcccctggcggtgcctgcagtttgccatctctgctcctttcctgatctttttcctctattcttggaggcctgacccctacctttcttgcacacttcggcccgttgaggtcaggcctatggccatggccttcacagacctgctggatgctctgggcagcatgggccgcttccagctcaaccacacagccctgctgctgctgccctgcggcctgctggcctgccacaacttcctgcagaacttcaccgccgctcttggggcccctgagccctgccggcgcttcaccaagcctcagtgggccctgctgagccccaactcctccatcccgggcgcggccacggagggctgcaaggacggctgggtctataaccgcagtgttttcccgtccaccatcgtgatggagtgggatctggtgtgtgaggcccgcactctccgagacctggcgcagtccgtctacattgccggggtgctggtgggggctgccgtgtttggcagcttggcagacagctgcaccctactcccctgtctaggcacgcagatcctgtgcacagcccaggcagcgctgggcaaaggctgcctggccagctccttcatctgtgtgtacctgtttaccggcgagctgtaccccacggagatcaggcagatggggatgggctttgcctctgtccacgcccgcctcgggggcctgacggcgcccctggttaccacacttggggaatacagcaccatcctgccacccgtgagctttggggccaccgcaatcctggctgggctggccgtctgcttcctgaccgagacccgcaacatgcccctggtggagaccatcgcagccatggagaggag

SEQ ID NO: 141099 - DNA, 410 bp, Homo sapiens
catgcccactcactgaattctattatattacccacacctctggaaattcacaaagtctgaattcagatctatgcataaggatgcaaacggattagcaataattgctggcactgccatcaacacctcctgtcgatctcacctgatctgaggataaatgaaggcaaagaatgtggccccagcccctggattggagtggaggcaaggagggtggcgagctgtcttcagcagtcggcctcacctctctgctcctgtatcaacaagtgccatttcatccccacttccaatccccaacatttataccccgtgaatcaattcttcttcagcatgccagttgctggagacagcaccatttacatacaggcatctatagcagttatcttccagggtggaagcaagagttttctcgtgcc

SEQ ID NO: 141100 - DNA, 1188 bp, Homo sapiens
tcagttcttttgcttgttaacgtgtctgctcaccgcctcccgctccccaaagccaggactgtgcagttgatcccaggagcgagcccggcgcggctccctgccggcagcgaagcgaaacatttggacatggccccgattttccgggtgcggttggcaagtcccggcgtgcgcgaaccaaacctgcggttcccggggcagctttgagcgggtcgggtcggctccataggagaatggccccactgtttccagaaggatccaagagaggactttcagctctggaattttgaactcaggatctgtttctccctcgcggaaagaggaaggtggacgaagggcaagcccaggccggcaggggctaccgcaggaagacgcccattcctggactcgggttcgcaggagcccccttgctccccagagccggaactgcgctgcctgccacgctcggctgactccaaggaagtccagggcaacgtgattgtccatggccacttgtgttggtgcattccgaacaaacagtctgctgcctggctgcacaggtctgaccagtgtggtcatgggtgggtgacgatgtaacaaggtgcattctggctgctgttttccagccccagatccttcttcctcctctcggtcccaggtggcttccagagtcatcccgctggctcctcctgcatggcaagtcccagttagctgtacagaatctgcagaaggtggctcatcggggagattggcctggatctggtcatccagctccacagtcccagcactcttctctgagaagaagcgcagcacgaagtcgccctccttgttgggctcgaaggtggagggcaccaccacatactccccgggtggcaggcggaagcgggtgctgacctctcgcaggttgatgaactgctctgagcgcgcccgagacgcattggccaggaagaagtcacgcttcaagtgtacggccggctggcccaccagctcgtagaccgcgaagccaatagtctccatgtcgcggccgaagcggcgctcgcggcgacggtgcttctgcataagggcgagcacgaagctgcagcctgactcgcggtccccgtagtcgtccgggtcatccgtctcatccagccggatcttgaactgagggttcacccagaaggtggcttctttcttatgatgtaatttactttgaataattaaggctccctccat

SEQ ID NO: 141101 - DNA, 2448 bp, Homo sapiens
atggccaacttgctcacagagggcactcagtcagaccaagaactccttgtttctcatcctgttttttatgattacaaaactcttgcttccaccctggaagataactgctatagatgcctgtatgtaaatggtgctgtctccagcaactggcatgctgaagaagaattgattcacgggccaggacaggactctcaaatgaggacagcagagctcgtggggggctcccacggacccgccgtgggcccaggggaggcagagcctgagccaacagcagtggtgctgtggaccgtggatcctgagggtggcctggggcaagtaccggctgagggtccagggcccctcccggcctctctacataaagccgggggtactgggcctcaggtcaggcctatggccatggccttcacagacctgctggatgctctgggcagcatgggccgcttccagctcaaccacacagccctgctgctgctgccctgcggcctgctggcctgccacaacttcctgcagaacttcaccgccgctgtccccccccaccactgccggggccctgccaaccacactgaggcctccaccaacgactcgggggcctggctgagggccaccatacccctggaccagcttggggcccctgagccctgccggcgcttcaccaagcctcagtgggccctgctgagccccaactcctccatcccgggcgcggccacggagggctgcaaggacggctgggtctataaccgcagtgttttcccgtccaccatcgtgatggagtgggatctggtgtgtgaggcccgcactctccgagacctggcgcagtccgtctacattgccggggtgctggtgggggctgccgtgtttggcagcttggcagacaggctgggctgcaagggccccctggtctggtcctacctgcagctggcagcttcgggggccgccacagcgtatttcagctccttcagtgcctattgcgtcttccggttcctgatgggcatgaccttctctggcatcatcctcaactccgtctccctgctgtcactggtccactgcctgatagagagcctcctagtgccaggagaggctctagaggttgcggtgaacacagccctgctccttggagtccatgttctagcgaggcgagatatcaccagcatgcataacgaatcgtatagtatgttcgaagacattgtggagtggatgcccacacggggccggactgtggcgggtattttgctggggtattccttcaccctgggccagctcatcctggctggggtagcctacctgattcgcccctggcggtgcctgcagtttgccatctctgctcctttcctgatctttttcctctattcttggtggcttccagagtcatcccgctggctcctcctgcatggcaagtcccagttagctgtacagaatctgcagaaggtggctgcaatgaacgggaggaagcaggaaggggaaaggctgaccaaggaggtgatgagctcctacatccaaagcgagtttgcaagtgtctgcacctccaactcaatcttggacctcttccgaaccccggccatccgcaaggtcacatgctgtctcatggtgatttggtggggccattctcctatggagccgacccgacccgctcaaagctgccccgggaaccgcaggtttggttcgcgcacgccgggacttgccaaccgcacccggaaaatcggggccatgtccaaatgtttcgcttcgctgccggcagggagccgcgccgggctcgctcctgggatcaactgcacagtcctggctttggggagcgggaggcgcactgccttaatttcggcgctgaggttctccaactctgtggcttactatggcctggccatggacctgcagaagtttgggctcagcctatacctggtgcaggccctgtttggaatcatcaacatcccggccatgctggtggccaccgccaccatgatttacgtgggccgccgtgccacggtggcctccttcctcatcctggccgggctcatggtgatcgccaacatgtttgtgccagaaggcacgcagatcctgtgcacagcccaggcagcgctgggcaaaggctgcctggccagctccttcatctgtgtgtacctgtttaccggcgagctgtaccccacggagatcaggcagatggggatgggctttgcctctgtccacgcccgcctcgggggcctgacggcgcccctggttaccacacttggggaatacagcaccatcctgccacccgtgagctttggggccaccgcaatcctggctgggctggccgtctgcttcctgactgagacccgcaacatgcccctggtggagaccatcgcagccatggagaggagggtcaaagaaggctcttccaagaaacatgtagaagagaagagtgaagaaatttctcttcagcagctgagagcatctcccctcaaagagaccatctaa

SEQ ID NO: 141102 - DNA, 457 bp, Homo sapiens
agaaatttggtgtatcccgctgttatggttctccttcttattgagacatccatctcggtcctcttgggggcttggaatattctttgcctattggttgatgaaacagcaatgccaaaaggaacaagggggcctggaataggaaatgcctctctttctacgtttggttttgtgggagctgcgcttgaaatcattttgattttctatcttatggggtcctctgttgtcggcttctatagccttcgattttttggaaactttactcccaagaaagatgacacaactatgacaaagatcattggaaattgtgtgtccatcttggttttgagctctgctctgcctgtgatgtcgagaacactgggaatcactagatttgatctacttggcgactttggaaggtttaattggctgggaaatttctatattggattatcctacaatttgctttttgctattgtga

SEQ ID NO: 141103 - DNA, 876 bp, Homo sapiens
atggagagttgtcattttaccatagaagtgaaaaaggaagaggaagtaaaatttggtgacaagaccggacagaatcacttggagagatttcttaggaaggcccatagtggagactgccaaggacacaccaacgttgagaggcaggaagaccacgtgcactggagttacacagattctctctccacactacacggccgctgctgggggatggaagaggggttggcatcggcagttcaaggctgtcttttctaccctcttcagtgcctctttcaggtgtatgaagttaaaaccaggtacttgggaatgctttgtgcgggaaatccagaagttgcaacaggaagacaagtgccagaagaacaagctggacagctacttttgggaaaatggattcaggagggaggagacatgatagcaaacccacggctgtcttcatcggtggaatacaacataatggagttggaacaagaacttgaaaatgtaaagactcttaagacaaaattagagtggacagtagtgggaagtatgattggaagacaggggtgtgatctaatgattataaaccggggggatttagcaaggcctgttcatattcttctcggtgtcctcgtgtctccggagataaacatgtgcttctcctctggctatcttatggtgtcctctgttgtcggcttctatagccttcgattttttggaaactttactcccaagaaagatgacacaactatgacaaagatcattggaaattgtgtgtccatcttggttttgagctctgctctgcctgtgatgtcgagaacactgggacttgtaattgttttgacatctgcttatgtgaatcttgaaaatgccaaaagtatgctctttagcaacctgatttga

SEQ ID NO: 141104 - DNA, 3636 bp, Homo sapiens
ctagaagtctagaagcgaattttccttatgaagagaagaaaacttaatggcaatatggccctgcttcagccagagttggaactcaggttggattcgtgtctggacacaaaggctacttgctgacaccagccttccagaatggctcaatttggtggcagcagctgatagagctgcatccctctgcaacaactgctcttccaggctgtgacggcaacagcagaagaggcacaggagtgcagattggctgccttctaggaatccaaggtttggacagtgctgaacagcccctccacctacgctgaccatgggttcaggaggaagccagtgtggagactcacaggacccagccatagctggtcgttctgtgacagtgctgcctcggggttcccagaccttaatgagctggtggctccagggatggcttaaaccttggtgctctgactgctcctggggcgcagtcttcccttccagctgccctgctccacagtagacacctggttctggggagtggcggggcttttgtcctgtggcactgccccatgttttcaggttcgcttctctttggtttgctctcccctgatgggctggtgtgtctttgacaggctgctgggttgggggctcactgtcctgctctggggattgcgaagcaatctctctcctctgagacctgccctttcgatgaacctgtccctttctccctggatgctccacaggagccgagctatcctgtagcgactccgcaggggccttttccctcatggtgggagctggctgatcgtggggttctagctgcaaggctggctggtggttcccaggtggtgcctcttccagaggtgccagtcctctagccgtccctttctggttggggagctttttttccctagcccctgtctgctgaagtggcccctggttgtggggtgaggcccgcatgtctggaatcttcctcctggaggagctgcctgcttggggagctttcctttcctttgcaggccttggatcaggctgagtccccgagttctggggcagccctggctccggaagaggagcaggaatgcgagggagcctcactttctgagccgcctcctcctgggcgggactgaggatgcgaggttctgcttgctcctggctggggggactgataagagggagtttcacctcactgaccttctcttcctggacttgctgaagactgtgggctgcctgggggctcagatttggtggtggttttgagtgcggagggctgatgggaggaagtttactggtgtctgcttcccgggttggtggaagcctgggagagaccgtcatggtttgatgggaggttgttcctaaagcctcttccctgctgggcgataggagtttgggtgtgggcctcctgctctggaggggagccagcacctgaggctggggcagccgagtgggagccagccggcttctaggaagcaaggtccccggggctcccctggcctggggctgcttggtatctgttgctaagtcttggggatgtggcagttctgggtgagggatactgactcggatggcttccggtttggaggtttcctccttcagagcttgctgagaatcgccagcaagtttctgcaccaagtcagtgtgggaagaatcttttggaggatcatggtgggaactgctgggtggaagtttgtctgactcaatttcctcatcctgaattctctgagggctgaggggagtggggccaggtccctgtagaggttcagacagaggagggccagtaggggttacctgggcctcccctgactccttgtcctggcctggctgagggctgcgggacgagggaggggaagggtgcacaggaggcaccagggtcggggtgatgggagactgcccaacctcactggcttccatctcagggacatctgtctcagtggctatttgttttaggggaagatctgattgttggacatcctcttccgttgggtttagggataggtcctgggcctgctgaggaagacccagtgctgatgaactgaggtgttgagggagctcaggattgagatggctgtcaggagaaagctctttttgatgggtttctccatcctgagccagctcttggttctgggcaggagttacgctctgattttctaggtgcttggcatgaatttgcattccagagagatgctctgtcatctggccatctgcttgcagtttcgccaagcacctgggagatggaaccaggtgtgctggcaccccagagacagtcttcttgctagcgggagctcctgcacgaaggtccacggctccattcttgaagtcagcaagaccacgaacccactggcaggaaccaactctggacacactgacacttgttttaaggtaactatggttggctccactcttgtgcactgaacctgtaaacatctggtccccattccttggcaccttcttcacagccctgagactcaggaagaacactggctctacttcttgtcccactgcagttgtagccaaactcttggcaggttcctcagtcaatccaaggtattctctaatgagctgactcagtttttggtaggcaacatccagatcatctgcattgattacctcatcaaaatatcccggaaaattctgattaattttaatataaaggtccactctggagacagcaaattcaatttctgcacgactgaataatccttttctccgcaaatatccctcatatttttccttgttcatgggcaccaccaggatataacgaggctcaaaataggaatatttcaaacttcttacaccttctatttccatatgaatacagcttgccaaaccatctcttgcgataccttctacggtgtccctatttaatccatacttgtgattaccataactaaatgttagaatgaatttccccatgttcaccatttcatcaaaaacgtcttgagagataaaatgataatcaactcgatccccttctccaaagtaaggtggtcttgtggtatgacaggccctgaaatcataaaacagatcacctagtccatttctaaccatatctgaagtaagtgctaaactgtctgcagaggcgatgggcaagctctcgtttcccacaagcttcaggaccagcctgaattccggcctttggatttctaataagtacctgtcaaagatcctctgcggctgcatcacgctgttgacaacatgggtcaggtggtcttgagctgcaaccacttcagggggaggatcatatttattcactgctgaaaccttttcttccactttaatcttcttctgatctaattctgttaatcgcagaagcataaaaattacgaagaaccaatattcagacttttcctgaattggattttctagaagattgagaactcgaaggatgggtaaatttttaatgtattctatttctctcagctcagcaatcttattatcctccaggttgatcacttccaggaggtcatgattctctaagccttggaggctgcttatctgattgtgggacagatccaggttctgcagggctttcagatcctccaaacctgtgatcatctcaatctggttattgctcagacaaagtattttgattggtaacttgtttaagccattaattgtcgtgatcttattgttggccaaactaaggtgaattaggttgttgcacat

SEQ ID NO: 141105 - DNA, 538 bp, Homo sapiens
agcttcttctccagagcctcacttgttcttcaccatgattcaaagccatctgctccctgttgagaccgatcaaggccccatagtgacgctcatttagacgccaggagctttccacaggcacccattcctggcctaggttttccaggatcaagccgggcggtgggaatggcccgattaaggccagatgtgaatacaagatcaaactcaaagtttagcgctttgagttgcttcccacagttccgagcttcctccattccttcgctgttgagtttgtgatccacccagctacaaaaacggttctccttattccaagcaccctctccatgtgttaacataataagtttgtacttggacatactgatggctgaacttcccaggcgttttcaaatgggctaatattcaaggacagcaatacatctgcaaaggggccaccagcagcagcagcagcagcagcagccgctcctccgagccgccaaagagccagcgcctcctaggcctctattcatctcgccggcatcgacgctcttttctagcccct

SEQ ID NO: 141106 - DNA, 1396 bp, Homo sapiens
tcaaaaacagcaacagaaagcaggacgtgagacttctacctgctcactcagaatcatttctgcaccaaccatggccacgtttgtggagctcagtaccaaagccaagatgcccattgtgggcctgggcacttggaagtctcctcttggcaaagtgaaagaagcagtgaaggtggccattgatgcaggatatcggcacattgactgtgcctatgtctatcagaatgaacatgaagtgggggaagccatccaagagaagatccaagagaaggctgtgaagcgggaggacctgttcatcgtcagcaaggtgcacatggcgcatttggcttgccttcaacaccattgtgccaaagagtcaatggcagagcctgcaaactccacaaagatgctagtgttcattgagagaggtgcggcattttcttgggaagtagagaaagagaaaacacccaaacagccctccagagaagaaagttgtgcaaagatttgcatatttaccctccaagtgcccaggcccacaatgggcatcttggcttttgtactgagctccacaaacgtggccatggttggtgcggaaatgattctgagtgagcaggtagaagtctcacgtcctgctgtgtccagagttggttccttccagagggttcgtggtctcgctggcttcaagaatgaagccgtggaccttcacagtatgtgtctggagtttctcccttctggtgggtttgtgatgtcgctgacttcaagaatgaagccgcagactgtcgtggtgatcgttgtagctcttaaaggtggtgtggacccaaagagtgagcagcagcaagatttttcgtcaagaggaaccaatctttggaaattggttcgcacaaaggtgataagaattgcaaattggttgcgaaatttaaagtttaacttacaaacttcgtgtctccctggggttcaaagcaatttcttctttgctataagccttcccggagtagttgggatttacaaggggccaaccgttgattccaagccacggccccaagttgaacagcccggggaaaccggacaaagccagccccctaacggaaaaccccgaatgccgcccaaaggcatggcccaaccaaaaggcctacacggcgggaacccaaaccaaaaaaaaaaaaggcccgcaaatggaacaaagggtttccccatagggttcccaatggaattaaaatggcgaaccctaaatccggaaaaaaacctactgggccagataaattccaaaaaaccggtggaacacatgctcacctctgttactggaggaagtgaggaggtgctgtataggttatcttggaaaaaacaagtacaacacctgatgaccaaatgggagtccacagtgctacaagcaaaccttcaaccatgtgacaaccttcactaa

SEQ ID NO: 141107 - DNA, 1151 bp, Homo sapiens
atgatctttactgaaaaggaacaaattgttcctcaactgaaaaaggacattacccacaaaaaaaaggtgtcccagaagaaactgaagaaacacaaacttatggcctgtggaattgtgacatatgtctttactcagtggaaagttggaaaattgactatcatccatggatccaatccacaagtgggttggttaatctcagacattcagcacacagaagattatgacgtatcttcagccccaaacccagcgggtgaggagggaccggcgcctctgtctgagactggggctcccggctgctccggctcccggccccctgagctggagccagagcgcagcctgggccgcttcagaggccgcttcgaggataaggacgagcagttggaagaagaagaggagctagaggaggaagaagaggaggaggaggaggaggacatgagtcacttctcgttgaggctggagggaggccggcaagactcggaggacgaggaggagcgcctgattaatctctctgagctgaccccatatatcttgtgttccatttgcaaaggttacttaatagatgcaactaccatcacagaatatctttataccttttgtaaaagctgcgtcttacaagacatagtgtacaaattagtgatcaatctagaggaaagagaaaaaaagcaaatgcatgatttctatcaagaaagaggtctagaagtacctaaacctgctgttccacagccagtcccttcaagcaaaggaagatctaaaaaaatccgagaatcagtgtttcctattccacctgaacttgatatgtctttattactggagttcattggtgctaatgaaggcacgggacattttaagccattggaaaagaagtttgttcgagtttcaggagaagcaactattggacatgtagaaaaattcttcagaagaaaaatgggtcttgatccagcttgtcaggtagatatcatctgtggtgatcacctgttggagcagtatcaaactctaagggaaatccgacgtgcaataggtgatgcagcaatgcaggatggtctgcttgtccttcattatggtcttgtagtttctcctctgaagataacttgaagattctaggcacattatgaggagggaaacaaaggaggcttctgcaggactgcatttcg

SEQ ID NO: 141108 - DNA, 1407 bp, Homo sapiens
atggcacacatatcctgtattgccatcccctgctgttgcaaaataaacgtatttgttctggagggcccatctctccgagtttctcctcaggcggacccatgccagtttcctgaagttaatgaccaacagcatgtagctcgtctaaggatcggcactcaatttgtacacatgaaagaaaggatgtatagcaagaaaaatcctcacagatccttgtgttacgccatgttaagttcagaccaagcgaccttctggaaagcgaagtttgttactttaaaaatcagttttgatgaaaggagggaaaagcagatggacttgaaaaagatccaagctcctattagaaaaggcacactaaaggatctcttcaagccccactggcatacattatgccatcaagccttctaccttctgaaattgcatggagcaggaaccttcactgtcaaagagatgcatgtcaaacagctcccttactttctggggtggtgcccgtggctagtggagggaggagggtgggtggaagggagtgcgagtataaagaattgttttggttacttggatgaggctaatcaggacatcattgaaatatttttaaaatgttctttacatggaattcccggtgctcagactacgattgtgggtgtcgttttgcctcaaggtccactagtctcaaaggaggaaagtgtcccctgggtttgttccttctcctcggatgaccaacagtgtggaacgaatggctgtgagacacttgaagaaatgttgaattcaaaacaaggtgtccgagtctactcaggttgtaggatgcaggcagctgcctctcccacacctactaatgccagccttgttggggtgagcactacagattgtcttcttggcttcctcatgcctcagtccccggtctggcctcctgagggtcatgaagtccacgggcttctgttgcttcttcatctttcagagaaagatgaacaggatgtggacttattagggcactttcaggatgaaaccaaaggcccactggctaaccacacgatcgtctcaatagatgcagaaaaaccttttactaaattccaacatcctttcatgagagaaatgctcaataaactaggcatcaaaggaacatacctcaaaataataagagctgtctatgacaaatccacagcaagcatcatactgaacaggcaaaagctggaagcattctccttaagaactgaaaccatgctcattctcatgttcaggaccctggaatttgctgcctccatggccttaccccacttccaggtcctgaacaagcctcttcttctagtccatcctcttaaggatagaccacaccaccagcatacatccctaaatccaagaatggccaagaggcgactgtttgcaggtggaggctggagggttatggacagcatttga

SEQ ID NO: 141109 - DNA, 4371 bp, Homo sapiens; identical to SEQ ID NO: 121210

SEQ ID NO: 141110 - DNA, 1455 bp, Homo sapiens; identical to SEQ ID NO: 121211

SEQ ID NO: 141111 - DNA, 756 bp, Homo sapiens
  misc_feature (1)...(756): n = a,t,c or g
ttaaatccttttttgggagaggatccccccgatacccaggttaggcgcgctgtcaataactatgacatcatagtcatgagcaacagtttcaatggccagtcggagcatcaggtgtggatcggtgggcagtttaccttcatcaaatttgcccattaactcagtttcaatacggtgcagagccagacaggaaggaataatgtcaagccccggccagcaagtgggctttattgcataagtgacatcgtccttttccccaagatagaaaggcaggagagtgtcttctgcatgaatatgaagatctggtacccatccgtgatacattgaggctgttccctgggggtcgttaccttccacgagcaaaacacgtagccccttcagagccagatcctgagcaagatgaacagaaactgaggttttgtaaacgccacctttatgggcagcaaccccgatcaccggtggaaatacgtcttcagcacgtcgcaatcgcgtaccaaacacatcacgcatatgattaatttgttcaattgtataaccaacacgttgctcaacccgtcctcgaatttccatatccgggtgcggtagtcgccctgctttctcggcatctctgatagcctgagaagaaaccccaactaaatccgctgcttcacctattctccagcgccgggttattttcctcgcttccgggctgtcatcattaaactncgtcatttcatgaccagcgtttatgcactggttaagtgtttccatgagtttcat

SEQ ID NO: 141112 - DNA, 1575 bp, Homo sapiens; identical to SEQ ID NO: 127561

SEQ ID NO: 141113 - DNA, 1611 bp, Homo sapiens; identical to SEQ ID NO: 138713

SEQ ID NO: 141114 - DNA, 1974 bp, Homo sapiens; identical to SEQ ID NO: 127326

SEQ ID NO: 141115 - DNA, 3216 bp, Homo sapiens; identical to SEQ ID NO: 121216

SEQ ID NO: 141116 - DNA, 3069 bp, Homo sapiens; identical to SEQ ID NO: 121218

SEQ ID NO: 141117 - DNA, 975 bp, Homo sapiens
atggaaattcgaggacgggttgagcaacgtgttggttatacaattgaacatattaatcatatgcgtgatgtgttgggtacgcgattgcgacgtgctgaagacgtatttccaccggtgatcggggttgctgcccataaaggtggcgtttacaaaacctcagtttctgttcatcttgctcaggatctggctctgaaggggctacgtgttttgctcgtggaaggtaacgacccccagggaacagcctcaatgtatcacggatgggtaccagatcttcatattcatgcagaagacactctcctgcctttctatcttggggaaaaggacgatgtcacttatgcaataaagcccacttgctggccggggcttgacattattccttcctgtctggctctgcaccgtattgaaactgagttaatgggcaaatttgatgaaggtaaactgcccaccgatccacacctgatgctccgactggccattgaaactgttgctcatgactatgatgtcatagttattgacagcgcgcctaacctgggtatcggcacgattaatgtcgtatgtgctgctgatgtgctgattgttcccacgcctgctgagttggttgactacacctccgcactgcagtttttcgaatgcttctgtcaggcaccgtgtatgaaatctaacaatgcgctcatcgtcatcctcggcaccgtcaccctggatgctgtaggcataggcttggttatgccggtactgccgggcctcttgcgggatgtggtgcattccgacagcatcgccagtcactatggcgtgctgctagcgctatatgcgttgatgcaatttctatgcgcacccgttctcggagcactgtccgaccgctttggccgccgcccagtcctgctcgcttcgctacttggagccactatcgactacgcgatcatggcgaccacacccgtcctgtggatctacccactagtcaattcaccatcttgttga

SEQ ID NO: 141118 - DNA, 1142 bp, Homo sapiens; identical to SEQ ID NO: 135851

SEQ ID NO: 141119 - DNA, 1410 bp, Homo sapiens; identical to SEQ ID NO: 127567
  misc_feature (1)...(1410): n = a,t,c or g

SEQ ID NO: 141120 - DNA, 1215 bp, Homo sapiens; identical to SEQ ID NO: 138726

SEQ ID NO: 141121 - DNA, 1035 bp, Homo sapiens
  misc_feature (1)...(1035): n = a,t,c or g
atgggcaaattcatgaaggtaaatgncnancgatnccacctgatgctccgactggccattgaaactgttgctcatgactatgatgtcatagttattgacagcgcgcctaacctgggtatcggcacgattaatgtcttatgtgctgctgatgtgctgattgtgggcacgcctgctgagttgtttgactacacctccgcactgcagtttttcgatatgcttcgtgatctgctcaagaacgttgatcttaaagggttcgagcctgatgtacgtattttgcttaccaaatacagcaatagtaatggctctcagtccccgtggatggaggagcaaattccggatgcctggggaagcatgggtctaaaaaatgttgtacgtgaaaccgatgaagttggtaaaggtcagatccggatgagaactggttttgaacaggccattgatcaacgcttttcaactgnagcccggctttaccggcataaccaagcctatgcctccagcatccagggtgacggtgccgaggatgaggatgagcgcattgttagatttcatacacgntgtgacaatctaaaaacttgtcacacttcacatggatctgtcatggcggaaacagcggttatcaatcacaagaaacgtaaaaatagcccgcgaatcgtccagtcaaacaacctcactgaggcggcatatagtctctcccgggatcaaaaacctatgctgtatctgttcgttgaccagatcaaaaaatctgatggcaccctacaggaacatgacaggatctgcgagatccatgttgctaaatatgctgaaatattcggattgacccttttcgaaaccaataaagatatacggccagcattgaaaaagtttcccggggaaggaagagttttgcaaagcctgatgggacataagttcatcagttcaacggaagtttacacgaaagtttttgcgctggatttgggtgccccgcacccggtggcaattttggattcccggagtctgatgccggttgccatagctgaaacaattatacctgaagaataa

SEQ ID NO: 141122 - DNA, 801 bp, Homo sapiens; identical to SEQ ID NO: 135854

SEQ ID NO: 141123 - DNA, 2787 bp, Homo sapiens; identical to SEQ ID NO: 127569

SEQ ID NO: 141124 - DNA, 1134 bp, Homo sapiens; identical to SEQ ID NO: 135856

SEQ ID NO: 141125 - DNA, 888 bp, Homo sapiens
  misc_feature (1)...(888): n = a,t,c or g
atgcccagtccggtccctgactcacgatccctgcacgtgggctccactgggggaccacaaggatttagagacaagttnttcgatatgcttcgtgatctgctcaagaacgttgatcttaaagggttcgagcttgatgtacgtattttgcttaccaaatacagcaatagtaatggctctcagtccccgtggatggaggagcaaattcgggatgcctggggaagcatggttctaaaaaatgttgtacgtgaaacggatgaagttggtaaagggatttgcgattttgggaccaccctcaaaacagtatttcgcctgttgggcaaaaccagcgtggaccgctttgtgcaactttctcaggcccagccggatctggctctgaaggggctacgtgttttgctcgtggaaggtaacgacccccagggaacagcctcaatgtatcacggatgggtaccagatcttcatattcatgcagaagacactctcctgcctttctatcttggggaaaaggacgatgtcacttatgcaataaagcccacttgctggccggggcttgacattattccttcctgtctggctctgcaccgtattgaaactgagttaatgggcaaatttgatgaaggtaaactgcccaccgatccacacctgatgctccgactggccattgaaactgttgctcatgactatgatgtcatagttattgacagcgcgcctaacctgggtatcggcacgattaatgtcgtatgtgctgctgatgtgctgattgttcccacgcctgctgagttgtttgactacacctccgcactgcagtttttcgatatgcttcgtgatctgctcaagaacgttatcttaaagggttcgagcctgatgtacgtattttggggtattctttag

SEQ ID NO: 141126 - DNA, 735 bp, Homo sapiens; identical to SEQ ID NO: 119097

SEQ ID NO: 141127 - DNA, 1116 bp, Homo sapiens; identical to SEQ ID NO: 121484
  misc_feature (1)...(1116): n = a,t,c or g

SEQ ID NO: 141128 - DNA, 1176 bp, Homo sapiens; identical to SEQ ID NO: 121221

SEQ ID NO: 141129 - DNA, 1002 bp, Homo sapiens; identical to SEQ ID NO: 121222

SEQ ID NO: 141130 - DNA, 1554 bp, Homo sapiens; identical to SEQ ID NO: 127573
  misc_feature (1)...(1554): n = a,t,c or g

SEQ ID NO: 141131 - DNA, 1980 bp, Homo sapiens; identical to SEQ ID NO: 139938
  misc_feature (1)...(1980): n = a,t,c or g

SEQ ID NO: 141132 - DNA, 1356 bp, Homo sapiens
  misc_feature (1)...(1356): n = a,t,c or g
atgttggccccgatccactcggtgtgggttantatcgtcggacccgcgctccactggatttgctcagactacagcgcgcctaacctgggtatcggcacgattaatgtcgtatgtgctgctgatgtgctgattgttcccacgcctgctgagttgtttgactacacctccgcactgcagtttttcgatatgcttcgtgatctgctcaagaaccttgatcttaaagggttcgagcctgatatcagaaaatctgatcgcaccctacaggaccatgacggtatctgcgagatccatgttgctaaatatgctgaaatattcgcattgacctctgcggaagccagtaaggatatacggcaggcattgaagagtttcgcggggaaggaagtggttttttatcgccctgaagaggatgccggcgatgaaaaaggctatgatcttttccttggtttatcaaacattattacccgctgtatcaacaccgccaaattgcctaaatcagttgttgctcttttttctcaccccggtgaactatctgcccggtcaggtgatgcacttcaaaaagcctttacagataaagaggaattacttaagcagcaggcatctaaccttcatgagcagaaaaaagctggggtgatatttgaagctgaagaagttatcactcttttaacttctgtgcttaaaacgtcatctgcatcaagaactagtttaagctcacgacatcagtttgctcctggagcgacagtattgtataagggcgataaaatggtgcttaacctggacagggattttgccgatttcggaaccaccatcaaacaggattttcgcctgctggggcaaaccagcgtggaccgcttgctgcaactctctcagggccaggcggtgaagggcaatcagctgttgcccgtctcactgatcagaaaatctgatggcaccctacaggaacatgacggtatctgcgagatccatgttgctaaatatgctgaaatattcggattgacctctgcggaagccatagtaatagcggccgtattcaaaccacgccaactcacggttaaatattgtatcacccaggcccaagggatcgttatgcgcgtagagaaggctcgaaccggtttacgcagtttcggttacctccacccaaaagaaatcaccaatccgtatgccatgcgtttatacgaatccctgtgtcagtatcgtaagccggatggctcaggcatcgtctctctgaaaatcgactggatcatagagcgttaccagctgcctcaaagttaccagcgtatgcctgacttccgcccccgcttcctgcaggtctgtgtaatgagatcaacagcagaaggggatcctcagagtcgccaatga

SEQ ID NO: 141133 - DNA, 1932 bp, Homo sapiens; identical to SEQ ID NO: 119300
  misc_feature (1)...(1932): n = a,t,c or g

SEQ ID NO: 141134 - DNA, 1749 bp, Homo sapiens; identical to SEQ ID NO: 124762

SEQ ID NO: 141135 - DNA, 1041 bp, Homo sapiens; identical to SEQ ID NO: 121224

SEQ ID NO: 141136 - DNA, 1014 bp, Homo sapiens; identical to SEQ ID NO: 121226

SEQ ID NO: 141137 - DNA, 1009 bp, Homo sapiens; identical to SEQ ID NO: 127578

SEQ ID NO: 141138 - DNA, 1077 bp, Homo sapiens; identical to SEQ ID NO: 121228
  misc_feature (1)...(1077): n = a,t,c or g

SEQ ID NO: 141139 - DNA, 1869 bp, Homo sapiens; identical to SEQ ID NO: 127584
  misc_feature (1)...(1869): n = a,t,c or g

SEQ ID NO: 141140 - DNA, 924 bp, Homo sapiens; identical to SEQ ID NO: 135867

SEQ ID NO: 141141 - DNA, 1191 bp, Homo sapiens; identical to SEQ ID NO: 121235

SEQ ID NO: 141142 - DNA, 1297 bp, Homo sapiens
atgaaactcatggaaacacttaaccagtgcataaacgctggtcatgaaatgacgaaggctatcgccattgcacagtttaatgatgacagcccggaagcgaggaaaataacccggcgctggagaataggtgaagcagcggatttagttggggtttcttctcaggctatcagagatgccgagaaagcagggcgactaccgcacccggatatggaaattcgaggacgggttgagcaacgtgttggttatacaattgaacaaattaatcatatgcgtgatgtgtttggtacgcgattgcgacgtgctgaagacgtatttccaccggtgatcggggttgctgcccataaaggtggcgtttacaaaacctcagtttctgttcatcttgctcaggatctggctctgaaggggctacgtgttttgctcgtggaaggtaacgacccccagggaacagcctcaatgtatcacggatgggtaccagatcttcatattcatgcagaagacactctcctgcctttctatcttggggaaaaggacgatgtcacttatgcaataaagcccacttgctggccggggcttgacattattccttcctgtctggctctgcaccgtattgaaactgagttaatgggcaaatttgatgaaggtaaactgcccaccgatccacacctgatgctccgactggccattgaaactgttgctcatgactatgatgtcatagttattgacagcgcgcctaacctgggtatcggcacgattaatgtcgtatgtgctgctgatgtgctgattgttcccacgcctgctgagttgtttgactacacctccgcactgcagtttttcgatatgcttcgtgatctgctcaagaacgttgatcttaaagggcaagaatttaatatccgcggcattgttcccgtattacgccgtgtaaaacctgacctggcgattggtattgatatcactccatcgtgtgacacccctgatttacacgattattccgaggtcaagattaatcagggcgttgggatcacctgcctgaactaccatggtcggggaacgctggccggattaatcacgcctcctcgcctgatacggatgttggaacagacggctcttgaacacaacattccggtgcagcgagaagtggctcccggcgtgataacagaaaccggttatatccaggttgagcaggatggtattccctgcgccagtctctctattccttgtcgctatacccattctccggcggaggttgccagcctgcgtgatttgactgattgcatccgcctattgaccgctctggcag

SEQ ID NO: 141143 - DNA, 1147 bp, Homo sapiens
atgaaactcatggaaacacttaaccagtgcataaacgctggtcatgaaatgacgaaggctatcgccattgcacagtttaatgatgacagcccggaagcgaggaaaataacccggcgctggagaataggtgaagcagcggatttagttggggtttcttctcaggctatcagagatgccgagaaagcagggcgactaccgcacccggatatggaaattcgaggacgggttgagcaacgtgttggttatacaattgaacaaattaatcatatgcgtgatgtgtttggtacgcgattgcgacgtgctgaagacgtatttccaccggtgatcggggttgctgcccataaaggtggcgtttacaaaacctcagtttctgttcatcttgctcaggatctggctctgaaggggctacgtgttttgctcgtggaaggtaacgacccccagggaacagcctcaatgtatcacggatgggtaccagatcttcatattcatgcagaagacactctcctgcctttctatcttggggaaaaggacgatgtcacttatgcaataaagcccacttgctggccggggcttgacattattccttcctgtctggctctgcaccgtattgaaactgagttaatgggcaaatttgatgaaggtaaactgcccaccgatccacacctgatgctccgactggccattgaaactgttgctcatgactatgatgtcatagttattgacagcgcgcctaacctgggtatcggcacgattaatgtcgtatgtgctgctgatgtgctgattgttcccacgcctgctgagttgtttgactacacctccgcactgcagtttttcgatatgcttcgtgatctgctcaagaacgttgatcttaaagggttcgagcctgataacgcagagcatgctggcttcattgtacagatggaatcctggagaatgccccacatcccctccctgctcagctccacttcacccatggtgcaacctaagatatgctccccctcagggtattcatccctggtaacccacgtgctgaagagtgcctccaaggattattgtttacagcaaacatggaagatcggccctttcacaagtgagaaaactgagacttacttaggaggaacatgggcctcttggatgataaaaaatg

SEQ ID NO: 141144 - DNA, 1026 bp, Homo sapiens; identical to SEQ ID NO: 124784

SEQ ID NO: 141145 - DNA, 1560 bp, Homo sapiens; identical to SEQ ID NO: 127595

SEQ ID NO: 141146 - DNA, 1165 bp, Homo sapiens
atgaaactcatggaaacacttaaccagtgcataaacgctggtcatgaaatgacgaaggctatcgccattgcacagtttaatgatgacagcccggaagcgaggaaaataacccggcgctggagaataggtgaagcagcggatttagttggggtttcttctcaggctatcagagatgccgagaaagcagggcgactaccgcacccggatatggaaattcgaggacgggttgagcaacgtgttggttatacaattgaacaaattaatcatatgcgtgatgtgtttggtacgcgattgcgacgtgctgaagacgtatttccaccggtgatcggggttgctgcccataaaggtggcgtttacaaaacctcagtttctgttcatcttgctcaggatctggctctgaaggggctacgtgttttgctcgtggaaggtaacgacccccagggaacagcctcaatgtatcacggatgggtaccagatcttcatattcatgcagaagacactctcctgcctttctatcttggggaaaaggacgatgtcacttatgcaataaagcccacttgctggccggggcttgacattattccttcctgtctggctctgcaccgtattgaaactgagttaatgggcaaatttgatgaaggtaaactgcccaccgatccacacctgatgctccgactggccattgaaactgttgctcatgactatgatgtcatagttattgacagcgcgcctaacctgggtatcggcacgattaatgtcgtatgtgctgctgatgtgctgattgttcccacgcctgctgagttgtttgactacacctccgcactgcagtttttcgatatgcttcgtgatctgctcaagaacgttgatcttaaagggttcgagcctgatgtacgcgggagaggaggatcaaggccagaggccctcctgcagggaaaaggtggcttctcctcagtggtagctctgggcgcaagcatcatctgtaacaagatcccaggcctggctcccagacagcgggcgatctgccagagccggcccgacgccatcatcgtcataggagaaggctcacaaatgggcctggacgagtgtcagtttcagttccgcaatggccgctggaactgctctgcactgggagagcgcaccgtcttcgggaaggagctcaaagtgg

SEQ ID NO: 141147 - DNA, 1067 bp, Homo sapiens; identical to SEQ ID NO: 121261

SEQ ID NO: 141148 - DNA, 1288 bp, Homo sapiens
atgaaactcatggaaacacttaaccagtgcataaacgctggtcatgaaatgacgaaggctatcgccattgcacagtttaatgatgacagcccggaagcgaggaaaataacccggcgctggagaataggtgaagcagcggatttagttggggtttcttctcaggctatcagagatgccgagaaagcagggcgactaccgcacccggatatggaaattcgaggacgggttgagcaacgtgttggttatacaattgaacaaattaatcatatgcgtgatgtgtttggtacgcgattgcgacgtgctgaagacgtatttccaccggtgatcggggttgctgcccataaaggtggcgtttacaaaacctcagtttctgttcatcttgctcaggatctggctctgaaggggctacgtgttttgctcgtggaaggtaacgacccccagggaacagcctcaatgtatcacggatgggtaccagatcttcatattcatgcagaagacactctcctgcctttctatcttggggaaaaggacgatgtcacttatgcaataaagcccacttgctggccggggcttgacattattccttcctgtctggctctgcaccgtattgaaactgagttaatgggcaaatttgatgaaggtaaactgcccaccgatccacacctgatgctccgactggccattgaaactgttgctcatgactatgatgtcatagttattgacagcgcgcctaacctgggtatcggcacgattaatgtcgtatgtgctgctgatgtgctgattgttcccacgcctgctgagttgtttgactacacctccgcactgcagtttttcgatatgcttcgtgatctgctcaagaacgttgatcttaaagggttcgagcctgatgcttcatcaagaaaacaaaattattcatcaaaaaatgaaaactgtgtggaagaaacttttgaagaattgcttttaaagtataaacaaatacagttggaactagaatgcatcaataaggatgaaaaactagcattgagtagcaaagaagagaatgtgcaggaagatcctaaaacattgaacttcgaggaccaaactagcactgataatgtcagtattacaaaggattcaagtaaagaagtagctcctgaggagaaaacacaagtcaaaacttttcaggcatttgaattaaaaccactcaggcaaaaattgactttaccaggagataagaaccgtttgaaaaaagttaaagatggagcaaaaccactttccctgaaatccgacactactgattctagtcaag

SEQ ID NO: 141149 - DNA, 1377 bp, Homo sapiens
atgaaactcatggaaacacttaaccagtgcataaacgctggtcatgaaatgacgaaggctatcgccattgcacagtttaatgatgacagcccggaagcgaggaaaataacccggcgctggagaataggtgaagcagcggatttagttggggtttcttctcaggctatcagagatgccgagaaagcagggcgactaccgcacccggatatggaaattcgaggacgggttgagcaacgtgttggttatacaattgaacaaattaatcatatgcgtgatgtgtttggtacgcgattgcgacgtgctgaagacgtatttccaccggtgatcggggttgctgcccataaaggtggcgtttacaaaacctcagtttctgttcatcttgctcaggatctggctctgaaggggctacgtgttttgctcgtggaaggtaacgacccccagggaacagcctcaatgtatcacggatgggtaccagatcttcatattcatgcagaagacactctcctgcctttctatcttggggaaaaggacgatgtcacttatgcaataaagcccacttgctggccggggcttgacattattccttcctgtctggctctgcaccgtattgaaactgagttaatgggcaaatttgatgaaggtaaactgcccaccgatccacacctgatgctccgactggccattgaaactgttgctcatgactatgatgtcatagttattgacagcgcgcctaacctgggtatcggcacgattaatgtcgtatgtgctgctgatgtgctgattgttcccacgcctgctgagttgtttgactacacctccgcactgcagtttttcgatatgcttcgtgatctgctcaagaacgttgatcttaaagggttcgagcctgataaaaaatggttggctggtcatgaacaatacatattttatgccaattcagaactccctaaaaacccaaggggtggactcggggtgagataccctggggggccacacaatgtgccagacaacctggattgggtccatttgctatataatgggggtcaggcaccgtgtatgaaatctaacaatgcgctcatcgtcatcctcggcaccgtcaccctggatgctgtaggcataggcttggttatgccggtactgccgggcctcttgcgggatatcgtccattccgacagcatcgccagtcactatggcgtgctgctagcgctatatgcgttgatgcaatttctatgcgcacccgttctcggagcactgtccgaccgctttggccgccgcccagtcctgctcgcttcgctacttggagccactatcgactacgcgatcatggcgaccacacccgtcctgtggatctacccactagtcaattcaccatcttgttga

SEQ ID NO: 141150 - DNA, 1030 bp, Homo sapiens
atgaaactcatggaaacacttaaccagtgcataaacgctggtcatgaaatgacgaaggctatcgccattgcacagtttaatgatgacagcccggaagcgaggaaaataacccggcgctggagaataggtgaagcagcggatttagttggggtttcttctcaggctatcagagatgccgagaaagcagggcgactaccgcacccggatatggaaattcgaggacgggttgagcaacgtgttggttatacaattgaacaaattaatcatatgcgtgatgtgtttggtacgcgattgcgacgtgctgaagacgtatttccaccggtgatcggggttgctgcccataaaggtggcgtttacaaaacctcagtttctgttcatcttgctcaggatctggctctgaaggggctacgtgttttgctcgtggaaggtaacgacccccagggaacagcctcaatgtatcacggatgggtaccagatcttcatattcatgcagaagacactctcctgcctttctatcttggggaaaaggacgatgtcacttatgcaataaagcccacttgctggccggggcttgacattattccttcctgtctggctctgcaccgtattgaaactgagttaatgggcaaatttgatgaaggtaaactgcccaccgatccacacctgatgctccgactggccattgaaactgttgctcatgactatgatgtcatagttattgacagcgcgcctaacctgggtatcggcacgattaatgtcgtatgtgctgctgatgtgctgattgttcccacgcctgctgagttgtttgactacacctccgcactgcagtttttcgatatgcttcgtgatctgctcaagaacgttgatcttaaaggagcaaggcctgtcattacggtggatgtctccatcttcctcccgggctccatcaacatcacagcgcctcagtgtcacgacggacagcagcctgtgaactgcctgaacgtcaccacctgcttcagcttccatggcaaacacgttccaggagagattg

SEQ ID NO: 141151 - DNA, 1344 bp, Homo sapiens
atgaaactcatggaaacacttaaccagtgcataaacgctggtcatgaaatgacgaaggctatcgccattgcacagtttaatgatgacagcccggaagcgaggaaaataacccggcgctggagaataggtgaagcagcggatttagttggggtttcttctcaggctatcagagatgccgagaaagcagggcgactaccgcacccggatatggaaattcgaggacgggttgagcaacgtgttggttatacaattgaacaaattaatcatatgcgtgatgtgtttggtacgcgattgcgacgtgctgaagacgtatttccaccggtgatcggggttgctgcccataaaggtggcgtttacaaaacctcagtttctgttcatcttgctcaggatctggctctgaaggggctacgtgttttgctcgtggaaggtaacgacccccagggaacagcctcaatgtatcacggatgggtaccagatcttcatattcatgcagaagacactctcctgcctttctatcttggggaaaaggacgatgtcacttatgcaataaagcccacttgctggccggggcttgacattattccttcctgtctggctctgcaccgtattgaaactgagttaatgggcaaatttgatgaaggtaaactgcccaccgatccacacctgatgctccgactggccattgaaactgttgctcatgactatgatgtcatagttattgacagcgcgcctaacctgggtatcggcacgattaatgtcgtatgtgctgctgatgtgctgattgttcccacgcctgctgagttgtttgactacacctccgcactgcagtttttcgatatgcttcgtgatctgctcaagaacgttgatcttaaagggttcgagcctgatgtacgtctgttaaagaaagtaagggtcgagaacagcatccctgcagctggagaaacacaaaatgtagaagtagcagcagggcccgctgggaaatgtgctgccgtagatgtggagcccccttcgaagcagaaggagaaggcagcctccctgaagagggacatgcccaaggtgctgcacgacagcagcaaggacagcatcaccgtctttgtcagcaacctgccctacagcatgcaggagccggacacgaagctcaggccactcttcgaggcctgtggggaggtggtccagatccgacccatcttcagcaaccgtggggatttccgaggttactgctacgtggagtttaaagaagagaaatcagcccttcaggcactggagatggaccggaaaagtgtagaagggaggccaatgtttgtttccccctgtgtggataagagcaaaaaccccgattttaag

SEQ ID NO: 141152 - DNA, 2280 bp, Homo sapiens
  misc_feature (1)...(2280): n = a,t,c or g
atggtggattcgttaattgcgcccgtaggagtaatggctcgcggtaatgccattactttgcctgtacgcgccacgaatgtgaagtttactcttgaagagctccggggtgatagtgttgagaagacctctcgggtatggtcagaaaaaaaggatagaggagggcaggaggcagaagtgagcggggaagggtcgtcgcagaccaaatcactgcaaaagcggcaacactcaaatgggtcagatttcacagccaggggcttccacacgggccaggctttggtaagaagcaaagggacatactggaatccaacagggttgggactctcgcatgggacagaagaccctaacttgattggtgaggagttggatgctggggagtgggacaagaacacacgaaaggagttggcggttttaaatgtcagacgggattttgccgatttcggaaccaccatcaaacaggattttcgcctgctggggcaaaccagcgtggaccgcttgctgcaactctctcagggccaggcggtgaagggcaatcagctgttgcccgtctcactggtgaaaagaaaaaccaccctggcgcccaatacgcaaaccgcctctccccgcgcgttggccgattcattaatgcagctggcacgacaggtttcccgactggaaagcgggcagttttgggtttttgaagggggattacgtgttttggttcgtgaaagggtaaccacccccaagggaacaggcctcaatgtatcagggatggggtaccagatctttaatattcatgcagaagacactctcctgcttttctatcttggggaaaaggacgatgtcacttatgcaataaagcccacttgctggccggggcttgacattattccttcctgtctggctttgcaccgtattgaaantgagttaatgggcaaatttgatgaaggtaaactgcccaccgatccacacctgatgctccgactggccattgaaactgttgctcatgactatgatgtcatagttattgacagcgcgcctaacctgggtatcggcacgattaatgtcgtatgtgctgctgatgtgctgattgttcccacgcctgctgagttgtttgactacacctccgcactgcagtttttcgatatgcttcgtgatctgctcaagaacgttgatcttaaagggttcgagcctgatgtacgtattttgcttaccaaatacagcaatagtaatggctatcagtccccgtggatggaggagcaaattcgggatgcctggggaagcatggttctaaaaaatgttgtacgtgaaacggatgaagttggtaaaggtcagatccggatgagaactgtttttgaacaggccattgatcaacgctcttcaacaagtgcctggagaaatgctcttgcagcgaaccggtttacgcagtttcggcttagtgaaacaaaagaaatcaccaatccgtatgccatgcgtttatacgaatccctgtgtcagtatcgtaagccggatggctcaggcatcgtctctctgaaaatcgactggatcatagagcgttaccagctgcctcaaagttaccagcgtatgcctgacttccgccgccgcttcctgcaggattttcgcctgttggggcaaaccagcgtggaccgcttgctccaactctctcagggccagtcggtgaagggcaatcagctgttgcccgtctcactggtgaaaagaaaaaccaccctggcgcccaatacgcaaaccgcctctccccgcgcgttggccgattcattaatgcagctggcacgacaggtttcccgactggaaagcgggcaggattttgccgatttcggaaccaccatcaaacaggattttcgcctgctggggcaaaccagcgtggaccgcttgctgcaactctctcagggccaggcggtgaagggcaatcagctgttgcccgtctcactggtgaaaagaaaaaccaccctggcgcccaatacgcaaaccgcctctccccgcgcgttggccgattcattaatgcagctggcacgacaggtttcccgactggaaagcgggcaggattttgccgatttcggaaccaccatcaaacaggattttcgcctgctggggcaaaccagcgtggaccgcttgctgcaactctctcagggccaggcggtgaagggcaatcagctgttgcccgtctcactggtgaaaagaaaaaccaccctggcgcccaatacgcaaaccgcctctccccgcgcgttggccgattcattaatgcagctggcacgacaggtttcccgactggaaagcgggcagtga

SEQ ID NO: 141153 - DNA, 1125 bp, Homo sapiens; identical to SEQ ID NO: 127598

SEQ ID NO: 141154 - DNA, 1137 bp, Homo sapiens
atgaaactcatggaaacacttaaccagtgcataaacgctggtcatgaaatgacgaaggctatcgccattgcacagtttaatgatgacagcccggaagcgaggaaaataacccggcgctggagaataggtgaagcagcggatttagttggggtttcttctcaggctatcagagatgccgagaaagcagggcgactaccgcacccggatatggaaattcgaggacgggttgagcaacgtgttggttatacaattgaacaaattaatcatatgcgtgatgtgtttggtacgcgattgcgacgtgctgaagacgtatttccaccggtgatcggggttgctgcccataaaggtggcgtttacaaaacctcagtttctgttcatcttgctcaggatctggctctgaaggggctacgtgttttgctcgtggaaggtaacgacccccagggaacagcctcaatgtatcacggatgggtaccagatcttcatattcatgcagaagacactctcctgcctttctatcttggggaaaaggacgatgtcacttatgcaataaagcccacttgctggccggggcttgacattattccttcctgtctggctctgcaccgtattgaaactgagttaatgggcaaatttgatgaaggtaaactgcccaccgatccacacctgatgctccgactggccattgaaactgttgctcatgactatgatgtcatagttattgacagcgcgcctaacctgggtatcggcacgattaatgtcgtatgtgctgctgatgtgctgattgttcccacgcctgctgagttgtttgactacacctccgcactgcagtttttcgatatgcttcgtgatctgctcaagaacgttgatcttaaagggttcgagcctgatattggcatgatgtacctgttcctctccttccttgaggactccgggtatatggcgcgtgcggcgtttgtgatggaccgtctgatgcaggcgctgggcttgccggggaaatcctttgtgccgctgatcgtcggtttcggttgtaacgtaccgtcggtaatgggtgcacgtacgcttgatgcaccgcgtgaacgtctgatgaccatcatgatggcaccgtttatgtcctgcggcgcgcggtatcaaagagac

SEQ ID NO: 141155 - DNA, 1884 bp, Homo sapiens
atgaaactcatggaaacacttaaccagtgcataaacgctggtcatgaaatgacgaaggctatcgccattgcacagtttaatgatgacagcccggaagcgaggaaaataacccggcgctggagaataggtgaagcagcggatttagttggggtttcttctcaggctatcagagatgccgagaaagcagggcgactaccgcacccggatatggaaattcgaggacgggttgagcaacgtgttggttatacaattgaacaaattaatcatatgcgtgatgtgtttggtacgcgattgcgacgtgctgaagacgtatttccaccggtgatcggggttgctgcccataaaggtggcgtttacaaaacctcagtttctgttcatcttgctcaggatctggctctgaaggggctacgtgttttgctcgtggaaggtaacgacccccagggaacagcctcaatgtatcacggatgggtaccagatcttcatattcatgcagaagacactctcctgcctttctatcttggggaaaaggacgatgtcacttatgcaataaagcccacttgctggccggggcttgacattattccttcctgtctggctctgcaccgtattgaaactgagttaatgggcaaatttgatgaaggtaaactgcccaccgatccacacctgatgctccgactggccattgaaactgttgctcatgactatgatgtcatagttattgacagcgcgcctaacctgggtatcggcacgattaatgtcgtatgtgctgctgatgtgctgattgttcccacgcctgctgagttgtttgactacacctccgcactgcagtttttcgatatgcttcgtgatctgctcaagaacgttgatcttaaagggttcgagcctgatgtacgtattttgcttaccaaatacagcaatagtaatggctctcagtccccgtggatggaggagcaaattcgggatgcctggggaagcatggttctaaaaaatgttgtacgtgaaacggatgaagttggtaaaggtcagatccggatgagaactgtttttgaacaggccattgatcaacgctcttcaactgctgccccgatggtggattcgttaattgcgcgcgtaggagtaatggctcgcggtaatgccattactttgcctgtatgtggtcgggatgtgaagtttactcttgaagtgctccggggtgatagtgttgagaagacctctcggacaccggcgttcggtcgaagagtatctggtgtcatagacattgccgatgggagtcgccgtcgtaaagctgctgcacttaccgaaagtgattatcgtgttctggttggcgagctggatgatgagcacatgcctgcattatccccattgggtaacgattatcgcccaacaagtgcttatgaacgtggtcagcgttatgcaacccgattgcagaatgaatttgctggaaatatttctgcgctggctgatgcggaaaatatttcacgtaagattattacccgctgtatcaacaccgccaaattgcctaaatcagttgttgctcttttttctcaccccggtgaactatctgcccggtcaggtgatgcacttcaaaaagcctttacagataaagaggaattacttaagcagcaggcatctaaccttcatgagcagaaaaaagctggggtgatatttgaagctgaagaagttatcactcttttaacttctgtgcttaaaacgtcatctgcatcaatatatagtttaagctcgagacagcagtttgctcatggagcgccagtattgtataagggcgataaaatggtgcttaacctggacaggtctcgtgttccaactgagtgtatagagaaaattgaggccattcttaaggaacttgaaaagccagcaccctga

SEQ ID NO: 141156 - DNA, 1211 bp, Homo sapiens
atgaagatgccagaaaaacatgacctgttggccgccattctcgcggcaaaggaacaaggcatcggggcaatccttgcgtttgcaatggcgtaccttcgcggcagatataatggcgttctagaggctcgaagtctgaaatcaagatgtcagcagagccatgctcttgctgaaggctctaggggagggccacctgttactggtcgatttaagtcaacctttaccgctgattcgtggaacagatactctcttccatccttaaccggaggtgggaatatcctgcattcccgaacccatcgacgaactgtttcaaggcttcttggacgtcgctggcaggaactcctgcgtgatgtgtttggtacgcgattgcgacgtgctgaagacgtattcccaccggtgatcggggttgctgcccataaaggtggcgtttacaaaacctcagtttctgttcatcttgctcaggatctggctctgaaggggctacgtgttttgctcgtggaaggtaacgacccccagggaacagcctcaatgtatcacggatgggtaccagatcttcatattcatgcagaagacactctcctgcctttctatcttggggaaaaggacgatgtcacttatgcaataaggcccccttgcggccgggcttgaccattattccttcctgtctggctctgcaccgtattgaaactgagttaatgggcaaatttgatgaaggtaaactgcccaccgatccacacctgatgctccgactggccattgaaactgttgctcatgactatgatgtcatagttattgacagcgcgcctaacctgggtatcggcacgattaatgtcgtatgtgctgctgatgtgctgattgttcccacgcctgctgagttgtttgactacacctccgcactgcagttattcgatatgcttcgtgatctgctcaagaacgttgatcttaaagggttcgagcctgatgtacgtattttgcttaccaatacagcaatagtaatggctctcagtccccgtggatggaggagcaaaatccgggatgcctggggaagcatgggtctaaaaaatgttgacgtgaaacggatgaaattgggtaaaggtcaaatccggatgagaactgtttttgaaacagccatggataaacgccttttaactggtgcctgggaaaaagcttttttttttttggaacctggcttcgaagaaaaatccaaccgctga

SEQ ID NO: 141157 - DNA, 1440 bp, Homo sapiens
  misc_feature (1)...(1440): n = a,t,c or g
atgatcctaagtgaattaacacaagaacagaaaaccaaatattgcatgttcttacttataagtgggaacaaaacattgaatacacatagacataaagtgccggaactcgtccccgactttgctcaacgattggtgcaggtgcttatttcagacagaagccaggcagtaggagcaggcatttctgagcctacaagtgcagtggggtccttcccaggtctccaagagtgcagggatgcgtgggcccacagctgcagctgtgaaggtattggttggggctcttgcctgcttggtgaaacaggaggcctgggtctgcagccacagtttgggcagctgcagctgagcccagcgagcgaggaaataacccggctttggagaataggtgaagcagcggatttagttggggtttcttctcaggctatcagagatgccgagaaagcagggcgactaccgcacccggatatggaaattcgaggacgggttgagcaacgtgttggttatacaattgaacaaattaatcatatgcttgatgtgtttggtacgcgattgcgacgtgctgaagacgtatttccaccggtgatcggggttgctgcccataaaggtggcgtttacaaaacctcagtttctgttcatcttgctcaggatctggctctgaaggggctacgtgttttgctcgtggaaggtaacgacccccagggaacagcctcaatgtatcacggatgggtaccagatcttcatattcatgcagaagacactctcctgcctttctatcttggggaaaaggacgatgtcacttatgcaataaagcccacttgctggccggggcttgacattattccttcctgtctggctctgcaccgtattgaaactgagttaatgggcaaatttgatgaaggtaaactgcccaccgatccacacctgatgctccgactggccattgaaactgttgctcatgactatgatgtcatagttattgacagcgcgcctaacctgngtatcggcacgattaatgtcgtatgtgctgctgatgtgctgattgttcccacgcctgctgagttgtttgaatacaccttcgcactgcagtttttcgatatgcttcgggatctgctcaagaacgttgatcttaaaaggttcgagcctgattggtttggaaatgccagtccattcaccaagggtagactgcccgcatggaacctatatggagggcttgttaaaaatattgcttctcaggttccgccctcggggaatctaatccagtatgtcagaggcaaagcctggtctgttacgctgctgtgtgccagccactgtcctggtgtgtctgttgttggttccttcaggtgggttcttggtcttgctgacttcaagaatgaagctgcggaccttcgcggcattactgtagaagctccccctagatattctaaaaatccttctgcttcaaaatga

SEQ ID NO: 141158 - DNA, 1174 bp, Homo sapiens
atgaaactcatggaaacacttaaccagtgcataaacgctggtcatgaaatgacgaaggctatcgccattgcacagtttaatgatgacagcccggaagcgaggaaaataacccggcgctggagaataggtgaagcagcggatttagttggggtttcttctcaggctatcagagatgccgagaaagcagggcgactaccgcacccggatatggaaattcgaggacgggttgagcaacgtgttggttatacaattgaacaaattaatcatatgcgtgatgtgtttggtacgcgattgcgacgtgctgaagacgtatttccaccggtgatcggggttgctgcccataaaggtggcgtttacaaaacctcagtttctgttcatcttgctcaggatctggctctgaaggggctacgtgttttgctcgtggaaggtaacgacccccagggaacagcctcaatgtatcacggatgggtaccagatcttcatattcatgcagaagacactctcctgcctttctatcttggggaaaaggacgatgtcacttatgcaataaagcccacttgctggccggggcttgacattattccttcctgtctggctctgcaccgtattgaaactgagttaatgggcaaatttgatgaaggtaaactgcccaccgatccacacctgatgctccgactggccattgaaactgttgctcatgactatgatgtcatagttattgacagcgcgcctaacctgggtatcggcacgattaatgtcgtatgtgctgctgatgtgctgattgttcccacgcctgctgagttgtttgactacacctccgcactgcagtttttcgatatgcttcgtgatctgctcaagaacgttgatcttaaagggttcgagcctgatgtacggaattattcacctctctgtccccagggtgcaaaccagggctgggcacacaggaggactgggtgcgagggagaggagaaaggcagagacctcaagcagacaccagaccatctgtgctcgtccaggcctgagtttccagaagcgtccagttcttgtcgccagagcctagtcaagctgcccaggtcccggatacgatctttgatgcttgccttcctccaaactcacacccattctttgaaacacttcatgtcaccaaacagcttgagaagtttgtttttcccag

SEQ ID NO: 141159 - DNA, 1812 bp, Homo sapiens; identical to SEQ ID NO: 135875

SEQ ID NO: 141160 - DNA, 2190 bp, Homo sapiens
atgaaactcatggaaacacttaaccagtgcataaacgctggtcatgaaatgacgaaggctatcgccattgcacagtttaatgatgacagcccggaagcgaggaaaataacccggcgctggagaataggtgaagcagcggatttagttggggtttcttctcaggctatcagagatgccgagaaagcagggcgactaccgcacccggatatggaaattcgaggacgggttgagcaacgtgttggttatacaattgaacaaattaatcatatgcgtgatgtgtttggtacgcgattgcgacgtgctgaagacgtatttccaccggtgatcggggttgctgcccataaaggtggcgtttacaaaacctcagtttctgttcatcttgctcaggatctggctctgaaggggctacgtgttttgctcgtggaaggtaacgacccccagggaacagcctcaatgtatcacggatgggtaccagatcttcatattcatgcagaagacactctcctgcctttctatcttggggaaaaggacgatgtcacttatgcaataaagcccacttgctggccggggcttgacattattccttcctgtctggctctgcaccgtattgaaactgagttaatgggcaaatttgatgaaggtaaactgcccaccgatccacacctgatgctccgactggccattgaaactgttgctcatgactatgatgtcatagttattgacagcgcgcctaacctgggtatcggcacgattaatgtcgtatgtgctgctgatgtgctgattgttcccacgcctgctgagttgtttgactacacctccgcactgcagtttttcgatatgcttcgtgatctgctcaagaacgttgatcttaaagggttcgagcctgatgtacgtattttgcttaccaaatacagcaatagtaatggctctcagtccccgtggatggaggagcaaattcgggatgcctggggaagcatggttctaaaaaatgttgtacgtgaaacggatgaagttggtaaaggtcagatccggatgagaactgtttttgaacaggccattgatcaacgctcttcaactgctgccccgatggtggattcgttaattgcgcgcgtaggagtaatggctcgcggtaatgccattactttgcctgtatgtggtcgggatgtgaagtttactcttgaagtgctccggggtgatagtgttgagaagacctctcgggtatggtcaggtaatgaacgtgaccaggagctgcttactgaggacgcactggatgatctcatcccttcttttctactgactggtcaacagacaccggcgttcggtcgaagagtatctggtgtcatagaaattgccgatgggagtcgccgtcgtaaagctgctgcacttaccgaaagtgattatcgtgttctggttggcgagctggatgatgagcagatggctgcattatccagattgggtaacgattatcgcccaacaagtgcttatgaacgtggtcagcgttatgcaagccgattgcagaatgaatttgctggaaatatttctgcgctggctgatgcggaaaaatatttacgtatcagtgataaacttgggaataatacagaaacatcaatgagccaaaagccttgcaaaatgaaaaggataattctagagaagagttggcagtttgaaaaatggatcatcatagtgatcttatttcattatggtgaaagttggaacctcttacgtgccgatcaacgtctcattttcgccaaaagttggcccagggcttcccggtatcaacagggacaccaggatttatttattctgcgaagtgatcttccgtcacaggtatttattcgcgataagctcatggagcggcgtaaccgtcgcacaggaaggacagagaaagcgcggatctgggaagtgacggacagaacggtcaggacctggattggggaggcggttgccgccgctgctgctgacggtgtgacgttctctgttccggtcacaccacatacgttccgccattcctatgcgatgcacatgctgtatgccggtataccgctgaaagttctgcaaagcctgatgggacataagtccatcaattcaacggaagtctacacgaaagtttttgcgctggatgtggctgcccggcaccgggtgcagtttgcgatgccggaatctgatgccgttgcaatgctatccttttaa

SEQ ID NO: 141161 - DNA, 1408 bp, Homo sapiens
atgaaactcatggaaacacttaaccagtgcataaacgctggtcatgaaatgacgaaggctatcgccattgcacagtttaatgatgacagcccggaagcgaggaaaataacccggcgctggagaataggtgaagcagcggatttagttggggtttcttctcaggctatcagagatgccgagaaagcagggcgactaccgcacccggatatggaaattcgaggacgggttgagcaacgtgttggttatacaattgaacaaattaatcatatgcgtgatgtgtttggtacgcgattgcgacgtgctgaagacgtatttccaccggtgatcggggttgctgcccataaaggtggcgtttacaaaacctcagtttctgttcatcttgctcaggatctggctctgaaggggctacgtgttttgctcgtggaaggtaacgacccccagggaacagcctcaatgtatcacggatgggtaccagatcttcatattcatgcagaagacactctcctgcctttctatcttggggaaaaggacgatgtcacttatgcaataaagcccacttgctggccggggcttgacattattccttcctgtctggctctgcaccgtattgaaactgagttaatgggcaaatttgatgaaggtaaactgcccaccgatccacacctgatgctccgactggccattgaaactgttgctcatgactatgatgtcatagttattgacagcgcgcctaacctgggtatcggcacgattaatgtcgtatgtgctgctgatgtgctgattgttcccacgcctgctgagttgtttgactacacctccgcactgcagtttttcgatatgcttcgtgatctgctcaagaacgttgatcttaaagggttcgagcctgataaagctactcttttacaagatcccttctatgctagtgagttcagtcctgctattggaagtcaaaagccatatagttggcccagggcttcccggtatcaacagggacaccaggatttatttattctgcgaagtgatcttccgtcacaggtatttattcgcgataagctcatggagcggcgtaaccgtcgcacaggaaggacagagaaagcgcggatctgggaagtgacggacagaacggtcaggacctggattggggaggcggttgccgccgctgctgctgacggtgtgacgttctctgttccggtcacaccacatacgttccgccattcctatgcgatgcacatgctgtatgccggtataccgctgaaagttctgcaaagcctgatgggacataagtccatcagttcaacggaagtctacacgaaggtttttgcgctggatgtggctgcccggcaccgggtgcagtttgcgatgccggagtctgatgcggttgcgatgctgaaacaattatcctgagaat

SEQ ID NO: 141162 - DNA, 1278 bp, Homo sapiens
tcaacaagatggtgaattgactagtgggtagatccacaggacgggtgtggtcgccatgatcgcgtagtcgatagtggctccaagtagcgaagcgagcaggactgggcggcggccaaagcggccggacagtgctccgagaacgggtgcgcatagaaattgcatcaacgcatatagcgctagcagcacgccatattgactggcgatgccgggtgctggcttttcaagttccttaagaatggcctcaattttctctatacactcagttggaacacgagacctgtccagggtaagcaccattttatcgcccttatacaatactgtcgctccaggagcaaactgatgtcgtgagcttaaactagttcttgatgcagatgacgttttaagcacagaagttataagagtgataacttcttcagcttgaaatatcaccccagcttttttctgctcatgaaggttagatgcctgctgcttaagtaattcctctttatctgtaaaggctttttgaagtgcatcacctgaccgggcagatagttcaccggggtgagaaaaaagagcaacaactgatttaggcaatttggcggtgttgatacagcgggtaataatcttacgtgaaatattttccgcatcagccagcgcagaaatatttccagcaaattcattctgcaatcggcttgcataacgctgaccacgttcataagcacttgttgggcgataatcgttacccaatctggataatgcagccatctgctcatcatccagctcgccaaccagaacacgataatcactttcggtaagtgcagcagctttacgacggcgactcccatcggcaatttctatgacaccagatactcttcgaccgaacgccggtgtctgttgaccagtcagtagaaaagaagggatgagatcatccagtgcgtcctcagtaagcagctcctggtcacgttcattacctgaccatacccgagaggtcttctcaacactatcaccccggacacacgtgaatgttgctcttactcccataaacagaatatttatatcttgtaaatgagctatagaatcatcattgttgtgctttctgaacagcttgaaatactctatttctattttctcagggctgtggttttctggctgatggttcatccccatattttccacagtcttgaaagatactctcattttataggaacctggcaagtgaagatactgtgcccacaggactgtgctgcctggctgagacccagaccaggaaaatgagcacatttgagtgagatcaggcat

SEQ ID NO: 141163 - DNA, 1100 bp, Homo sapiens
atgaaactcatggaaacacttaaccagtgcataaacgctggtcatgaaatgacgaaggctatcgccattgcacagtttaatgatgacagcccggaagcgaggaaaataacccggcgctggagaataggtgaagcagcggatttagttggggtttcttctcaggctatcagagatgccgagaaagcagggcgactaccgcacccggatatggaaattcgaggacgggttgagcaacgtgttggttatacaattgaacaaattaatcatatgcgtgatgtgtttggtacgcgattgcgacgtgctgaagacgtatttccaccggtgatcggggttgctgcccataaaggtggcgtttacaaaacctcagtttctgttcatcttgctcaggatctggctctgaaggggctacgtgttttgctcgtggaaggtaacgacccccagggaacagcctcaatgtatcacggatgggtaccagatcttcatattcatgcagaagacactctcctgcctttctatcttggggaaaaggacgatgtcacttatgcaataaagcccacttgctggccggggcttgacattattccttcctgtctggctctgcaccgtattgaaactgagttaatgggcaaatttgatgaaggtaaactgcccaccgatccacacctgatgctccgactggccattgaaactgttgctcatgactatgatgtcatagttattgacagcgcgcctaacctgggtatcggcacgattaatgtcgtatgtgctgctgatgtgctgattgttcccacgcctgctgagttgtttgactacacctccgcactgcagtttttcgatatgcttcgtgatctgctcaagaacgttgatcttaaagggttcgagcctgatgtactcacactggaagctggttggatggtgtccactcacactgagcgtgggtatttctcttctagtccactgattcaaaagtcagtgtccactgggaacatcctcagagacacccccacaaactacttcaccagctatccaggcatcgctcaatccagtcaaattggacacctaatattaataatcacatatagttatgacatttgcataag

SEQ ID NO: 141164 - DNA, 2334 bp, Homo sapiens; identical to SEQ ID NO: 127612

SEQ ID NO: 141165 - DNA, 1915 bp, Homo sapiens
atgacagcccggaaagcgaggaaaataacccggcgctggagaataggtgaagcagcggatttagttggggtttcttctcaggctatcagagatgccgagaaagcagggcgactaccgcacccggatatggaaattcgaggacgggttgagcaacgtgttggttatacaattgaacaaattaatcatatgcgtgatgtgtttggtacgcgattgcgacgtgctgaagacgtatttccaccggtgatcggggttgctgcccataaaggtaacgacccccagggaacagcctcaatgtatcacggatgggtaccagatcttcatattcatgcagaagacactctcctgcctttctatcttggggaaaaggacgatgtcacttatgcaataaagcccacttgctggccggggcttgacattattccttcctgtctggctctgcaccgtattgaaactgagttaatgggcaaatttgatgaagcgcagcctaacctgggtatcggcacgattaatgtcgtatgtgctgctgatgtgctgattgttcccacgcctgctgagttgtttgactacacctccgcactgcagtttttcgatatgcttcgtgatctgctcaagaacgttgatcttaaagggttcgagcctgatgtacgtattttgcttaccaaatacagcaatagtaatggctctcagtccccgtggatggaggagcaaattcgggatgcctggggaagcatggttctaaaaaatgttgtacgtgaaacggatgaagttggtaaaggtcagatccggatgagaactgtttttgaacaggccattgatcaacgctcttcaactgatacttcgttatcgacaccagctgccccgatggtggattcgttaattgcgcgcgtaggagtaatggctcgcggtaatgccattactttgcctgtatgtggtcgggatgtgaagtttactctttgaattgttccgggggtgatagtgttaaaaagacctctcgggtatggtcaggtaatgaacgtgaccaggagctgcttactgaggacgcactggatgatctcatcccttcttttctactgactggtcaacagacaccggcgttcggtcgaagagtatctggtgtcatagaaattgccgatgggagtcgccgtcgtaaagctgctgcacttaccgaaagtgattatcgtgttctggttggcgagctggatgatgagcagatggctgcattatccagattgggtaacgattatcgcccaacaagtgcttatgaacgtggtcagcgttatgcaagccgattgcagaatgaatttgctgggaaatatttcttgcgctggctgatgcggaaaatatttcacgtaagattattacccgctgtatcaacaccgccaaattgcctaaatcagttgttgctcttttttctcaccccggtgaactatctgcccggtcaggtgatgcacttcaaaaagcctttacagataaagaggaattacttaagcagcaggcatctaaccttcatgagcagaaaaaagctggggtgatatttgaagctgaagaagttatcactcttttaacttctgtgcttaaaacgtcatctgcatcaagaactagtttaagctcacgacatcagtttgctcctggagcgacagtattgtataagggcgataaaatggtgcttaacctggacaggtctcgtgttccaactgagtgtatagagaaaattgaggccattcttaaggggggcttctacataaggtgggaggagggaagaaaacgggagtgcatctgcctggggcctgtaccggaggaagatgctcaggaggcccagcagacccaggactctctcccacctatggccccgtggcaagaccaaaggggagctctttggagctgtggcccctttgtgtcttccaaatcatattaa

SEQ ID NO: 141166 - DNA, 1077 bp, Homo sapiens
atgaaactcatggaaacacttaaccagtgcataaacgctggtcatgaaatgacgaaggctatcgccattgcacagtttaatgatgacagcccggaagcgaggaaaataacccggcgctggagaataggtgaagcagcggatttagttggggtttcttctcaggctatcagagatgccgagaaagcagggcgactaccgcacccggatatggaaattcgaggacgggttgagcaacgtgttggttatacaattgaacaaattaatcatatgcgtgatgtgtttggtacgcgattgcgacgtgctgaagacgtatttccaccggtgatcggggttgctgcccataaaggtggcgtttacaaaacctcagtttctgttcatcttgctcaggatctggctctgaaggggctacgtgttttgctcgtggaaggtaacgacccccagggaacagcctcaatgtatcacggatgggtaccagatcttcatattcatgcagaagacactctcctgcctttctatcttggggaaaaggacgatgtcacttatgcaataaagcccacttgctggccggggcttgacattattccttcctgtctggctctgcaccgtattgaaactgagttaatgggcaaatttgatgaaggtaaactgcccaccgatccacacctgatgctccgactggccattgaaactgttgctcatgactatgatgtcatagttattgacagcgcgcctaacctgggtatcggcacgattaatgtcgtatgtgctgctgatgtgctgattgttcccacgcctgctgagttgtttgactacacctccgcactgcagtttttcgatatgcttcgtgatctgctcaagaacgttgatcttaaagggttcgagcctgatgtaccaataagagctaactgccatcaagagccatcagtatgtcttcaagctgcatgcccagaaagctggattggttttcaaagaaagtgtttctatttttctgatgacaccaagaactggacatcaagtcagaggttttgtgactcacaagatgctgatcttgctcaggttgaaagcttccaggaactg

SEQ ID NO: 141167 - DNA, 2222 bp, Homo sapiens; identical to SEQ ID NO: 138786

SEQ ID NO: 141168 - DNA, 1633 bp, Homo sapiens
atggtcggtttaggaccaccttttgggaaaatacgaactaccatcagagaatactacaaacacctctatgtgaataaactagaaaatctagaagaaatggataaattcctcaacacatacactctcccaagactaaaccaggaagaagttgaatctctgaatagaccagtaacaggatctgaaatcgaggcaataatcaatagctttccaaccaaaaaaagtccaggaccagatggattcacagccgaattctaccagaacgtagagtctgcacctagttcgtttggttatccaatgaaccaaattaatcatatgcgtgatgtgtttggtacgcgattgcgacggtgctgaagacgtatttccaccggtgatcggggttgttgcccataaaggtggcgtttacaaaacctcagtttctgttcatcttgctcaggatctggctctgaaggggctacgtgttttgctcgtggaaggtaacgacccccagggaacagcctcaatgtatcacggatgggtaccagatcttcatattcatgcagaagacactctcctgcctttctatcttggggaaaaggacgatgtcacttatgcaataaagcccacttgctggccggggcttgacattattccttcctgtctggctctgcaccgtattgaaactgagttaatgggcaaatttgatgaaggtaaactgcccaccgatccacacctgatgctccgactggccattgaaactgttgctcatgactatgatgtcatagttattgacagcgcgcctaacctgggtatcggcacgattaatgtcgtatgtgctgctgatgtgctgattgttcccacgcctgctgagttgtttgactacacctccgcactgcagatattcgatatgcttcgtgatctgctcaagaacccacaagccgcgatcgctctcagcgacatctttcgcctgacggaactctatattgtgcggcagaccaagtgcttcacgcgctttggtggtcaggccacgcccgataatcagcggaatacggccaccagcacgcacttcatcaatcagcacgtcggttttcagttcgaaggtcgccagcagttcgccggtttcgtggttacgcacttcacctttgtacgggtaaacgtcaatcacgtcgcccatgttcaggttagagacgtcgacttctattggcagtgcacccgcgtcttccatcgtgttaaagaagatgggtgcaattttaccgtcgaggcacaaaccaccgccgcgtttgttcggcacatgtggaatatcatcggccataaaccacagaacggagttagtggcggatttacgctaagaacccgttcccacaacgttaccgacgtacgccaagcgggaaaccctttttgttgcagagctttcgatttgcttggatcggaccaaacaacaccagtgctggttttggctcaatacctctacaggccctactgtataggcctattggtgtacggcgaagttgaatttgtttgcgttttgcgatattgtgttccccctactgctacatttcctgaattcttaaaagtttattcgaagtttctaaagaccattctaatggctgtcaatgcctggtaccgtaagaataaaaaccgtggcttcaaactatga

SEQ ID NO: 141169 - DNA, 2275 bp, Homo sapiens
ctatcctgtcgtcatggaagtgatatcgcggaaggaaaatacgatatgagtcgtctggcggcctttctttttctcaatgtatgagaggcgcattggagttatgctgtagatctcattaacacagacctgcaggaaacggcggccgaaagtcaggcctaccgcttggtaactttgaggcagctggtaacgctctatgatccagtcgattttcagagagacgatgcctgagccatccggcttacgatactgacacagggattcgtataaacgcatggcatacggattggtgatttcttttgtttcactaagccgaaactgcgtaaaccggttctgtaacccgataaagaagggaatgagatatgggttgatatgtacactgtaaagccctctggatggactgtgcacacgtttgataaaccaaggaaaaggatcatagcctttttcatcgccggcctcctcttcagggcgataaaaaaccccttccttccccgcgaaacttactcctacgacatgggggcatgaatccaggtctactgtagaggatcccctactacagacgaaggtatatgaaatcaggatggtaatgacagttgcaaaataggtgaaagcatttgctcttcctgtccaggttgaagcaccattttatcgacgataatacaatactgtcgctccaggagcaaactgatgtcgtgagcttaaactagttcttgatgcagatgacgttttaagcacagaagttaaaagagtgatactttcgtcagcctcaaatatcaccccagcttttatccggtcaataagggtaaaaggccccctgcttaagtaattcctctttatctgtaaaggctttttgaagtgcatcacctgaccgggcagatagttcaccggggtgagaaaaaagagcaacaactgatttaggcaatttggcggtgttgatacagcgggtaataatcttacgtgaaatattttccgcatcagccagcgcagaaatatttccagcaaattcattctgcaatcggcttgcataacgctgaccacgttcataagcacttgttgggcgataatcgttacccaatctggataatgcagccatctgctcatcatccagctcgccaaccagaacacgataatcactttcggtaagcgccgcagctttacgacggcgactcccatcggcaatttctatgacaccagatactcttcgaccgaacgccggtgtccgtagaatttctttagaaacccttttttgtgcgttggtcatctggaaaggcagggcatctaaaaggcgctttgctaaaactttgctgctgctaaagcgaggtgctgctatttgtcgaatataagcacgacgtgtaagtaagctgatttgatgcgcgaccagttcttcaaaaatcaatcgctgctgtgcaggatgtgagccttgattgagttgtaccatattggcatcaatcggtggttcgtgaatatagtgcagagcttcttttaattcgtagccattactgtatttggcgggcagtaattcaggtaaagcatcgctatgatgtccagtgcttcggcgaacatattcacgcaattccagcttggctggttgtatgtctgggatttctgagcgacagaggggctgcaggcagagcacagctggtagacccagacccctgcccacagcccagaccccggctgcccagggacctgtgtaagccccttctccagaccccggcaccaggccccacttctcacatgggcttccagtctcactccctgatgggctgaactctgtggactgtagaacgtccagggtggtcctgccataggcggggagaaagaaagatttagaaaatccctggtgcaaggcttccacgagcaaaacacgtagccccttcagagccagatcctgagcaagatgaacagaaactgaggttttgtaaacgccacctttatgggcagcaaccccgatcaccggtggaaatacgtcttcagcacgtcgcaatcgcgtaccaaacacatcacgcatatgattaatttgttcaattgtataaccaacacgttgctcaacccgtcctcgaatttccatatccgggtgcggtagtcgccctgctttctcggcatctctgatagcctgagaagaaaccccaactaaatccgctgcttcacctattctccagcgccgggttattttcctcgcttccgggctgtcatcattaaactgtgcaatggcgatagccttcgtcatttcatgaccagcgtttatgcactggttaagtgtttccatgagtttcat

SEQ ID NO: 141170 - DNA, 4118 bp, Homo sapiens
  misc_feature (1)...(4118): n = a,t,c or g
atgaaactcatggaaacacttaaccagtgcataaacgctggtcatgaaatgacgaaggctatcgccattgcacagtttaatgatgacagcccggaagcgaggaaaataacccggcgctggagaataggtgaagcagcggatttagttggggtttcttctcaggctatcagagatgccgagaaagcagggcgactaccgcacccggatatggaaattcgaggacgggttgagcaacgtgttggttatacaattgaacaaattaatcatatgcgtgatgtgtttggtacgcgattgcgacgtgctgaagacgtatttccaccggtgatcggggttgctgcccataaaggtggcgtttacaaaacctcagtttctgttcatcttgctcaggatctggctctgaaggggctacgtgttttgctcgtggaaggtaacgacccccagggaacagcctcaatgtatcacggatgggtaccagatcttcatattcatgcagaagacactctcctgcctttctatcttggggaaaaggacgatgtcacttatgcaataaagcccacttgctggccggggcttgacattattccttcctgtctggctctgcaccgtattgaaactgagttaatgggcaaatttgatgaaggtaaactgcccaccgatccacacctgatgctccgactggccattgaaactgttgctcatgactatgatgtcatagttattgacagcgcgcctaacctgggtatcggcacgattaatgtcgtatgtgctgctgatgtgctgattgttcccacgcctgctgagttgtttgactacacctccgcactgcagtttttcgatatgcttcgtgatctgctcaagaacgttgatcttaaagggttcgagcctgatgctgaatcatgtcagggagatttaagtacattggccaatgtggttacatcattagcgaatcttggaaaaactaaagatctttctcaaaatagtaatgaaatgtctatgattgaaagcttaagcaatgatgatacctctttgtgtgaatttcaagaaatgcagaccaacggtgatgtttcaagcattactgccaaaacaagatgccatttaacagttactacgtcagccaactctgctaaatgcttagcaaatgtcaccatgtctcaccctcagagcttccccatggaatacacattggatcttacaccccttgcccccaactacaacatcatcacccaccttcaccatttacagcgttgccacccccacacaaccctcattagtggccaccatcaccactgccgccgtgctgcagccctgttagagacgacttccctcctcttcagtcctgagcaaagagacaaggaaacaccttctcaacagcctcgtgagtctagaaacacagaggtcccattcacggggcttttcccaggtaccaggagttccgttggcagtgaaagaggtgagctggtgatatgggatagtgttcacccttgttacaccgttttccatgagcaaactgaaacgttttcatcgctctggagtgaataccacgacgatttccggcagtttctacacatatattcgcaagatgtggcgtgttacggtgaaaacctggcctatttccctaaagggtttattgagaatatgtttttcttctcagccaatccctgggtgagtttcaccagttttgatttaaacgtggccaatatggacaacttcttcgcccccgttttcaccatgggcaaatattatacgcaaggcgacaaggtgctgatgccgctggcgattcaggttcatcatgccgtttgtgatggcttccatgtcggcagaatgcttaatgaattacaacagtactgcgatgagtggcagggcggggggtnaaaacatacgctcaatactcaaccggttgaagatacttcgttatcgacaccagctgccccgatggtggattcgttaattgcgcgcgtaggagtaatggctcgcggtaatgccattactttgccctgtatgtggtcgggatgtaaagtttactcttgaagtgctccggggtgatagtgttgacaagacctctcgggtatggtcaggtaatgaacgtgaccaggagctgcttactgaggacgcactggatgatctcatcccttcttttctactgactggtcaacagacaccggcgttcggtcgaagagtatctggtgtcatagaaattgccgatgggagtcgccgtcgtaaagctgctgcacttaccgaaagtgattatcgtgttctggttggcgagctggatgatgagcagatggctgcattatccagattgggtaacgattatcgcccaacaagtgcttatgaacgtggtcagcgttatgcaagccgattgcagaatgaatttgctggaaatatttctgcgctggctgatgcggaaaatatttcacgtaagattattacccgctgtatcaacaccgccaaattgcctaaatcagttgttgctcttttttctcaccccggtgaactatctgcccggtcaggtgatgcacttcaaaaagcctttacagataaagaggaattacttaagcagcaggcatctaaccttcatgagcagaaaaaagctggggtgatatttgaagctgaagaagttatcactcttttaacttctgtgcttaaaacgtcaggggattttgccgatttcggaaccaccatcaaacaggattttcgcctgctggggcaaaccagcgtggaccgcttgctgcaactctctcagggccaggcggtgaagggcaatcagctgttgcccgtctcactggtgaaaagaaaaaccaccctggcgcccaatacgcaaaccgcctctccccgcgcgttggccgattcattaatgcagctggcacgacaggtttcccgactggaaagcgggcagcataggcttggttatgccggtactgccgggcctcttgcgggatatcgtccattccgacagcatcgccagtcactatggcgtgctgctagcgctatatgcgttgatgcaatttctatgcgcacccgttctcggagcactgtccgaccgctttggccgccgcccagtcctgctcgcttcgctacttggagccactatcgactacgcgatcatggcgaccacacccgtcctgtggatctacccactaggattttgccgatttgggaccccccatcaaacaggattttcgccggttggggcaacccagcgtggaccggcttgctgcaactctctcagggcccagccggtgaagggcaatcagctgttgcccgtctcactggtgaaaagaaaaacccacccctggcgcccaatacgcaaaccgcctctccccgcgcgttggccgatttcattaatgcagcgggcacgacaggtttccccgactggaaagcgggcagtgagcgcaacgcaattaattgttgagaagccttctcgggtatggtcaggtaatgaacgtgaccagaagctgtttactaaggacgcactggatgatctcatccttttttttctactgactggtcaacagacacgggcggtcggtcgaagagtatctggtgtcatagaaattgccgatgggagtcgccgtcgtaaagctgctgcacttaccganagtgattatcgtgttctggttggcgagctggatgatgagcagatggctgcattatccagattgggtaacgattatcgcccaacaagtgcttatgaacgtggtcagcgttatgcaagccgattgcagaatgaatttgctggaaatatttctgcgctggctgatgcggaaaatatttcacgtaagattattacccgctgtatcaacaccgccaaattgcctaaatcagttgttgctcttttttctcaccccggtgaactatctgcccggtcaggtgatgcacttcaaaaagcctttacagataaagaggaattacttaagcagcaggcatctaaccttcatgagcagaaaaaagctggggtgatatttgaagctgaagaagttatcactcttttaacttctgtgcttaaaacgtcatctgcatcaagaactagtttaagctcacgacatcagtttgctcctggagcgacagtattgtggagtggatcctcaccagagagccggttttcagccctaagttga

SEQ ID NO: 141171 - DNA, 4828 bp, Homo sapiens
  misc_feature (1)...(4828): n = a,t,c or g
ttaaccagtgcataaacgctggtcagtaaatgaggaaggctatccccactggcacagcttaatgattgcagcgccggaacgagggaaaaataacccggcgctgggaaatagggtaaaccaccgatataatttggggtttttttccaggcttccaaagatccgaaaaaccaggccggactccggcaccggatatggaaaatcgaaggcggggttgagcaacgtgttggttatacaattgaacaaattaatcatatgcgtgatgtgtttggtacgcgattgcgacgtgctgaagacgtatttccaccggtgatcggggttgctgcccataaaggtggcgtttacaaaacctcagtttctgttcatcttgctcaggatctggctctgaaggggctacgtgttttgctcgtggaaggtaccgacccccagggaacagcctcaatgtatcacggatgggtaccagatcttcatattcatgcagaagacactctcctgcctttctatcttggggaaaaggacgatgtcacttatgcaataaagcccacttgctggccggggcttgacattattccttcctgtctggctctgcaccgtattgaaactgagttaatgggcaaatttgatgaagnagaatccccaactgagttaatgggcaaatttgatgaaggtaaactgcccaccgatccacacctgatgctccgactggccattgaaactgttgctcatgactatgatgtcatagttattgacagcgcgcctaacctgggtatcggcacgattaatgtcgtatgtgctgctgatgtgctgattgttcccacgcctgctgagttgtttgactacacctccgcactgcagtttttcgatatgcttcgtgatctgctcaagaacgttgatcttaaagggttcgagcctgatgtacgtattttgcttaccaaatacagcaatagtaatggctctcagtccccgtggatggaggagcaaattcgggatgcctggggaagcatggttctaaaaaatgttgtacgtgaaacggatgaagttggtaaaggcatcccgaatttgctcctccatccacggggactgagagccattactattgctgtatttggtaagcaaaatacgtacatcaggctcgaaccctttaagatcaacgttcttgagcagatcacgaagcatatcgaaaaactgcagtgcggaggtgtagtcaaacaactcagcaggcgtgggaacaatcagcacatcagcagcacatacgacattaatcgtgccgatacccaggttaggcgcgctgtcaataactatgacatcatagtcatgagcaacagtttcaatggccagtcggagcatcaggctatcagagatgccgagaaagcagggcgactaccgcacccggatatggaaattcgaggacgggttgagcaacgtgttggttatacaattgaacaaattaatcatatgcgtgatgtgtttggtacgcgattgcgacgtgctgaagacgtatttccaccggtgatcggggttgctgcccataaaggtggcgtttacaaaacctcagtttctgttcatcttgctcaggatctggctctgaaggggctacgtgttttgctcgtggaaggtaacgacccccagggaacagcctcaatgtatcacggatgggtaccagatcttcatattcatgcagaagacactctcctgcctttctatcttggggaaaaggacgatgtcacttatgcaataaagcccacttgctggccggggcttgacattattccttcctgtctggctctgcaccgtattgaaactgagttaatgggcaaatttgatgaaggtaaactgcccaccgatccacacctgatgctccgactggccattgaaactgttgctcatgactatgatgtcatagttattgacagcgcgcctaacctgggtatcggcacgattaatgtcgtatgtgctgctgatgtgctgattgttcccacgcctgctgagttgtttgactacacctccgcactgcagtttttcgatatgcttcgtgatctgctcaagaacgttgatcttaaagggttcgagcctgatggggatcctctagagtcgacctgcaggcatgcaaacataatactttcaaaagataacttgtcttctgtgaatgaagagtcagatggcaagagtgaaaaagaaataggcgaccaggagggacccgtgatgctggtgtggaccagaaagcgtaatagtggagatggagacaagtggatggattcagggtctattttggagatggagctggcaggttttgttgttggattaagtggatgtagggagccaatttttagcacctggggggatcctctagagtcgacctgcaggcatgcaagcgatctaaacactccagttgaaccacgagacatgtccaggttaagcaccattttatcgcccttatacaaatactgtcgctccaggagccaaactgatgtcgtgagcttaaactagttctggatgcagatgacgttttagccacagaagttaaaagagtgataacttcttcagcttcaaatatcaccccagcttttttctgctcatgaaggttagatgcctgctgcataagtaattcctctttatctgtaaaggctttttgaagtgcatcacctgaccgggcagatagttcaccggggtgagaaaaaagagcaacaactgatttaggcaatttggcggtgttgatacagcgggtaataatcttacgtgaaatattttccgcatcagccagcgcagaaatatttccagcaaattcattctgcaatcggcttgcataacgctgaccacgttcataagcacttgttgggcgataatcgttacccaatctggataatgcagccatctgctcatcatccagctcgccaaccagaacacgataatcactttcggtaagtgcagcagctttacgacggcgactcccatcggcaatttctatgacaccagatactcttcgaccgaacgccggtgtctgttgaccagtcagtagaaaagaagggatgagatcatccagtgcgtcctcagtaagcagctcctggtcacgttcattacctgaccatacccgagaggtcttctcaacactatcaccccggagcacttcaagagtatacttcacatcccgaccacatacaggcaaagtaatggcattaccgcgagccattactccggaatagtcagtgtagaataaacggatttttccgtcagatgtaaaggttgcagaaccggaccattcttgcgtctgatctttcaggatcggatcgttggcgtcgaacttatcgctgtctttaaagacacggcccgcgtttttccagctgtcgattgagttgtcgccgaccttttgataaaacatgtagattgatgtgtcatcagcgtctttcgggcttcccgcaagagcaaacacaacgtgatagccgttgtattcagctactgttccgtcagcgttttgcagcggccagctgtcccacacatcaagtccttttgcagactcaatatttttaatcgttgattgatcgaattgaggcacttggtatttttcgttttgctgctgtttagggatcattccacagttagcgacgacatgttcaatccttgaccttgacggcaaagaatatactcgtagactcacgcgaatagtcgcatcaccaatataaagtggatccgtgatcccagtccgataatcagaccgaaaacacaagtggtatcctggtcccagactaataatcagaccgacgatacgagtaggaccgctgatcccagacgacgatacgagaggcccgtagtcacagactaataatagaccgccgatacgagatggaccatggtccccgcctaataaactggacgacgatacgatatggaccgtggtcccagtctttatggcagcaaccccgatcaccggtgtaaatacgtcttcagcacgtcgcaatcgcgtaccaaacacatcacgcatatgattaatttgttcaattgtataaccaacacgttgctcaacccgtcctcgaatttccatatccgggtgcggtagncgccctgctttctcggcatctctgatagcctgagaagaaaccccaactaaatccgctgcttcacctattctccagcgccgggttattttcctcgcttccgggctgtcatcattaaactgtgcaatggcgatagccttcgtcatttcatgaccagcgtttatgcactggttaagtgtttccatgagtttcattctgaacatcctgaccgggcagatagcttcaccggggtgagaaaaaagagcaacaactgatttaggcaatttggcggtgttgatacagcgggtaataatcttacgtgaaatattttccgcatcagccagcgcagaaatatttccagcaaattcattctgcaatcggcttgcataacgctgaccacgttcataagcacttgttgggcgataatcgttacccaatctggataatgcagccatctgctcatcatccagctcgccaaccagaacacgataatcactttcggtaagtgcagcagctttacgacggcgactcccatcggcaatttctatgacaccagatactcttcgaccgaacgccggtgtctgttgaccagtcagtagaaaagaagggatgagatcatccagtgcgtcctcagtaagcagctcctggtcacgttcattacctgaccatacccgagaggtcttctcaacactatcaccccggagcacttcaagagtaaacttcacatcccgaccacatacaggcaaagtaatggcattaccgcgagccattactcctacgcgcgcaattaacgaatccaccat

SEQ ID NO: 141172 - DNA, 2761 bp, Homo sapiens
  misc_feature (1)...(2761): n = a,t,c or g
atgaaactcatggaaacacttaaccagtgcataaacgctggtcatgaaatgacgaaggctatcgccattgcacagtttaatgatgacagcccggaagcgaggaaaataacccggcgctggagaataggtgaagcagcggatttagttggggtttcttctcaggctatcagagatgccgagaaagcaaggccgattccggcacccggatatggaaaattcgggcccgggttgagcaacgtgttggttatacaattgaacaaattaatcatatgcgtgatgtgtttggtacgcgattgcgacgtgctgaagacgtatttccaccggtgatcggggttgctgcccataaaggtggcgtttacaaaacctcagtttctgttcatcaggctcaggatatggctctgaaggggctacgtgttttgctcgtggaaggtaacgacccccagggaacagcctcaatgtatcacggatgggtaccagatcttcatattcatgcagaagacactctcctgcctttctatcttggggaaaaggacgatgtcacttatgcaataaagcccacttgctggccggggcttgacattattccttcctgtctggctctgcaccgtattgaaactgagaaaatgggcaaatttgatgaaggtaaactgcccaccgatccacacctgatgctccgactggccattgaaactgttgctcatgactatgatgtcatagttattgacagcgcgcctaacctgggtatcggcacgattaatgtccgaatactcttcctaccttactggtctgaagattcctattcatcttataagggagaggcctcttggaagcttgtgcctcatttcccctggacttcacccaatactcctttaccctttgctgattttgctttgtatccttttgctgtgaccgatcatagctgcnacaatgaatgcctgcaggtcgactctagaggatccccccatgataaagtgagagtcaatgaggtgacaaagctgtggaagtcctggggcactggatcagtcaaggtcctgtcactcaaggcagaaccagatggcaagggagcctattggtatagaccacataaggcaacctcttggatctcggagcagagtggagaagtctggagagtgcagctgaaggagccaacagtgaatatcccacagacttgttcagaattacaactccagggtccaaacctattagaaggcaatgttctcaagtttttcgatatgcttcgtgatctgctcaagaacgttgatcttaaagggttcgagcctgatgtacgtattttgcttaccaaatacagcaatagtaatggctctcagtccccgtggatggaggagcaaattcgggatgcctggggaagcatggttctaaaaaatgttgtacgtgaaacggatgaagttggtaaagatacttcgttatcgacaccagctgccccgatggtggattcgttaattgcgcgcgtaggagtaatggctcgcggtaatgccattactttgcctgtatgtggtcgggatgtgaagtttactcttgaagtgctccggggtgatagtgttgagaagacctctcgggtatggtcaggtaatgaacgtgaccaggagctgcttactgaggacgcactggatgatctcatcccttcttttctactgactggtcaacagacaccggcgttcggtcgaagagtatctggtgtcatagaaattgccgatgggagtcgccgtcgtaaagctgctgcacttaccgaaagtgattatcgtgttctgcgctggcgagctggatgatgagcagatggctgcattatccagattgggtaacgattatcgcccaacaagtgcttatgaacgtggtcagcgttatgcaagccgattgcagaatgaatttgctggaaatatttctgcgctggctgatgcggaaaatatttcacgtaagattattacccgctgtatcaacaccgccgaattgccagggtgcgggcttgtcaagttcgttaagaatggcgtcaaatgtcacgacacacgcagttggcacacgaggcctgtccaggttaagcaccatttcatcgccctcatacaaagcagtcgctccaggagcaaaccgatgtcgtgagcataaacgagttcttgaagcagatggcgttttaagcacagaagttaaaagagtgagaacttctgcagcttcagatatcaccccagctggcttctgctcatgcagggctatcaaagatgccgagaagccaggccgactcccgcacccgtatatggaaattcgaggacgggttgagcaacgtgttggttatacaattgaacaaattaatcatatgcgtgatgtgtttggtacgcgattgcgacgtgctgaagacgtatttccaccggtgatcggggttgctgcccataaaggtggcgtttacaaaacctcagtttctgttcatcttgctcaggatctggctctgaaggggctacgtgttttgctcgtggaaggtaacgacccccagggaacagcctcaatgtatcacggatgggtaccagatcttcatattcatgcagaagacactctcctgcctttctatcttgggcaaaaggacgatgtcacttatgcaataaagcccacttgctggccggggcttgacattattccttcctgtctggctctgcaccgtattgaaactgagttaatgggcaaatttgatgaaggtaaactgcccaccgatccacacctgatgctccgactggccattgaaactgttgctcatgactaa

SEQ ID NO: 141173 - DNA, 2436 bp, Homo sapiens
  misc_feature (1)...(2436): n = a,t,c or g
atgaaactcatggaaacacttaaccagtgcataaacgctggtcatgaaatgacgaaggctatcgccattgcacagtttaatgatgacagcccggaagcgaggaaaataacccggcgctggagaataggtgaagcagcggatttagttggggtttcttctcaggctatcagagatgccgagaaagcagggcgactaccgcacccggatatggaaattcgaggacgggttgagcaacgtgttggttatacaattgaacaaattaatcatatgcgtgatgtgtttggtacgcgattgcgacgtgctgaagacgtatttccaccggtgatcggggttgctgcccataaaggtggcgtttacaaaacctcagtttctgttcatcttgctcaggatctggctctgaaggggctacgtgttttgctcgtggaaggtaacgacccccagggaacagcctcaatgtatcacggatgggtaccagatcttcatattcatgcagaagacactctcctgcctttctatcttggggaaaaggacgatgtcacttatgcaataaagcccacttgctggccggggcttgacattattccttcctgtctggctctgcaccgtattgaaactgagttaatgggcaaatttgatgaaggtaaactgcccaccgatccacacctgatgctccgactggccattgaaactgttgctcatgactatgatgtcatagttattgacagcgcgcctaacctgggtatcggcacgattaatgtcgtatgtgctgctgatgtgctgattgttcccacgcctgctgagttgtttgactacacctccgcactgcagtttttcgatatgcttcgtgatctgctcaagaacgttgatcttaaagggttcgagcctgatgctttgcagaactttcagcggtataccggcatacagcatgtgcatcgcataggaatggcggaacgtatgtggtgtgaccggaacagagaacgtcacaccgtcagcagcagcggcggcaaccgcctccccaatccagaacattttgaggcatttcagtcagttgctcaatgtacctataaccagaccgttcagctggatattacggcctttttaaagaccgtaaagaaaaataagcacaagttttatccggcctttattcacattcttgcccgcctgatgaatgctcatccggagttccgtatggcaatgaaagacggtgagctggtgatatgggatagtgttcacccttgttacaccgttttccatgagcaaactgaaacgttttcatcgctctggagtgaataccacgacgatttccggcagtttctacacatatattcgcaagatgtggcgtgttacggtgaaaacctggcctatttccctaaagggtttattgagaatatgtttttcgtctcagccaatccctgggtgagtttcaccagttttgatttaaacgtggccaatatggacaacttcttcgcccccgttttcaccatgggcaaatattatacgcaaggcgacaaggtgctgatgccgctggcgattcaggttcatcatgccgtttgtgatggcttccatgtcggcagaatgcttaatgaattacaacagtactgcgatgagtggcagggcggagaacacaagcatcttcagngtgacaatctaaaaacttgtcacacttcacatggatctgtcatggcggaaacagcggttatcaatcacaagaaacgtaaaaatagcccgcgaatcgtccagtcaaacgacctcactgaggcggcatatagtctctcccgggatcaaaaacgtatgctgtatctgttcgttgaccagatcagaaaatctgatggcaccctacaggaacatgacggtatctgcgagatccatgttgctaaatatgctgaaatattcggattgacctctgcggaagccagtaaggatatacggcaggcattgaagagtttcgcggggaaggaagtggttttttatcgccctgaagaggatgccggcgatgaaaaaggctatgaatcttttccttggtttatcaaacgtgcgcacagtccatccagagggctttacagtgtacatatcaacccatatctcattcccttctttatcgggttacagaaccggtttacgcagtttcggcttagtgaaacaaaagaaatcaccaatccgtatgccatgcgtttatacgaatccctgtgtcagtatcgtaagccggatggctcaggcatcgtctctctgaaaatcgaatggatcatagagcgttaccagctgcctcaaagttaccagcgtatgcctgacttccgccgccgcttcctgcaggtctgtgttaatgagatcaacagcagaactccaatgcgcctctcatacattgagaaaaagaaaggccgccagacgactcatatcgtattttccttccgcgatatcacttccatgacgacaggatag

SEQ ID NO: 141174 - DNA, 3241 bp, Homo sapiens
atgcagggcatgcaagccctagctaggacagttgatggtaaggaagaaagcctcaaccttgatcaagcttttcaatgggctggaaaaagttcttcttttgggacctgtcccaataaatttcgatcgtcgattaaccccgctggagatagaatattaagcggggcctgttatccaaaactacgtcaatactcaaccggtggagaaacttcgtattcgacaccagctgccccgatggtggattcgttaattgcgcgcgtaggagtaatggctcccggtaatgccattactttgcctgtatgtggtcgggatgtgaagtttactcttgaagtgctccggggtgatagtgttaagaagacctctcgggtatggtcaggtaatgaacgtgaccaggagctgcttactgaggacgcactggatgatctcatcccttcttttctactgactggtcaacagacaccggcgttcggtcgaagagtatctggtgtcatagaaattgccgatgggagtcgccgtcgtaaagctgctgcacttaccgaaagtgattatcgtgttctggttggcgagctggatgatgagcagatggctgcattatccagattgggtaacgattatcgcccaacaagtgcttatgaacgtggtcagcgttatgcaagccgattgcagaatgaatttgctggaaatatttctgcgctggctgatgcggaaaatatttcacgtaagattattacccgctgtatcaacaccgccaaattgcctaaatcagttgttgctcttttttctcaccccggtgaactatctgcccggtcaggtgatgcacttcaaaaagcctttacagataaagaggaattacttaagcagcaggggggatcctctagagtcggcgacaactcaatcgacagctggaaaacgcggggccgtgtctttaaagacagcgataagttcgacgccaacgatccgatcctgaaagatcagacgcaagaatggtccggttctgcaacctttacatctgacggaaaaatccgtttattctacactgactattccggtaaacattacggcaaacaaagcctgacaacagcgcaggtaaatgtgtcaaaatctgatgacacactcaaaatcaacggagtggaagatcacaaaacgatttttgacggagacggaaaaacatatcagaacgttcagcagtttatcgatgaaggcaattatacatccggcgacaaccatacgctgagagaccctcactacgttgaagacaaaggccataaataccttgtattcgaagccaacacgggaacagaaaacggataccaaggcgaagaatctttatttaacaaagcgtactacggcggcggcacgaacttcttccgtaaagaaagccagaagcttcagcagagcgctaaaaaacgcgatgctgagttagcgaacggcgccctcggtatcatagagttaaataatgattacacattgaaaaaagtaatgaagccgctgatcacttcaaacacggtaactgatgaaatcgagcgcgcgaatgttttcaaaatgaacggcaaatggtacttgttcactgattcacgcggttcaaaaatgacgatcgatggtattaactcaaacgatatttacatgcttggttatgtatcaaactctttaaccggcccttacaagccgctgaacaaaacagggcttgtgctgcaaatgggtcttgatccaaacgatgtgacattcacttactctcacttcgcaaggccgcaagccaaaagcaacaatgctatcagagatgccgagaaagcagggcgactaccgcacccggatatggaaattcgaggacgggttgagcaacgtgttggttatacaattgaacaaattaatcatatgcgtgatgtgtttggtacgcgattgcgacgtgctgaagacgtatttccaccggtgatcggggttgctgcccataaaggtggcgtttacaaaacctcagtttctgttcatcttgctcaggatctggctctgaaggggctacgtgttttgctcgtggaaggtaacgacccccagggaacagcctcaatgtatcacggatgggtaccagatcttcatattcatgcagaagacactctcctgcctttctatcttggggaaaaggacgatgtcacttatgcaataaagcccacttgctggccggggcttgacattattccttcctgtctggctctgcaccgtattgaaactgagttaatgggcaaatttgatgaaggtaaactgcccaccgatccacacctgatgctccgactggccattgaaactgttgctcatgactatgatgtcatagttattgacagcgcgcctaacctgggtatcggcacgattaatgtcgtatgtgctgctgatgtgctgattgtttccacgcctgctgaattggttgactacacctccgcacttgagttttttcgatatccttcgtgatctgctcaagaacgttgatcttaaagggttcgagcctgatgcccaagaaagatttactagggcgggcgccggagcctcctcatgcaggccccgcggggacctgctgtcgcccccgcccccgcccccgccctcgccctcttggccccggccgtctggtgatgttgtggggttcagcgccgccgccagaacggtcacggagcgcggcccccggccccctatcccgcaccttcgcagtcgcccggccgcagcgcccggctgcccggcagcacgctcagagccagcgccaccgccagcccctgcgtggcccacatcctcctcatcctcctcctcctcctcctcctcctcctcctccgctgccgccgccgaccgactgaaccgcacccgccgcgccgcaccgcctccaagaagcgactacagcagcgacggaagcggtgtgggccgccatcttgggctgataggagacgtgcggggtggacggactgcgggacatctgaaggaagggctcaaggcgcgccaagctcaaagctgggccgccactctagaccgtggagggaagcgcccgggccagatcatcggtcgaggacatggggtcgcctcagagtgggaaggccctcggggtcccccgctgccgtgggacctcctgagtggggtcccgggaatcaccagagaagcactggaggatgtttccttttcgactgccctcctttcaagtgccctcctggctgcctgccttcaaggcaggatgcgggaaccgttggctctactcagtgcaaaaaggacatgtctatag

SEQ ID NO: 141175 - DNA, 4112 bp, Homo sapiens
  misc_feature (1)...(4112): n = a,t,c or g
atgaaactcatggaaacacttaaccagtgcataaacgctggtcatgaaatgacgaaggctatcgccattgcacagtttaatgatgacagcccggaagcgaggaaaataacccggcgctggagaataggtgaagcagcggatttagttggggtttcttctcaggctatcagagatgccgagaaagcagggcgactaccgcaccccggatatggaaattcgaggacgggttgagcaacgtgttggttatacaattgaacaaattaatcatatgcgtgatgtgtttggtacgcgattgcgacgtgctgaagacgtatttccaccggtgatcggggttgctgcccataaaggtggcgtttacaaaacctcagtttctgttcatcttgctcaggatctggctctgaaggggctacgtgttttgctcgtggaaggtaacgacccccagggaacagcctcaatgtatcacggatgggtaccagatcttcatattcatgcagaagacactctcctgcctttctatcttggggaaaaggacgatgtcacttatgcaataaagcccacttgctggccggggcttgacattattccttcctgtctggctctgcaccgtattgaaactgagttaatgggcaaatttgatgaaggtaaactgcccaccgatccacacctgatgctccgactggccattgaaactgttgctcatgactatgatgtcatagttattgacagcgcgcctaacctgggtatcggcacgattaatgtcgtatgtgctgctgatgtgctgattgttcccacgcctgctgagttgtttgactacacctccgcactgcagtttttcgatatgcttcgtgatctgctcaagaacgttgatcttaaagggttcgagcctgatgtacgtcaggcaccgtgtatgaaatctaacaatgcgctcatcgtcatcctcggcaccgtcaccctggatgctgtaggcataggcttggttatgccggtactgccgggcctcttgcgggatatcgtccattccgacagcatcgccagtcactatggcgtgctgctagcgctatatgcgttgatgcaatttctatgcgcacccgttctcggagcactgtccgaccgctttggccgccgcccagtcctgctcgcttcgctacttggagccactatcgactacgcgatcatggcgaccacacccgtcctgtggatctacccactacttgctgaaatatcagtcctgggagtaggtaaagcgtttggtattaagnataacccatatcttcatattcatgcagaagacactctcctgcctttctatcttgggcaaaaggacgatgtcacttatgcaataaagcccacttgctggccggggcttgacattattccttcctgtctggctctgcaccgtattgaaactgagttaatgggcaaatttgatgaaggtaaactgcccaccgatccacacctgatgctccgactggccattgaaactgttgctcatgactatgatgtcatagttattgacagcgcgcctaacctgggtatcggcacgattaatgtcgtatgtgctgctgatgtgctgattgttcccacgcctgctgagttgtttgactacacctccgcactgcagtttttcgatatgcttcgtgatctgctcaagaacgttgatcttaaagggttcgagcctgatgacgatgtcacttatgcaataaagcccacttgctggccggggcttgacattattccttcctgtctggctctgcaccgtattgaaactgagttaatgggcaaatttgatgaaggtaaactgcccaccgatccacacctgatgctccgactggccattgaaactgttgctcatgactatgatgtcatagttattgacagcgcgcctaacctgggtatcggcacgattaatgtcgtatgtgctgctgatgtgctgattgttcccacgcctgctgagttgtttgactacacctccgcactgcagtttttcgatatgcttcgtgatctgctcaagaacgttgatcttaaagggttcgagcctgatgtacgtattttgcttaccaaatacagcaatagtaatggctctcagtccccgtggatggaggagcaaattcgggatgcctggggaagcatggttctaaaaaatgttgtacgtgaaacggatgaagttgggatttggctctgtgactcaagcttgtatgcaccggggtgtgacaatctaaaaacttgtcacacttcacatggatctgtcatggcggaaacagcggttatcaatcacaagaaacgtaaaaatagcccgcgaatcgtccagtcaaacgacctcactgaggcggcatatagtctctcccgggatcaaaaacgtatgctgtatctgttcgttgaccagatcagaaaatctgatggcaccctacaggaacatgacggtatctgcgagatccatgttgctaaatatgctgaaatattcggattgacctctgcggaagccagtaaggatatacggcaggcattgaagagtttcgcggggaaggaagtggttttttatcgccctgaagaggatgccggcgatgaaaaaggctatgaatcttttccttggtttatcaaacgtgcgcacagtccatccagagggctttacagtgtacatatcaacccatatctcattcccttctttatcgggttacagaaccggtttacgcagtttccgcttagtgaaacaaaagaaatcaccaatccgtatgccatgcgtttataccaattcctgtgtcagtatcggaagccggatggctcaggcatcgtctctctgaaaatcgactggatcatagagcgttaccagctgcctcaaagttaccagcgtatgcctgacttccgccgccgcttcctgcagtgcataaacgctggtcatgaaatgacgaaggctatcgccattgcacagtttaatgatgacagcccggaagcgaggaaaataacccggcgctggagaataggtgaagcagcggatttagttggggtttcttctcaggctatcagagatgccgagaaagcagggcgactaccgcacccggatatggaaattcgaggacgggttgagcaacgtgttggttatacaattgaacaaattaatcatatgcgtgatgtgtttggtacgcgattgcgacgtgctgaagacgtattttccaccgctgatcgggggttgctggccataaaggggggcggttacaaaacctcagtttctgttcatcttgctcaggatctggctctgaaggggctacgtgttttgctcgtggaaggtaacgacccccagggaacagcctcaatgtatcacggatgggtaccagatcttcatattcatgcagaagacactctcctgcctttctatcttggggaaaaggacgatgtcacttatgcaataaagcccacttgctgggccggggcttgacattattccttcctgtctggctctgcaccgtattgaaactgagttaatgggcaaatttgatgaaggtaaactgcccaccgatccacacctgatgctccgactggccattgaaactgttgctcatgactatgatgtcatagttattgacagcgcgcctaacctgggtatcggcacgattaatgtcgtatgtgctgctgatgtgctgattgttcccacgcctgctgagttgtttgactacacctccgcactgcagtttttcgatatgcttccggatctggtcaagaaccgcgatcttaaaggggtcgagcctgatgtatttattcgcgataagctcatggagcggcgtaaccgtcgcacaggaaggacagagaaagcgcggatctgggaagtgacggacagaacggtcaggacctggattggggaggcggttgccgccgctgctgctgacggtgtgacgttctctgttccggtcacaccacatacgttccgccattcctatgcgatgcacatgctgtatgccggtataccgctgaaagttctgcaaagcctgatgggacataagtccatcagttcaacggaagtctacacgaaggtttttgcgctggatgtggctgcccggcaccgggtgcagtttgcgatgccggagtctgatgcggttgcgatgctgaaacaattatcctga

SEQ ID NO: 141176 - DNA, 2323 bp, Homo sapiens
  misc_feature (1)...(2323): n = a,t,c or g
gcaagtccctccctaggtcgggtcccgggtcggggagcgcaatgatattagtgnctaagggtgtgctcctctatactccctttggagagttgtcttatattaacacaccctcgggtttttgaaactctgcgatttggtggtccctccacattaattcgcaagnttatataaaaacccgcaaaccattgattaaggtatgttcagaatgaacctcatggaaccccttacccagtgcataaacgctggtcatgaaatgacgaaggctatcgccattgcacagtttaatgatgacagcccggaagcgaggaaaataacccggcgctggagaataggtgaagcagcggatttagttggggtttcttctcaggctatcagagatgccgagaaagcagggcgactaccgcacccggatatggaaattcgaggacgggttgagcaacgtgttggttatacaattgaacaaatttatcttagcgcgtgatgtgtttggtacgcgattgcgacgtgctgaagacgtatttccaccggtgatcggggttgctgcccataaaggtggcgtttacaaaacctcagtttctgttcatcttgctcaggatctggctctgaaggggctacgtgttttgctcgtggaaggtaacgacccccagggaacagcctcaatgtatcacggatgggtgccagatcttcatattcatgcagaagacactctcctgcctttctatcttggggaaaaggacgatgtcacttatgcaataaagcccacttgctggcctggggcttgacattattccttcctgtctggctccgcaccgtattgaaactgagttaatgaacgaaattgatgaaggtaacctgcccaccgatccacacctgatgctccgactggccattgaaactgttgctcatgactatgatgtcatagttattgacagcgcgcctaacctgggtatcggcacgattaatgtcgtatgtgctgctgatgtgctgattgttcccacgcctgctgagttgtttgactacacctccgcactgcagtttttcgatatgcttcgtgatctgctcaagaacgttgatcttaaagggttcgagcctgatctctccagcttcgctaagcaggccctgtcccaggcccagaagtctattgacagggttctggacatccaggaagaggagccgagcatctgggccgagaccattccgtatggagagccgggtatttattcgcgataagctcatggagcggcgtaaccgtcgcacaggaaggacagagaaagcgcggatctgggaagtgacggacagaacggtcaggacctggattggggaggcggttgccgccgctgctgctgacggtgtgacgttctctgttccggtcacaccacatacgttccgccattcctatgcgatgcacatgctgtatgccggtataccgctgaaagttctgcaaagcctgatgggacataagtccatcagttcaacggaagtctacacgaaggtttttgcgctggatgtggctgcccggcaccggtgtgacaatctaaaaacttgtcacacttcacatggatctgtcatggcggaaacagcggttatcaatcacaagaaacgtaaaaatagcccgcgaatcgtccagtcaaacgacctcactgaggcggcatatagtctctcccgggatcaaaaacgtatgctgtatctgttcgttgaccagatcagaaaatctgatggcaccctacaggaacatgacggtatctgcgagatccatgttgctaaatatgctgaaatattcggattgacctctgcggaagccagtaaggatatacggcaggcattgaagagtttcgcggggaaggaagtggttttttatcgccctgaagaggatgccggcgatgaaaaaggctatgaatcttttccttggtttatcaaacgtgcgcacagtccatccagagggctttacagtgtacatatcaacccatatctcattcccttctttatcgggttacagaaccggtttacgcagtttcggcttagtgaaacaaaagaaatcaccaatccgtatgccatgcgtttatacgaatccctgtgtcagtatcgtaagccggatggctcaggcatcgtctctctgaaaatcgactggatcatagagcgttaccagctgcctcaaagttaccagcgtatgcctgacttccgccgccgcttcctgcaggtctgtgttaatgagatcaacagcagaactccaatgcgcctctcatacattgagaaaaagaaaggccgccagacgactcatatcgtattttccttccgcgatatcacttccatgacgacaggatag

SEQ ID NO: 141177 - DNA, 1776 bp, Homo sapiens; identical to SEQ ID NO: 127379

SEQ ID NO: 141178 - DNA, 1927 bp, Homo sapiens
ttatttggcctcattttctctataactcagttggacacgagaactgtccaggttaagcaccattttatcgcccttatacaatactgtcgctccaggagcaaactgatgtcgtgagcttaaactagttcttgatgcagatgacgttttaagcacagaagttaaaagagtgataacttcttcagcttgaaatatcaccccagcttttttctgctcatgaaggttagatgcctgctgcttaagtaattcctctttatctgtaaaggctttttgaagtgcatcacctgaccgggcagatagttcaccggggtgagaaaaaagagcaacaactgatttaggcaatttggcggtgttgatacagcgggtaataatcttacgtgaaatattttccgcatcagccagcgcagaaatatgtccagcaaattcattctgcaatcggcttgcataacgctgaccacgttcataagcacttgttgggcgataatcgttacccaatctggataatgcagccatctgctcatcatccagctcgccaaccagaacacgataatcactttcggtaagtgcagcagctttacgacggcgactcccatcggcaatttctatgacaccagatactcttcgaccgaacgccggtgtctgttgaccagtcagtagaaaagaagggatgagatcattcagtgcgtcctcagtaagcagctcctgggcacgttcattacctgaccatacccgagaagtcttctcaacactatcacccccggaccacttcagagtaaacttccgggagatatgagtcgtctggcggcctttctttttctcaatgtatgagaggcgcattggagttctgctgttgatctcattaacacagacctgcaggaagcggcggcggaagtcaggcatacgctggtaactttgaggcagctggtaacgctctatgatccagtcgattttcaaaagaggagaatgccttgagcccatcccgggcttacggatactgacaacagggatttcgtataaacgcatggcatacggattggtgatttcttttgtttcactaagccgaaactgcgtaaaccggttctgtaacccgataaagaagaggaatgagatatgggttgatatgctcactgtaaagccctctggatggactgtgcgcacgtttgataaaccaaggaaaagattcatagcctttttcatcgccggcatcctcttcagggcgataaaaaaccacttccttccccgcgaaactcttcaatgcctgccgtatatccttactggcttccgcagaggtcaatccgaatatttcagcatatttagcaacatggatctcgcagataccgtcatgttcctgtagggtgccatcagattttctgatctggtcaacgaacagatacagcatacgtttttgatcccgggagagactatatgccgcctcagtgaggtcgtttgactggacgattcgcgggctatttttacgtttcttgtgattgataaccgctgtttccgccatgacagatccatgtgaagtgtgacaagtttttagattgtcacacagagcagacaggttgagcttcacaccagcctcaaggggtggagtgtagctgaccccagtcaaccagtggttgactttggtagaaatgaaagcaatgggtttcaattgaaatttagctgcaaggccaaaacgagtgcagctggtacttgatgtccaagccaggtttattaaagcatcaagttcttcacaaactttttgataaactgatcctccaaattctgccccatcattgacattagtgtgcagctggaagtccccagtcctgtagcccactgcaaagttattctttgtctgctttgacttggtgctgttaaagctcatctggtacccagcaagctgagccatgaattgcaagtccagcaaaatcaaagttaacat

SEQ ID NO: 141179 - DNA, 4326 bp, Homo sapiens
atgaaactcatggaaacacttaaccagtgcataaacgctggtcatgaaatgacgaaggctatcgccattgcacagtttaatgatgacagcccggaagcgaggaaaataacccggcgctggagaataggtgaagcagcggatttagttggggtttcttctcaggctatcagagatgccgagaaagcagggcgactaccgcacccggatatggaaattcgaggacgggttgagcaacgtgttggttatacaattgaacaaattaatcatatgcgtgatgtgtttggtacgcgattgcgacgtgctgaagacgtatttccaccggtgatcggggttgctgcccataaaggtggcgtttacaaaacctcagtttctgttcatcttgctcaggatctggctctgaaggggctacgtgttttgctcgtggaaggtaacgacccccagggaacagcctcaatgtatcacggatgggtaccagatcttcatattcatgcagaagacactctcctgcctttctatcttggggaaaaggacgatgtcacttatgcaataaagcccacttgctggccggggcttgacattattccttcctgtctggctctgcaccgtattgaaactgagttaatgggcaaatttgatgaaggtaaactgcccaccgatccacacctgatgctccgactggccattgaaactgttgctcatgactatgatgtcatagttattgacagcgcgcctaacctgggtatcggcacgattaatgtcgtatgtgctgctgatgtgctgattgttcccacgcctgctgagttgtttgactacacctccgcactgcagtttttcgatatgcttcgtgatctgctcaagaacgttgatcttaaagggttcgagcctgatgctgaaacaagccagggagctctgggcacactggcaaatgtagtgacctcccttgccaacctaagtgaatctttgaacaacggtgacacttcagaaatccagccagaggaccagtctgcaagtgagataactcgggcatttgataccttagctaaagcacttaataccacagacagctcctcttctccaagcttggcagatgggatagacaccagtggaggagggagcatccacgtcatcagcagagaccagtcgacacccatcattgaggttgaaggccccctcctttcagacacacacgtcacatttaagtcaattcgggaggatcgaaacggcagatcgcaaaaaacagtacatacagaaggagacatgaacatgaacatcaaaaaaattgtaaaacaagccacagttctgacttttacgactgcacttctggcaggaggagcgactcaagccttcgcgaaagaaaataaccaaaaagcatacaaagaaacgtacggcgtctctcatattacacgccatgatatgctgcagatccctaaacagcagcaaaacgaaaaataccaagtgcctcaattcgatcaatcaacgattaaaaatattgagtctgcaaaaggacttgatgtgtgggacagctggccgctgcaaaacgctgacggaacagtagctgaatacaacggctatcacgttgtgtttgctcttgcgggaagcccgaaagacgctgatgacacatcaatctacatgttttatcaaaaggtcggcgacaactcaatcgacagctggaaaaacgcgggccgtgtctttaaagacagcgataagttcgacgccaacgatccgatcctgaaagatcagacgcaagaatggtccggttctgcaacctttacatctgacggaaaaatccgtttattctacactgactattccggtaaacattacggcaaacaaagcctgacaacagcgcaggtaaatgtgtcaaaatctgatgacacactcaaaatcaacggagtggaagatcacaaaacgatttttgacggagacggaaaaacatatcagaacgttcagcagtttatcgatgaaggcaattatacatccggcgacaaccatacgctgagagaccctcactacgttgaagacaaaggccataaataccttgtattcgaagccaacacgggaacagaaaacggataccaaggcgaagaatctttatttaacaaagcgtactacggcggcggcacgaacttcttccgtaaagaaagccagaagcttcagcagagcgctaaaaaacgcgatgctgagttagcgaacggcgccctcggtatcatagagttaaataatgattacacattgaaaaaagtaatgaagccgctgatcacttcaaacacggtaactgatgaaatcgagcgcgcgaatgttttcaaaatgaacggcaaatggtacttgttcactgattcacgcggttcaaaaatgacgatcgatggtattaactcaaacgatatttacatgcttggttatgtatcaggatcaactaagttaccgctgatggccactggggtcagtccttctggggaccttatgagagactgtgtaggacatacttcagaactgtcccaccaaggcccaaggaaactaggatgtttatccagcaactcttgtctgtccttggttgagagctgttctcagggcaacttacagcccacccctcatgttcctatggctggagagggatcttcaggcaaagagacacagtgccctcccttttcggccgcggcgcgtgactggtgtgacaatctaaaaacttgtcacacttcacatggatctgtcatggcggaaacagcggttatcaatcacaagaaacgtaaaaatagcccccggaatcgtccagtcaaacgacctcactgaggcggcatatagtctctcccgggatcaaaaacgtatgctgtattctgttcgttgaccagttcaaaaaatttgatggcaccctacaagaaccatgccggtatctgcgagatcccatgttgcttaaatatgttgaaatatttcggattggccctctccgaaagccagtaagaatatacggccagccattgaagagtttcgcggggaaggaagtggttttttatcgccctgaagaggatgccggcgatgaaaaaggctatgaatcttttccttggtttatcaaacgtgcgcacagtccatccagagggctttacagtgtacatatcaacccatatctcattcccttctttatcgggttacagaaccggtttacgcagtttcggcttagtgaaacaaaagaaatccccaatccgtatgccatgcgtttatacgaatccctgtgtcagtatcgtaagccggatggctcaggcatcgtctctctgaaaatcgactggatcatagagcgttaccagctgccctcaaagttaccagcgtatgcctgacttccgccgccgcttcctgcaggtctgatgttaatgagatcaacagcagaactccaatgcggcctctcattactttggaaaaaaagaggggcgccagaacactcatatcgctatcagagatgccgagaaagcagggcgactaccgcacccggatatggaaattcgaggacgggttgagcaacgtgttggttatacaattgaacaaattaatcatatgcgtgatgtgtttggtacgcgattgcgacgtgctgaagacgtatttccaccggtgatcggggttgctgcccataaaggtggcgtttacaaaacctcagtttctgttcatcttgctcaggatctggctctgaaggggctacgtgttttgctcgtggaaggtaacgacccccagggaacagcctcaatgtatcacggatgggtaccagatcttcatattcatgcagaagacactctcctgcctttctatcttggggaaaaggacgatgtcacttatgcaataaagcccacttgctggccggggcttgacattattccttcctgtctggctctgcaccgtattgaaactgagttaatgggcaaatttgatgaaggtaaactgcccaccgatccacacctgatgctccgactggccattgaaactgttgctcatgactatgatgtcatagttattgacagcgcgcctaacctgggtatcggcacgattaatgtcgtatgtgctgctgatgtgctgattgttcccacgcctgctgagttgtttgactacacctccgcactgcagtttttcgatatgcttcgtgatctgctcaagaacgttgatcttaaagggttcgagcctgatgtacgaacgggtctgtcctggtgtgaccagatgcctcgcacgtgtcagtccctgaggattcaaagacgaagtagatgctggtatgcacagctgggagacctgaagatggatcacatcacaggactctttgcagacattcaccagcaccagcctggagcccagtag

SEQ ID NO: 141180 - DNA, 4019 bp, Homo sapiens
atggcggaaacagcggttatcaatcacaagaaacgtaaaaatagcccgcgaatcgtccagtcaaacgacctcactgaggcggcatatagtctctcccgggatcaaaaacgtatgctgtatctgttcgttgaccagatcagaaaatctgatggcaccctacaggaacatgacggtatctgcgagatccatgttgctaaatatgctgaaatattcggattgacctctgcggaagccagtaaggatatacggcaggcattgaagagtttcgcggggaaggaagtggttttttatcgccctgaagaggatgccggcgatgaaaaaggctatgaatcttttccttggtttatcaaacgtgcgcacagtccatccagagggctttacagtaaccggtttacgcagtttcggcttagtgaaacaaaagaaatcaccaatccgtatgccatgcgtttatacgaatccctgtgtcagtatcgtaagccggatggctcaggcatcgtctctctgaaaatcgactggatcatagagcgttaccagctgcctcaaagttaccagcgtatgcctgacttccgccgccgcttcctgcagtgcataaacgctggtcatgaaatgacgaaggctatcgccattgcacagtttaatgatgacagcccggaagcgaggaaaataacccggcgctggagaataggtgaagcagcggatttagttggggtttcttctcaggctatcagagatgccgagaaagcagggcgactaccgcacccggatatggaaattcgaggacgggttgagcaacgtgttggttatacaattgaacaaattaatcatatgcgtgatgtgtttggtacgcgattgcgacgtgctgaagacgtatttccaccggtgatcggggttgctgcccataaaggtggcgtttacaaaacctcagtttctgttcatcttgctcaggatctggctctgaaggggctacgtgttttgctcgtggaaggtaacgacccccagggaacagcctcaatgtatcacggatgggtaccagatcttcatattcatgcagaagacactctcctgcctttctatcttggggaaaaggacgatgtcacttatgcaataaagcccacttgctggccggggcttgacattattccttcctgtctggctctgcaccgtattgaaactgagttaatgggcaaatttgatgaaggcagatccttcatgcctgggcctccacccaccacccactggggcggtcaagccagtagcaggtcagcaactctctggacagagctgcgaagggcaactgaaagcctctctgccactgcccctgcagtggaactacccatgctaccctcagactaataaaggagcaaagaccctacgtgccttatgcacacctccaacaagctgtagtcgacccaaggagaggaggccacatggttcttattatgttgtacgtgtaacgggtgacgttggtaaaggtcagatccggatgagaactgttgttgaacaggccattgatcaacgctcttcaactggtgcctggagaaatgctctttctatttgggaacctgtctgcaatgaaattttctatcgtctgattaaaccacgctgggagattagatgggggaagcgtgcgcctgttattccaaaacatacgctcaatactcaaccggttgaagatacttcgttatcgacaccagctgccccgatggtggattcgttaattgcgcgcgtaggagtaatggctcgcggtaatgccattactttgcctgtatgtggtcgggatgtgaagtttactcttgaagtgctccggggtgatagtgttgagaagacctctcgggtatggtcaggtaatgaacgtgaccaggagctgcttactgaggacgcactggatgatctcatcccttcttttctactgactggtcaacagacaccggcgttcggtcgaagagtatctggtgtcatagaaattgccgatgggagtcgccgtcgtaaagctgctgcacttaccgaaagtgattatcgtgttctggttggcgagctggatgatgagcagatggctgcattatccagattgggtaacgattatcgcccaacaagtgcttatgaacgtggtcagcgttatgcaacccgaccgcagaatgaatttgctggaaatatttctgcgatggctgatgcggaaaatatttcacgtaagattattacccgctgtatcaacaccgccaaattgcctaaatcagttgttgctcttttttctcaccccggtgaactatctgcccggtcagttattgacagcgcgcctaactggggtatcggcacgattaatgtcgtatgtgctgctgatgtgctgattgttcccacgcctgctgagttgtttgactacacctccgcactgcagtttttcgatatgcttcgtgatctgctcaagaacgttgatcttaaagggttcgagcctgatgtacgtattttgcttaccaaatacagcaatagtaatggctctcagtccccgtggatggaggagcaaattcgggatggcctgggaaagcatggttctaaaaaatgttgtacgtgaaacggaatgaagttgttaaaggtcagatccggatgagaactgtttttgaacaggccattgatcaacgctcttcaactggtgcctggagaaatgctctttctatttgggaacctgtctgcaatgaaattttcgatcgtctgattaaaccacgctgggagattagataatgaagcgtgcgcctgttattccaaaacatacgctcaatactcaaccggttgaagatacttcgttatcgacaccagctgccccgatggtggattcgttaattgcgcgcgtaggagtaatggctcgcggtaatgccattactttgcctgtatgtggtcgggatgtgaagtttactcttgaagtgctccggggtgatagtgttgagaagacctctcgggtatggtcaggtaatgaacgtgaccaggagctgcttactgaggacgcactggatgatctcatcccttcttttctactgactggtcaacagacaccggcgttcggtcgaagagtatctggtgtcatagaaattgccgatgggagtcgccgtcgtaaagctgctgcacttaccgaaagtgattatcgtgttctggttggcgagctggatgatgagcagatggctgcattatccagattgggtaacgattatcgcccaacaagtgcttatgaacgtggtcagcgttatgcaagccgattgcagaatgaatttgctggaaatatttctgcgctggctgatgcggaaaatatttcacgtaagattattacccgctgtatcaacaccgccaaattgcctaaatcagttgttgctcttttttctcacccccgtcaggcaccgtgtatgaaatctaacaatgcgctcatcgtcatcctcggcaccgtcaccctggatgctgtaggcataggcttggttatgccggatctggctctgaaggggctacgtgttttgctcgtggaaggtaacgacccccagggaacagcctcaatgtatcacggatgggtaccagatcttcatattcatgcagaagacactctcctgcctttctatcttggggaaaaggacgatgtcacttatgcaataaagcccacttgctggccggggcttgacattattccttcctgtctggctctgcaccgtattgaaactgagttaatgggcaaatttgatgaaggtaaactgcccaccgatccacacctgatgctccgactggccattgaaactgttgctcatgactatgatgtcatagttattgacagcgcgcctaacctgggtatcggcacgattaatgtcgtatgtgctgctcacgccctgattgttcccacgcctgctgagttgtttgactacacctccgcactgcagtttttcgatatgcttcgtgatctgctcaagaacgttgatcttaaagggttcgagcctgatgtacgtattttgcttaccaaatacagcaatagtaatggctctcagtccccgtga

SEQ ID NO: 141181 - DNA, 7622 bp, Homo sapiens
atgaaactcatggaaacacttaaccagtgcataaacgctggtcatgaaatgacgaaggctatcgccattgcacagtttaatgatgacagcccggaagcgaggaaaataacccggcgctggagaataggtgaagcagcggatttagttggggtttcttctcaggctatcagagatgccgagaaagcagggcgactaccgcacccggatatggaaattcgaggacgggttgagcaacgtgttggttatacaattgaacaaattaatcatatgcgtgatgtgtttggtacgcgattgcgacgtgctgaagacgtatttccaccggtgatcggggttgctgcccataaaggtggcgtttacaaaacctcagtttctgttcatcttgctcaggatctggctctgaaggggctacgtgttttgctcgtggaaggtaacgacccccagggaacagcctcaatgtatcacggatgggtaccagatcttcatattcatgcagaagacactctcctgcctttctatcttggggaaaaggacgatgtcacttatgcaataaagcccacttgctggccggggcttgacattattccttcctgtctggctctgcaccgtattgaaactgagttaatgggcaaatttgatgaaggtaaactgcccaccgatccacacctgatgctccgactggccattgaaactgttgctcatgactatgatgtcatagttattgacagcgcgcctaacctgggtatcggcacgattaatgtcgtatgtgctgctgatgtgctgattgttcccacgcctgctgagttgtttgactacacctccgcactgcagtttttcgatatgcttcgtgatctgctcaagaacgttgatcttaaagggttcgagcctgatggcacacaggcaaagatgacacaaggtgaacgcaggaacgtccccaaacaagaatacatatctcgtgggtatttcacccttaaagaaaccgtgatcgatacaagcaatggaagcaggatttctttcacgactcgtataaccggcaaagacgtagtaagaaccaccagcattgtaatgctggctaaagtcactttcctgagctgtataacgatgagcgattttactttttctggctatgaattggcctgctttgtaacacactccggtctatcccgtagcgccgggcatatcctgtcgcaatgtgcaaatctcgcggcaacaaccagtgaatacttcattcacaagcctcaccgcctgatcgcggcagaaactggttatagccaatcaaccgtcgttcgtgcattccgtgaagctgtaaacaaaggaattctgtctgtagagattgttatcggcgatcaccgtgaacgtcgcgctaacctgtaccggtttacaccatcctttttggccttcgcacaacaagccaaaaatgcgctgatagaaagcaaattaaagatctcttcagcggcaaccaagtgtgacaatctaaaaacttgtcacacttcacatggatctgtcatggcggaaacagcgggttatcaatcacaagaaacgtaaaaatagcccgcgaatcgtccagtcaaacgacctcactgaggcggcatatagtctctcccgggatcaaaaacgtatgctgtatctgttcgttgaccagatcagaaaatctgatggcaccctacaggaacatgacggtatctgcgagatccatgttgctaaatatgctgaaatattcgggattgaccttcgcggaaagcaataaagaatatccgccaggcattgaagagtttcgcggggaaggaagtggttttttatcgccctgaagaggatgccggcgatgaaaaaggctatgaatcttttccttggtttatcaaacgtgcgcacagtccatccagagggctttacagtgtacatatcaacccatatctcattcccttctttatcgggttacagaaccggtttacgcagtttcggcttagtgaaacaaaagaaatcaccaatccgtatgccatgcgtttatacgaatccctgtgtcagtatcgtaagccggatggctcaggcatcgtctctctgaaaatcgactggatcatagagcgttaccagctgcctcaaagttaccagcgtatgcctgacttccgccgccgcttcctgcaggtctgtgttaatgagatcaacagcagaactccaatgcgcctctcatacattgagaaaaagaaaggccgccagacgactcatatctttttcgatatgcttcgtgatctgctcaagaacgttgatcttaaagggttcgagcctgatgtacgtattttgcttaccaaatacagcaatagtaatggctctcagtccccgtggatggaggagcaaattcgggatgcctggggaagcatggttctaaaaaatgttgtacgtgaaacggatgaagttggtaaagatacttcgttatcgacaccagctgccccgatggtggattcgttaattgcgcgcgtaggagtaatggctcgcggtaatgccattactttgcctgtatgtggtcgggatgtgaagtttactcttgaagtgctccggggtgatagtgttgagaagacctctcgggtatggtcaggtgctgtatcccagggaggtgagagttttatctatatgcccctgactggggctgctgcctttctttcagagatgccctgcccagagaggaggaatctaaagaagcagtgtggctacagtggctttgctgcatgcggttatcaatcacaagaaacgtaaaaatagcccgcgaatcgtccagtcaaacgacctcactgaggcggcatatagtctctcccgggatcaaaaacgtatgctgtatctgttcgttgaccagatcagaaaatctgatggcaccctacaggaacatgacggtatctgcgagatccatgttgctaaatatgctgaaatattcggattgacctctgcggaagccagtaaggatatacggcaggcattgaagagtttcgcggggaaggaagtggttttttatcgccctgaagaggatgccggcgatgaaaaaggctatgaatcttttccttggtttatcaaacgtgcgcacagtccatccagagggctttacagtgtacatatcaacccatatctcattcccttctttatcgggttacagaaccggtttacgcagtttcggcttagtgaaacaaaagaaatcaccaatccgtatgccatgcgtttatacgaatccctgtgtcagtatcgtaagccggatggctcaggcatcgtctctctgaaaatcgactggatcatagagcgttaccagctgcctcaaagttaccagcgtatgcctgacttccgccgccgcttcctgcaggtctgtgttaatgagatcaacagcagaactccaatgcgcctctcatacattgagaaaaagaaaggccgccagacgactcatatctttaatgatgacagcccggaagcgaggaaaataacccggcgctggagaataggtgaagcagcggatttagttggggtttcttctcaggctatcagagatgccgagaaagcagggcgactaccgcacccggatatggaaattcgaggacgggttgagcaacgtgttggttatacaattgaacaaattaatcatatgcgtgatgtgtttggtacgcgattgcgacgtgctgaagacgtatttccaccggtgatcggggttgctgcccataaaggtggcgtttacaaaacctcagtttctgttcatcttgctcaggatctggctctgaaggggctacgtgttttgctcgtggaaggtaacgacccccagggaacagcctcaatgtatcacggatgggtaccagatcttcatattcatgcagaagacactctcctgcctttctatcttggggaaaaggacgatgtcacttatgcaataaagcccacttgctggccggggcttgacattattccttcctgtctggctctgcaccgtattgaaactgagttaatgggcaaatttgatgaaggtaaactgcccaccgatccacacctgatgctccgactggccattgaaactgttgctcatgactatgatgtcatagttattgacagcgcgcctaacctgggtatcggcacgattaatgtcgtatgtgctgctgatgtgctgattgttcccacgcctgctgagttgtttgactacacctccgcactgcagtttttcgatatgcttcgtgatctgctcaagaacgttgatcttaaagggttcgagcctgatgtacgtattttgcttaccaaatacagcaatagtaatggctctcagtccccgtggatggaggagcaaattcgggatgcctggggaagcatggttctaaaaaatgttgtacgtgaaacgaatgaagttggtaaagctgccccgatggtggattcgttaattgcgcgcgtaggagtaatggctcgcggtaatgccattactttgcctgtatgtggtcgggatgtgaagtttactcttgaagtgctccggggtgatagtgttgagaagacctctcgggtatggtcaggtaatgaacgtgaccaggagctgcttactgaggacgcactggatgatctcatcccttcttttctactgactggtcaacagacaccggcgttcggtcgaagagtatctggtgtcatagaaattgccgatgggagtcgccgtcgtaaagctgctgcacttaccgaaagtgattatcgtgttctggttggcgagctggatgatgagcagatggctgcattatccagattgggtaacgattatcgcccaacaagtgcttatgaacgtggtcagcgttatgcaagccgattgcagaatgaatttgctggaaatatttctgcgctggctgatgcggaaaatatttcacgtaagattattacccgctgtatcaacaccgccaaattgcctaaatcagttgttgctcttttttctcaccccggtgaactatctgcccggtcaagaagcttgcatgcctgcaggcatatggtgcaagctgttggtagatctaccattctggggtctggagcacagtggctcttctctcacagcttcactaggcagtggcccaagtggcactttgtgtgagggctccaaccccacgtttgccttctgcactgcccttgtagaagtttttcataagggctccattcctgcagtagacttctgcctggacatccaggtcgactctagaggatcccctttcgatatgcttcgtgatctgctcaagaacgttgatcttaaagggttcgagcctgatgtacgtattttgcttaccaaatacagcaatagtaatggctctcagtccccgtggatggaggagcaaattcgggatgcctggggaagcatggttctaaaaaatgttgtacgtgaaacggatgaagttggtaaaggtcagatccggatgagaactgtttttgaacaggccattgatcaacgctcttcaactgatacttcgttatcgacaccagctgccccgatggtggattcgttaattgcgcgcgtaggagtaatggctcgcggtaatgccattactttgcctgtatgtggtcgggatgtgaagtttactcttgaagtgctccggggtgatagtgttgagaagacctctcgggtatggtcaggtaatgaacgtgaccaggagctgcttactgaggacgcactggatgatctcatcccttcttttctactgactggtcaacagacaccggcgttcggtcgaagagtatctggtgtcatagaaattgccgatgggagtcgccgtcgtaaagctgctgcacttaccgaaagtgattatcgtgttctggttggcgagctggatgatgcgactctagaggatccccttttcttaatccagtctatcattgttggacatttggattggttccaagtctttgctattgtgaataatgccgcaataaacatattgatcttatttcattatggtgaaagttggaacctcttacgtgccgatcaacgtctcattttcgccaaaagttggcccagggcttcccggtatcaacagggacaccaggatttatttattctgcgaagtgatcttccgtcacaggtatttattcgcgataagctcatggagcggcgtaaccgtcgcacaggaaggacagagaaagcgcggatctgggaagtgacggacagaacggtcaggacctggattggggaggcggttgcgccgctgctgctgacgtgtgacaatctaaaaacttgtcacacttcacatggatctgtcatggcggaaacagcggttatcaatcacaagaaacgtaagtttagcccgcgaatcgtccagtcaaacgacctcactgaggcggcatatagtctctcccgggatcaaaaacgtatgctgtatctgttcgttgaccagatcagaaaatctgatggcaccctacaggaacatgacggtatctgcgagatccatgttgctaaatatgctgaaatattcggattgacctctgcggaagccagtaaggatatacggcaggcattgaagagtttcgcggggaaggaagtggttttttatcgccctgaagaggatgccggcgatgaaaaaggctatgaatcttttccttggtttatcaaacgtgcgcacagtccatccagagggctttacagtgtacatatcaacccatatctcattcccttctttatcgggttacagaaccggtttacgcagtttcggcttagtgaaacaaaagaaatcaccaatccgtatgccatgcgtttatacgaatccctgtgtcagtatcgtaagccggatggctcaggcatcgtctctctgaaaatcgactggatcatagagcgttaccagctgcctcaaagttaccagcgtatgcctgacttccgccgccgcttcctgcaggtctgtgttaatgagatcaacagcagaactccaatgcgcctctcatacattgagaaaaagaaaggccgccagacgactcatatctgtgacaatctaaaaacttgtcacacttcacatggatctgtcatggcggaaacagcggttatcaatcacaagaaacgtaaaaatagcccgcgaatcgtccagtcaaacgacctcactgaggcggcatatagtctctcccgggatcaaaaacgtatgctgtatctgttcgttgaccagatcagaaaatctgatggcaccctacaggaacatgacggtatctgcgagatccatgttgctaaatatgctgaaatattcggattgacctctgcggaagccagtaaggatatacggcaggcattgaaaagtttcgcggggaaagaagtggttttttatcgccctgaagaggatgccggcgatgaaaaaggctatgaatcttttccttggtttatcaaacgtgcgcacagtccatccagagggctttacagtgtacatatcaacccatatctcattcccttctttatcgggttacagaaccggtttacacaatttcggcttattgaaacaaaagaaatcaccaatccgtatgccatgcgtttatacaaatccctgtgtcaatatcgtaaaccggatggctcaaggcatctctctttgaaaatcgactggatcatagagcggttccagctgccctcaaattaccaaccgatgcctgactttccccgccgtttcctgcaggtatga

SEQ ID NO: 141182 - DNA, 2099 bp, Homo sapiens
gcctctaaagggttcttcttttttaaaaggcgccttgtaaggcctttatccatgttgtttttagagaaaggtgttgtgacaaattgcccccttccagtggtgccaaaatcaccctccaaatgaccagtcctgtcttgtgaccaaattcccctttacccctggtaccaaattgccctcagaagaagctgttttttcacaaagttatcccctgcttattgactcttttttatttagtgtgacattctaaaaaacttgtcacactttcacatggatctgtcatggcggaaacagcggttatcaatcacaagaaacgtaaaaatagcccgcgaatcgtccagtcaaacgacctcactgaggcggcatatagtctctcccgggatcaaaaacgtatgctgtatctgttcgttgaccagatcagaaaatctgatggaaccctacctgaacatgacggcttctgctatatccatgttgctcaatctgctgaaataaccggattgacctctgcggaatccagtaaggatatacggcaggcattgaagagtttcgcggggaaggaaagtggttctttatcgccctgaagaggatgccggcgatgaaaaaggctatgaatcttttccttgggttatcaaacgggcgcacaggccatccagagggcttttcagtggacatattccccccatatctcattcccttctttatcggggtacagaacccggttaacgcagttttcggcttagggaaacaaaagaaatcacccatccgtatgccatggcgttattacaaatccctgggtcaggatcggaaggccggatggctcaggccatcgtctcttcttaaaatcgactggatcatagagcgttaccagctgcctcaaagttaccagcgtatgcctgacttccgccgccgcttcctgcagcattttctggctcatgctggctgtcccaaaggcacccagaacttcacgtttagaatgaaatttatcatcttctccattaaaaaagttttacctcctgttgacacaatcttagctcatgaccccgttatccatacttgtcatctgagagagtcctttggtagtgtctctccttcatctccaaaatctaatcggttaccatgccctgaagtgatcttatttcattatggtgaaagttggaacctcttacgtgccgatcaacgtctcattttcgccaaaagttggcccagggcttcccggtatcaacagggacaccaggatttatttattctgcgaagtgatcttccgtcacaggtatttattcgcgataagctcatggagcggcgtaaccgtcgcacaggaaggacagagaaggcgcggatttggggaagtgacggacagaacggtcaggaacctggatatgtcgaggcgggttgcccgccgctgctgctgacggtgtgacgttctctgttccggtcacaccacatacgttccgccattcctatgcgatgcacatgctgtatgcccggtataccgctgaaaggtctgcaaagcctgatgggacataagtgcatcaggtcaacgggaaggctaccccaaaggtttttgggcctggaatggggcttgcccgggcacccggggggcaggttggcaatggccgaagtctgatgcggttgggaatgcctaaaacaataaccttgggataaatggccttggccttatattggaaatgggaaaccggaggggatatgctgtttttgtctgttaaacagaagaagctgggctgttatccccttgagaagcgaacgaaacaggccgggaaaatctcccattattgcgaagaatcccgtttattattcttaggagcctgtgtagcgtttataggaaagaatggttctgtcatgatgcctgcaagccggtaacgaaaacgatttgaatatgccttcaggaacaatagaaatcttcgtgcggtgttacgttgaagtggagcggattatgtcagcaatggacagaacaacctaatgaacacagaaccatgatgtggtctgtccttttacagccagtagtgctcgccgcagtccagcgacagggcgaagccctcgagtgagcgagggagcacccaggaacagcacttatatattctggg

SEQ ID NO: 141183 - DNA, 6475 bp, Homo sapiens
  misc_feature (1)...(6475): n = a,t,c or g
atggcgcaacgccctatgaggaaactgaggctcagggaaagtaataacggccagggttcgcggcttgacgatccgatcgaggcgcaggcgctgatcgccacctacggccgtgatcgtgatcctggccggccgttgtggttggggtcggtcaagtcgaacatcggtcatacgcaagcggcggcgggtgtggctggtgtgatcaagatggtgatggcgatgcggcacgggcagctgccacgcacgttgcacgtggaatcgccgtcgccggaggtggattggtcggcggggacggttcaactccttacggagaacacgccctggcccaggagtggtcgtgttcgtcgggtgggggtgtcgtcgttcgggatcagtggtactaacgcgcacgtcatcctcgaacagcccccgggagtgccgagacccgctatggcaatccgggacagtttccctctttgcccgcctcctgctgaggccttcaacacctctggaggaagggctgctacagtcaagtcttcaggagaaagcaagaagggaccagtctctacggatgtgcctagtcatccctcggtatccacaggggatgggttccaggacctcatgggtaccaaatccaaggatgccaagttccttcggcatattttcgaacggttgttgggtgaatctgtggctatcagagatgccgagaaagcagggcgactaccgcacccggaatatggaaattcgaggacggggttaagcacggtgttggttatccaattgaccaaaattaatcatatcgcgtgatgtgtttggtacgcgattgcgacgtgctgaagactgtatttccaccggtgatcggggttgctgcccataaaggtggcgtttacaaatcctcagtttctggttcatcttgctcaggatctggctctgaaggggttacgtgttttgctcgtgaaaggtaccgcccccccagggaaacagcctcaatggtatcgcgggagggggacccagctcttcataatcagtgcagaacacagctcttatgccttttatatcttggggacaaggacgatgtcacttatgcaataaagcccacttgctggccggggcttgacattattccttcctgtctggctctgccccgtattgaaactgagttaaatgggcaaatttgatgaaaggtaacttgccccccgatccacacctgatgctccgactggccattgaaactgttgctcatgctcatgactatgatgtcatagttattggacagcgcgcgctaacctgggtatcggcacgattaatgtcgtatcgcccccctgatgtgctgacccgttcccacgcctgcttgagctatgtttgattacgcctccgcactggcagttttttgactattcttcgtgatctgctcaagaacgcgtgatcttaaaaggggtcaaccctcgtgtcccttttttgctttacccaatccagcaatagtaatggaatctcagtccccctggatggacacatcacgcacncnntaaataaaactaaagcaagagtttcaggggaaaaatactacactttgtgttatagtatccctgcatgctggcagggagactcgagaggatctcctttgagcataggctttttcctgtttgatattacaaccctaaggtcgactctagaggatcccctggagctgcctgccagtcctgcgacatctgcaggcactcctcagctcttgggtgatcgatgggactgggcgccgcgaacaggggcggccgtcgtcagggacgctcgtgtggcacaggagcccatggaggagggggaggctcaggcacggtgggctgcaggtcccgagccctgccccatggggacgcagctaaggcccggcgagaaattgagtgcagcaccggtggtccagcactgctgggggacccacacaccctccgcagctgctggcccgggtgctaagcccctcattgcccggggctggtggggctggcagggctggctagccgctccgagtgcaggcccgccaagcccactcccacctggaactccagctggcccgcaagccccgtgtgcagccccggttcccgcttgcgcctctccctccacacctccctgcaatctgagggagccggctctggccttggacagcccagaaaggggctcccacagtgcagcggtcgacactagaggatccccgtggacaagctggccgctgcaaaacgctgacggaacagtagctgaatacaacggctatcacgttgtgtttgctcttgcgggaagcccgaaagacgctgatgacacatcaatctacatgttttatcaaaaggtcggcgacaactcaatcgacagctggaaaaacgcgggccgtgtctttaaagacagcgataagttcgacgccaacgatccgatcctgaaagatcagacgcacgaatggtccggttctgcaccctttacatctgacggaaaaatccgtttattctacactgactattccggtaaacattacggcaaacaaagcctgacaacagcgcaggtaaatgtgtcaaaatctgatgacacactcaaaatcaacggagtggaagatcacaaaacgatttttgacggagacggaaaaacatatcagaacgttcagcagtttatcgatgaaggcaattatacatccggcgacaaccatacgctgagagaccctcactacgttgaagacaaaggccataaataccttgtattcgaagccaacacgggaacagaaaacggataccaaggcgaagaatctttatttaacaaagcgtactacggcggcggcacgaacttcttccgtaaagaaagccagaagcttcagcagagcgctaaaaaacgcgatgctgagttagcgaacggcgccctcggtatcatagagttaaataatgattacacattgaaaaaagtaatgaagccgctgatcacttcaaacacggtaactgatgaaatcgagcgcgcgaatgttttcaaaatgaacggcaaatggtacttgttcactgattcacgcggttcaaaaatgacgatcgatggatgccagcctacgtgttctgaggctttgcagaactttcaacggtataccggcatacagcatgtgcatcgcataggaatggcggaacgtatgtggtgtgaccggaacagagaacgtcacaccgtcagcagcagcggcggcacccgcctccccaatccaggtcctgcccgttctgaacattttgaggcatttcagtcagttgctcaatgtacctataaccagaccgttcagctggatattacggcctttttaaagaccgtaaagaaaaataagcacaagttttatccggcctttattcacattcttgcccgcctgatgaatgctcatccggagttccgtatggcaatgaaagacggtgagctggtgatatgggatagtgttcacccttgttacaccgttttccatgagcaaactgaaacgttttcatcgctctggagtgaataccacgacgatttccggcagtttctacacatatattcgcaagatgtggcgtgttacggtgaaaacctggcctatttccctaaagggtttattgagaatatgtttttcgtctcagccaatccctggtcttccttagagctagcagtgatcatgggaccaattctggccaataagtgtgacaatctaaaaacttgtcacacttcacatggatctgtcatggcggaaacagcggttatcaatcacaagaaacgtaaaaatagcccgcgaatcgtccagtcaaacgacctcactgaggcggcatatagtctctcccagggatcaaaaacgtatgctgtatctgttcgttgaccagatcagaaaatctgatggcaccctacaggaacatgacggtatctgcgagatccatgttgctaaatatgctgaaatattcggattgacctctgcggaagccagtaaggatatacggcaggcattgaagagtttcgcggggaaggaaagtggttttttatcgccctaaagaggatgccggcgataaaaaaggctatgaatcttttccttggtttatcaaacgtgcgcacagtccatccagagggctttacagtgtacatatcaacccatatctcattcccttctttatcgggtttacagaaccggtttacgcagtttcggcttagtgaaacaaaagaaatcaccaatccgtatgccatgcgtttatacgaatccctgtgtcagtatcgtaagccggatggctcaggcatcgtctctctgaaaatcgactggatcatagagcgttaccagctgcctcaaagttaccagcgtatgcctgacttccgccgccgcttcctgcaggtctgtgttaatgagatcaacagcagaactccaatgcgcctctcatacattgagaaaaagaaaggccgccagacgactcatatcgatctggctctgaaggggctacgtgttttgctcgtggaaggtaacgacccccagggaacagcctcaatgtatcacggatgggtaccagatcttcatattcatgcagaagacactctcctgcctttctatcttggggaaaaggacgatgtcacttatgcaataaagcccacttgctggccggggcttgacattattccttcctgtctggctctgcaccgtattgaaactgagttaatgggcaaatttgatgaaggtaaactgcccaccgatccacacctgatgctccgactggccattgaaactgttgctcatgactatgatgtcatagttattgacagcgcgcctaacctgggtatcggcacgattaatgtcgtatgtgctgctgatgtgctgattgttcccacgcctgctgagttgtttgactacacctccgcactgcagtttttcgatatgcttcgtgatctgctcaagaacgttgatcttaaagggttcgagcctgatgtacgtattttgcttaccaaatacagcaatagtaatggctctcagtccccgtggatggaggagcaaattcgggatgcctggggaagcatggttctaaaaaatgttgtacgtgaaacggatgaagttggtaaagctgccccgatggtggattcgttaattgcgcgcgtaggagtaatggctcgcggtaatgccattactttgcctgtatgtggtcgggatgtgaagtttactcttgaagtgctccggggtgatagtgttgagaagacctctcgggtatggtcaggtaatgaacgtgaccaggagctgcttactgaggacgcactggatgatctcatcccttcttttctactgactggtcaacagacaccggcgttcggtcgaagagtatctggtgtcatagaaattgccgatgggagtcgccgtcgtaaagctgctgcacttaccgaaagtgattatcgtgttctggttggcgagctggatgatgagcagatggctgcattatccagattgggtaacgattatcgcccaacaagtgcttatgaacgtggtcagcgttatgcaagccgattgcagaatgaatttgctggaaatatttctgcgctggctgatgcggaaaatatttcacgtaagattattacccgctgtatcaacaccgccaaattgcctaaatcagttgttgctcttttttctcaccccggtgaactatctgcccggtcaggtgatgcacttcaaaaagcctttacagataaagaggaattacttaagcagcaggcatctaaccttcatggagcagaaaaaagctggggttgttattttgaagctgaagaagttatcactcttttaacttctgtgcttaaaacgtcatctgcatcaagaactagtttaagctcacgacatcagtttgctcctggagcgacagtattgtataagggcgataaaatggtgcttaacctggacaggtctcgtgttccaactgagtacagatacggtgtcttcttaaatgttcttcttccggcaacaaagtattttcagttgcacgatccaagcctacgtaacatggaacttaattactctctggcttcagaggatctggttttgaaggggctacgtgttttgctcgtggaaggtaacgacccccagggaacagcctcaatgtatcacggatgggtaccagatcttcatattcatgcagaagacactctcctgcctttctatcttggggaaaaggacgatgtcacttatgcaataaagcccacttgctggccggggcttgacattattccttcctgtctggctctgcaccgtattgaaactcacctaatgggcaaatttgatgaaggtaaactgcccaccgatccacacctgatgctccgactggccattgaaactgttgctcatgactatgatgtcatagttattgacagcgcgcctaacctgggtatcggcacgattaatgtcgtatgtgctgctgatgtgctgattgttcccacgcctgttgagcatgtttgattacgcttccgcacggcagttttttcactattcttcgtgatctccagcgtcggacattgaattcgt

SEQ ID NO: 141184 - DNA, 615 bp, Homo sapiens; identical to SEQ ID NO: 141030

SEQ ID NO: 141185 - DNA, 229 bp, Homo sapiens
gtttcaagggtgtcagaccacgcagggatgcctgacttggtccttcacccttggcggcaagtccctctttcctggggcaggggcaagtacccctcaaccccttctccttcacccttagtggcaagtcccgctttcctggcagccactcccagagctcctggaactctggcccaaggctctctgactgactccttctcggcttaccggctgaagactgatgctgccccat

SEQ ID NO: 141186 - DNA, 495 bp, Homo sapiens; identical to SEQ ID NO: 137652

SEQ ID NO: 141187 - DNA, 657 bp, Homo sapiens; identical to SEQ ID NO: 130336

SEQ ID NO: 141188 - DNA, 1752 bp, Homo sapiens; identical to SEQ ID NO: 130337

SEQ ID NO: 141189 - DNA, 479 bp, Homo sapiens
tggaccagcgtggtggaattcttggggaagaaaatgccaccacccagatgcacatgaaatttggtgccgtgactttgatcgggggacctcccttgggagatcaatcccctgtcctcctgctctttgctccgtgagaaagatccacctatgacctcaggtcctcagaccaaccagcccaagaaacatctcatcaatttcaaatccggaccccactggaaatcggactgttcaactcacctggcagccactcccaaagccccctggaactctggcccaaggctctctgactgactccttctcggcttagcggctgaagactgatgctgcccgatcgcctcggaagccccgtagaccatcacggacgccgagcttccggtaactctcacagtggaaggtaagcccgtccccttcttaatcaatacggaggctacccgctccacattaccttctttccaagggcctgtttcccttgcctccat

SEQ ID NO: 141190 - DNA, 456 bp, Homo sapiens
tcagtctggctggacggcacagtcggacacctccgaaaggctgtccactccctgtcttagggcaaaggtgaggctgaagttgcctggaggtatgcgatgaacaaggaccagagaaaagcaaggcagcgagccctccggggagtcagttctgtgactgaagacactctcaacatttgcagactttgctggcagccactcccagatcccctggaactctggcccgaggctctctgactgactccttctcggcttagcagctgaagactgatgctgcccgatcgcctcggaagccccgtagaccatcacggatgctgagctttgggtaactctccctgtgattgagctgaatgagcccagatctcttctatgcttccgatttctcctaaaacctttgaaaagtagcttttaaatccatcattactcttaaaatcttcctctatttatgtgattagaaaa

SEQ ID NO: 141191 - DNA, 370 bp, Homo sapiens; identical to SEQ ID NO: 125419
  misc_feature (1)...(370): n = a,t,c or g

SEQ ID NO: 141192 - DNA, 408 bp, Homo sapiens
  misc_feature (1)...(408): n = a,t,c or g
caaacaaatggtacattcaaaatccataaggaaatattctgatgcacaaatgataaagactggaggtcaagtaagttcacacatatatttcaagttgatatagagtatgaggaaaacgcaatggtccctcgcatgcaagaagtcaaagagatcctccgagcaatcctcttctgaatgtgatcgagaggatacacgctcatcacagagctatagccgctaccgggcctttacacaattctccaactgctcgcattgctctctcactgttgttaggggatccactaattcctcctnnnnnnnnnnnnnnnnnnnnnnnnnnnnnnnnnnnnnnnnnnnnnnnnnnnnnnnnnnnnnnnnnnnnnnnnnnnnnnnnnnnnnnnnnnnnnnnnnnnnnnnnnnnnnnnnnat

SEQ ID NO: 141193 - DNA, 291 bp, Homo sapiens
aggaggaattagtggatcccctaacaacagtgagagagcaatgcgagcagttggagaaatgtgtaaaggcccgggagcggctagagctctgtgatgagcgtgtatcctctcgatcacatacagaagaggattgcacggaggagctctttgacttcttgcatgcgagggaccattgcgtggcccacaaactctttaacaacttgaaataaatgtgtggacttaattcaccccagtcttcatcatctgggcatcagaatatttccttatggttttggatgtaccatttggttg

SEQ ID NO: 141194 - DNA, 685 bp, Homo sapiens
tttttttttttgcagatcatagaacttttatttagatggaatcattgcgaattacatagaagctaccagcctaagccaaaacccatgaggttcatgtgaacttacagttacacaaataagaaacaaatggtacatccaaaaccataaggaaatattctgatgcccagatgatgaagactggggtgaattaagtccacacatttatttcaaagttgtaaagaagtttgtgggccacgcattggtccctcgcatgcaagaagtcaaagagctcctccgtgcaatcctcttctgtatgtgatcgagaggatacacgcttcatcacagagctctagccgctcccgggccttttacacatttctccaactggctcgcattgctctctcactgttgttaggggatccgtgcagaaggccagctggcagagccacactggccgccagaaatggcagaatgcgggtctcccattcaattctggatgctaagtagtagggaaaagtttcacattcctggccttccaaggttgccagtatgcactggaagcctcagtcctatcactaattcctcctcttcctcttcctccacatcaggatctccggattcggtaagcatcttttgctcgtcctccagtcccatgtctggctacggttctagattcaacacgagcagcaacagcggcacctaaccc

SEQ ID NO: 141195 - DNA, 1022 bp, Homo sapiens
tcaaggaagacaaacattgtattgttccactttggtgaggtacctagaatagcagtcacattcatagagacagaaagtagaatggtagtaaccaggagctttcttgagggcagtttcctcaatcctctccaagtaatatatattgagcagaggtaggatgctttgaagtattgggcctgggagggaccaaaaccccgctctccagaacccccatatgggcgctcaccgcccgcccgcacagctcgaacagggcggggggagcgttggggcccgaggccgagctcttcgctggcgccgcctcccgggacgtggcctccatggtcgttgccgccgctacctcacagaaccagcaactccgggcgcgccaggcctcgggcgccgccatctctgcctgcggctggtagtacatgccaatctgagcatgtgttcgcgaccacgatgagtgtgccgcacttccggccagatcgccggatttccgctgagtgacccttacaagtccttcttgatcctgaactgggttaggtgccgctgttgctgctcgtgttgaatctagaaccgtagccagacatgggacgaatccggagatcctgaggaggtaaggcaaggcgatccactcggccctcttctctgccctgaagcccaggacgcaatgggtcccttcgcatgccaaggaagtccaagagctccctccggtgcaatcctccttctgtatggtgatcgagagggatacaccgttcatcacaagagctcctagccagctcccggggcctttacacatttctcccaactggctccgcattgctctctcttcactgttggtagggggggatcccacttaattccctccctctttccctctttccctcctccctcaggggatctccggaattcggtaaagcatctttttgctccgtcctccagttcccatgttctggctacgggttctagattcaaacacgagcagcaacagcgggcacctaacccagttcaggatcaavaaggacttgtaagggtcactcagc

SEQ ID NO: 141196 - DNA, 510 bp, Homo sapiens; identical to SEQ ID NO: 131199

SEQ ID NO: 141197 - DNA, 1044 bp, Homo sapiens
atgactattttgggaaacacttttattctcagcttagagtggacattgccccggtcacgatctatgacaataatggtgctattatgttcctacagtgttgggcagatgctcctaggagggctggcttttgccattcaggactggcacatattgcaactgactgtgtctacacccataattgtcctcttcttgtcctcttggtatgaacaatctccacattctttgcctggtgtggaccccaagttcctgaagaatatgcgctttgccaagaagcacatcaagaagggcctaaagaagatgcaggtcaacaatgccaaggccatgagtgcacatgccaaggctatcaaggccctcataaagcccaaggaagttaagctcaagatcccaaagagtgtcagcaacaagctccatcgacttgcccacattgcccactccaagcttgggaagcatgatcatgcccacattgccaaagggctcaggctgtgtgggccaaaggccaagaccaaggatcaaaccaaggcccagcctgcagctccagcttcaattccagctcaggctcccaaaggcgcccaggccactacaaagggttcaaattgggccctaaattgcattccaaagaccctgctcctggaacagccttctgcaatcaacacaacctcttggaggttttactgcgtctggcactcgcaggttcccctgctctcactctctctctctctgtttccttgctgtgaaaaacgtgttgaccatcaggcatatggcagaataattggatttcaggcaagccaatgtgagaaaccagaaggcaaatctggtcatttgtgggtatacacaggacaaagaaaaaggagtgtagagaaacagaggctgtcctggagtgcttcaatttggaaagtatcttctaaactaaatgaactagaggagccaggaatcagtactcaaaaaagcagaggagaaagcaagctgctacaagaaactcaagggaaacaagaaaagagaacttcagggtttcagcccaattcactaaataggaaagagggctaa

SEQ ID NO: 141198 - DNA, 673 bp, Homo sapiens
ggcgcttcgggagccgcggcttatggtgcagacatggccaagtccaagaaccacaccacacacaaccagtcccgaaaatggcacagaaatggtatcaagaaaccccgatcacaaagatacgaatctcttaagggggtggaccccaagttcctgaggaacatgcgctttgccaagaagcacaacaaaaagggcctaaagaagatgcaggccaacaatgccaaggccatgagtgcacgtgccgaggctatcaaggccctcgtaaagcccaaggaggttaagcccaagatcccaaagggtgtcagccgcaagctcggatcgacttgcctacattgcccatcccaagcttgggaagcgtgctcgtgcccgtattgccaaggggctcaggctgtgccggccaaaggccaaggccaaggatcaaaccaaggcccaggctgcagctccaccttcagttccagctcaggctcccaaagacaaggatacgtcaaatatttttatttccaacaggaaaaggggctgtgactttaccaaaaaagagactaacatcccaaaagtgctgaccatatccatggccccatcattaatgtcactgtactctgtaacacgtaaccaaaccacaaagccccccagcaggcataaaaacctcacaaaaggacagctggagcccctctactga

SEQ ID NO: 141199 - DNA, 449 bp, Homo sapiens
aatgaaggcaggccacttccggcgtagccatggcggctaacgctactaccaacccgtcgcagctgctgcccttagagcttgtggacaaatgtataggatcaagaattcacatcgtgatgaagagtgataaggaaattgttggtactcttctaggatttgatgacttttgcagtgatgcaagtgggcttctggctgttacctgggaagatcagaggcagaagcttgggagctctagcagggtcctggtgctctatgagtaccactcttggaagacagcagccctcctggctgacatctctctaagaagtggagctggtacttctcacatcaacctgacacccaaattgacgctctgtgtacttcagtcacaaggagttgaagttagtgggcatgaggctggaatagagagtggtcagaaaacagacctcatctactttatccaggagtga

SEQ ID NO: 141200 - DNA, 2388 bp, Homo sapiens
tcatgctggccgtggtgggtgagctgtccagctctcctctcccagatcttccaggggccagcaggcttccactaaccacagggcctgggggcacttcagtctaccagggcagatgcttgccaggcccatggggaccagcaggctcccgcaggccctcccaaagccacatgcagcagtgcggctggcaagccccacttgggggagaccctgctgttgccggccaggcctgtgggacaagtacagtctgacatctttgccgatggcctggagatgagcaccccctgctctctcctcgatgttgcagcagaacccacgcgtagagagggttggggcgagcagtccaggcagacccccgggattttcctgccgtattgcacaagcattcatgcgttcatttaatcttgcttttttaggcaatactggggctgtcacactgcatgggctccgggacactgtggctgcccttatgtggtgtccccggagggccctgcaggtgtcacaccgctgctccacactgccacctgctgtcagcatctgtgcaacgtatccaggtctctgggggctgctgtctttttgcatcttccaagtagacatcaaagattggtttgctatcagtgtcacttctataatccgtggttctgattctggatcctccctccgagcctgggtgacgctgtcatgaaagaagctgccagaagcccacagcagggcagttaggcagggaatgcgagtccgtgtccagagcaagggtgactccagtccctccaggacggagaagccagtgcgacccactgtcccaggcccccatggccctggctgctcctttgcttggccccacagaggaggtgtaacagctgcctgcagcttggctgggggatgtggggccactgggctggggtggttgggcagcggcttagcttcaggggtgaaggggagctggggctgctcgtccctctgtccatctgccggcctcactgcctcttcactccaaaaacgatacgagatcgccacagtgttctcctgagagtcgcaggctcttgtgtagagctggggagaagcagctggtgttagtgagcgagctcgtgctggaatggcaagtacgtcactgtgcagcactggggagagcagctcctgggcagcgggcccaagatgtgcatccctgtcaggagcagcctcggcgccaggacgacgcattgcccttccagatgaaaaacagagcagccccgggggggcagggcggggcgccaggagggctcgttgatgtccagagttctgcttctctgccaggcgttgtggtaacttgctagccatccccttctgctctgtgcacttctctgtatgtaacacaggcccagttaggatgcagcaatgcagcagcccccagccttcaaggccctgtggactacaccctcggtagtccgagagcagcgcggggctgggagcctgtgctgccgttccggccacgccggtgaagcgcttccggtccccgtgctggtgggactgaggagagcgccgtgctgccgttccggccacgccgtgaagcgcttccggtctccgtgctggtgggactgagaagaacgccgtgctgccgttccggccacgccggtgaagtgcttccggtccccgtgctggtgggactgagaagaacgccgtgctgccgttctggccacgccgtgaagcgcttccggtctccgtgctggtgggactgagaagaacgccgtgctgccgttccggccacaccagagaagtgcttccggtctccgtgctggtgggactgaggagaacgccgtgctgccgttccggccacgccgtgaagcgcttccggtccccgtgctggtgggactgagaagaacgccgtgctgccgttccggccacgccggtgaagtgcttccggtccccgtgctggtgggactgaggagaacgccgtgctgccgttctggccacgccgtgaagcgcttccggtctccgtgctggtgggactgagaagaacgccgtgctgccgttccggccacaccagagaagtgcttccggtctccgtgctggtgggactgaggagaacgccgtgctgccgttccggccacgccgtgaagcgcttccggtctccgtgctggtgggactgagaagaacgccgtgctgccgttccggccacgccggtgaagcgcttccggtctccctgctggtgggactgaggagagcgccgtgctgccgttccggccacgccgtgaagcgcttccggtctccgtgctggtgggactgagaagaacgccgtgctgccgttctggccacgccgttgaagcggctgatccggcctggttctgggttttcccggagcctgcagggcagccccgccccaggcggcagcagctgggcctgcagcgtgtccctcat

SEQ ID NO: 141201 - DNA, 678 bp, Homo sapiens
atggtcaaccacattagtctccagggacacgcaaacctggatgtgcttctgggggagcagcggtctgaatatttgggaaacccgtttggcactatgtgtgacgttgaacatcatgtgccctttctacagcaggttccctgcaggcacccccaggagaagctcgagcatgtgctcacatctcagggcagttctgttgggagcagccccaagccagacacagcccagtgccatcccagagttaaggagcacttcatggcgtgctgcacgcggaaaccccacacagctctggccacgcagccccagctccccttcacccctgaagctaagccgctgcccaaccaccccagcccagtggccccacatcccccagccaagctgcaggcagctgttacacctcctctgtggggccaagcaaagcacatccacagagtggccttcaagaagcgtgcccctcaggcactcaaagagatttggaaatttgccatgaaggagatgggaactccagatatgtgcattgataccaggctcaacaaagctgtctggaccaaaggaataaggaatatcccataccgcatccgtgtgcggttgtccagaaaatgtaaagagaatgaagattcaccaaataaactctatactttgattacttatgtacccgttactgctttcaaaaatctatag

SEQ ID NO: 141202 - DNA, 582 bp, Homo sapiens
ttaagctgtggcctcagccacctcaacagggccctgtctggccatggagacgttccccaagttccagtcattgtcagctgctgggacactgcggtactgaatcagcccgttggagtcatccaagtgtgaaaaggtacctgaatgagggcagcgtctgctggaagactcgggcgcatttcgtctgtaccgagagcaatcaggaagtttggggtctgtggtgctccccagcacagcaagccccagggctacaggggagtcgttagctcccaggccagggctctgtggacacgtggccagagctgtgtggggtttccgcgtgcagcacgccatgaagtgctccttaactctgggatggcactgggctgtgtctggcttggggctgctcccaacagaactgccctgagatgtgagcacatgctcgagcttctcctgggggtgcctgcagggaacctgctgtagaaagggcacatgatgttcaacgtcacacatagtgccaaacgggtttcccaaatattcagaccgctgctcccccagaagcacatccaggtttgcgtgtccctggagactaatgtggttgaccat

SEQ ID NO: 141203 - DNA, 356 bp, Homo sapiens; identical to SEQ ID NO: 137087
  misc_feature (1)...(356): n = a,t,c or g

SEQ ID NO: 141204 - DNA, 439 bp, Homo sapiens; identical to SEQ ID NO: 137088
  misc_feature (1)...(439): n = a,t,c or g

SEQ ID NO: 141205 - DNA, 795 bp, Homo sapiens
atgccgctgctctacagcctggatgacaaagtgatgagctcctacatccaaagcgagtttgcaagtgtctgcacctccaactcaatcttggacctcttccgaaccccggccatccgcaaggtcacatgctgtctcatggtgatttgtgttcttagaattgaagtggaagaagaagaggaaatcctcttgaactcttacaccacaccttcaaagccatgtgaagacgtgcttgcttcctctttgccttctgcaatgattttcagcaccagtgtccccaggggctcctgggagaagcccccagggggccgtctggacatcggctcaggtgctgctagcaagcaccaggttccaggcagcttagatggtctctttgaggggagatgctctcagctgctgaagagaaatttcttcactcttctcttctacatgtttcttggaagagccttctttgaccctgtagaaatgaaaaggcagaaggcagtgcttggggcccctgagccctgccggcgcttcaccaagcctcagtgggccctgctgagccccaactcctccatcccgggcgcggccacggagggctgcaaggacggctgggtctataaccgcagtgttttcccgtccaccatcgtgatggagtgggatctggtgtgtgaggcccgcactctccgagacctggcgcagtccgtctacatggccggggtgctggtgggggctgccgtgtttggcagcttggcagacaggtttcacatctttgacacaccctacacagactccgttattctagaaccccaagaatga

SEQ ID NO: 141206 - DNA, 843 bp, Homo sapiens; identical to SEQ ID NO: 137089

SEQ ID NO: 141207 - DNA, 1905 bp, Homo sapiens
tcagccctgctccaggctgtcgccgggctgcaccacggtgtagctcccctggcccaaggacagctgccggctgaagaaggatgtggtgcgcttcggcttcactcgcctgatccccttgccgtcctccacgtagtcgatggtggagagatgctggatccggctggacaccacactgccctgcctccgcagcttggggcgctgaacaggagccagtgaggagctggggtccgagggcgagccagtcgcactgtcctgggggcctgcgggctccgccgcctggctcagttcgatgcagtactcaatgagactgctcatcagttcggcctgcttggagtagatcttgaggagcttgttgacaggtgtgccctcgctgtccccgtcgaactccagccacaagatgggctcctcctcctcgggggaggtgtggtcccacgacagctcctggaagcgcaggcccagcaggacatgcttctctctgctatcgatgacgtgcacgccttccagactgatggccacagaaactggcttgcgcccaccccggtgcaaaaagccttgggccggcttgtcaacctcaccgtggaagaaggcacaccggagggagaagggcctgatggcacagagaagggtgggcactgcaggcggagggaagcgcgtggccccaggtgtggagcaaagccagtcgtgggtttggcacttggtctgggggccagggctgctggaggtggccaggagagcctgctgaccactgtccaggcggagacctttcagcagcagggacccataaaacggcagctcgtggcacttgaggagataggcgcggtagtgggtgcccagggcggcctcgcacccgccgtcgctgctgacctcctgcacctggcggtaggcgttcagcaggccctgctcgcccggcccggccctggccccacggccccggagggcagcaaagagactctggccccgcttacagaggtgggcagggaggaaggagtccagcttctccctcaggtcgcaggctgccggccggccgggctggtagggcccaagctgcacgcggcacaccagggcgcccagagcctcgcagtcctccacgtcgcacgggtaccgtgcagccagcacgttgcccttggcctcctcatagagcagccgcaggacctcctcgtcatggatctgcaggggggtgtggcagggacagccgctcagctgggccatggccacgtcatcatctggggcactggtgaagcgcagcagcagctccggccactggcgtcccagcttgtagggctggtgcttgggtttcagctgcacctccagcagaggggagaccagccagagcgcgaagacatccagggcgatgtctggaagctgcaggacctcgcggacagcgcggtgcagctcatgggcactgagcgagggcaggttctccacagccaggggcaccaccgtgtcatccgctaggtataccagcacgtcagccgctcgggctcccacggaggacacgctgcttcggtgggatcgctcagcggggccgggctgcccggcactgccttctgtcccgtccatctgcaaaggcaaagagaaacagcagttaccgggagccagggatggggggctggaggtctcctcaagctctcggtgagtacggtaagggatcccaggctgggtccgcaaggttgagcggcgctgcctcgcagggtcgcagagcccgccacctgagaggcaaggctcctgcctggaatcctgccccgccgccaagcccgccaccgcccgcactcgggctcccgctaaggacgcagcgggaagcgacgcggaagccacggcgggaggaagcgcggcgcccgaggccccgcccccttcgacccgggggagccaatgggagcccagggccgccccgcgcggcccgcgcat

SEQ ID NO: 141208 - DNA, 1278 bp, Homo sapiens
atgacaagcagaagcccctgcgctggctgcctcaatgcctaccgcacagctcgggcgaggcgtatttatagacggagaacaactcgcatcaccggaattcgatcaccttccgccgcctttgtaataactgcctctcactgcaagtcaaccctgtacaaccagccagatatttgtggacaacacttcacagctcaaaacaaggtgaacctaactcctcagcaaaccacagatgctcctgaaagtctccaaggccagaagaaaacccctaaacatataccacactgtggcaactgtagcctagaagtcgcctacgtgcgcgcccgggagctgcacactcttgaagtgaccggcctggagacggttgcccagagcaaggcccatgtagcatccctggagggcctcatccctgaagataaggtcgtgcttctggcaggttctcccttacagaatgaagccaccctgggtcagtgtggggtggaagccctgacaaccctggaagtggttggccgcaggctaggaggtgagtggggctacaggggccccaaactggtgtccaggggcaattcacgacacttagacttacttggtttgccctgcacggacagctgccggctgaagaaggatgtggtgcgcttcggcttcactcgcctgatccccttgcctgcgagggaatgggagggcacactgagcagaggcgctgtccctgtgtccctgctgctgaaaggtctccgcctggacagtggtcagcaggctctcctggccacctccagcagccctggcccccagaccaagtgccaaacccacgactggctttgctccacacctggggccacgcgcttccctccgcctgcagtgcccacccttctctgtgccatcaggcccttctccctccggtgtgccttcttccacggtgaggttgacaagccggcccaaggctttttgcaccggggtgggcgcaagccagtttctgtggccatcagtctggaaggcgtgcacgtcatcgatagcagagagaagcatgtcctgctgggcctgcgcttccaggagctgtcgtgggaccacacctcccccgaggaggaggagcccatcttgtggctggagttcgacggggacagcgagggcacacctgtcaacaagctcctcaagatctactccaagcaggatctggctcacgcttcaccttctctcacctggatcagtcagaggctctctgcctctaggtttcacatctttgacacaccctacacagactccgttattctagaaccccaagaatga

SEQ ID NO: 141209 - DNA, 366 bp, Homo sapiens; identical to SEQ ID NO: 119391

SEQ ID NO: 141210 - DNA, 367 bp, Homo sapiens
ggcactgattggtccattttacagggtgctgactggtccattttacaaacctctagctagccacagagcactgactggtgcatttttacagagcgctgactggcgcattttacaatcctcttgtaagatatcaaagttctccaagtccccacccaacccagaagtccagctggcttcacctctcaatcccccctctaaacaggacaccccaactgctgctaggaattgggcgatgcccactctagctacttcctgctggatagggaaggaaacaagcaaagaaatctccaaaggaccacaaaaactcccaggctatcggttatgtccccttcaagctgtagggggaggggaatttggcccaacccag

SEQ ID NO: 141211 - DNA, 331 bp, Homo sapiens
ctcatgagtagtccagacagtgagatcctttccttgtattattttgatagcctctgacacaaagacggccactgcagcaactaactttaaacagtgaggccagacttttgctactgcatctatttccttacttaggtatgccactggttgtggggttttcccacgagtctgaataaggtctccaagagctatccctgctctctcaggtgactggcctgctccattttctgtcctctctgaaccaccaaggtttgtttgtctgagggccatgactaaggctgcagcctttctctgatctcgcttttccttttgggcctgttcctcttggtcc

SEQ ID NO: 141212 - DNA, 211 bp, Homo sapiens
ctctcaatctcccatctaaacaggacaccccaactgttgtcgggaattgggcgatgaccgctttagctacttccccattctccacaaatgaacttccatcggtatataggttaaggtcaggattagctaaggggacttctaaaagatcctctcgagcagcagaagtctggactataatttgttggcagtcatgctcgattggttccccatc

SEQ ID NO: 141213 - DNA, 519 bp, Homo sapiens
ggtcaattgatttcaaagatacgtttataacccaatcagctgcagatatcaggagaaagttccaaaagcaagccctgggccctgaacacaatctggaggcattattaaacctagcaatcttggtgttctataacagggaccaagaggagcaggcccaaaaggaaaagcgagatcagagaaaggctgcacccttaatcatggccctcagacaaactttggtggttcagagaggacagaaaatggagcaggccaatcacctgatccccggatacagtgagatagccaggcccctctatactctaatcaaggagattcagagggcaaatactcatcaagtagaatgggaaccagaggcagaaacagccttcaaacccttaaagcaggccctagtacaagctccagctttaagtcttcccacaggacaaaacttctctttatacatcacagagagagcagggatagctcttggagtccttactcagactcatgggacaaccccacaactagtggcatacctaa

SEQ ID NO: 141214 - DNA, 540 bp, Homo sapiens
tcaagggctttgcccatcgttctttccccggcatctggaacagtaccacttgcgctttggtttatggttgagactcacacacgagaagcggaaccactcgatggggcattcgttgtcgcagcggatcatctcccagtaggagggctcgctggggtcgatggggaggtcttgccgccgtcgcgctgcgtcgccctgctcctgctgcgggtggaacggctccacgtggctgtctacctgccgcgtgaggctctccaccagctccaccctctggctcttgatctggatcttctgatcgcccggctcgtatgccactggttgtggggttgtcccacgagtttgagtaaggactccaagagctattcctgctctctctgtgacgtataaagagaagttttgtcctgtgggaaggcttaaggatggagcttctactagggcctgctttaaggttttgaaggctgtttctgcctctggttcccattctactagatgagtatttgccttctgggtctccttgattagagtatagagtggtctggccat

SEQ ID NO: 141215 - DNA, 747 bp, Homo sapiens
atcaaggagaccgagagggcaaatattcatctagtagaatgggaaccagaggcagaaacagccttcaaaaccttaaagcaggccctagtacaaactcaagacttaagccttccccaggacaaaacttctctttatacctcacagagagagcgggaatagctcttggagtccttactcagacttgtaggacaaccccacaaccagtaaggaaggaaccccacaacctaagtaaggaaattgatgtagtagatctcttggtccatcgtaaggccccttttggggaacaaagaataggtcactatcctggagaggactggcagttagacttcacccatatgcctaagtcaaggggatttcaatacttgttggtctgtgttgaccaaccaaattggatagaagccttcccctgcaagacggagaaggctcaggaagtggttaaagtactaactcatgaaataattcccagatttgggcttccccaaagcttacaaaacgacaatggtccggctcttaaagccacggtaactcagggaatttccagggcactagggatacaatatcactttcatgagctcaactcacaacttctaccaaggacccctggactgacccaccagccctttggcctagagtgttcccctctggagggcactacaactgcagggccccttcttcacccctatccagcaggaagtagctagagcagtcatcacccagttcccaacagcagctggggtgtcctgttta

SEQ ID NO: 141216 - DNA, 666 bp, Homo sapiens
atggatgaagctggaaaccatcattctcagcaaactaccacaaggacagaaaaccaaacacagcatgttctcactcatagtgcttactggggcctgaagcttcaaccaagtttggaagtgatgggagatactgaagacctggacatgtggcttgtcagcctaaggtggtggaggtgtgcatgtttaccaaacatctgggacattagaaagaaggaaataagcaaagaaatctccaaaggaccacaaaaacccccaggctattggttatgtccccttcaagctgtagcaggaggggaatttggcccaacccggatacatgtccccttctcctgctctgatttaaagcagatcaaggcagacctggggaagttttcagatgatcttgatagaaagctacctgaaagaaaaggaaatgcagaaaacaacttacggataattatattagacgttccactgcactgttctccaaaattttacaaccacgttttggcaattgtaagtacagatgttatgatcattcctgcacagttgtttttcatagataaacccctctgtgtgaaattttggggtcaacaggtaggacgtacactgagctacagcaagagctttggagctttgtgcacatttcctgtcctcaatcagcatgacttggaggatattccttaa

SEQ ID NO: 141217 - DNA, 1983 bp, Homo sapiens
atggagaagtggaacatcacacaccggggcttcttgggggatggggtgcaagcttgcagatcgtctactgtgtgggaccttgagatccccctccccgacgagcaccaaccctgctccacggcacccagtcccattgaccacccaagggctgaggaatgccagcgcatggcgcaggactggcagtcagctccacgtgtagccccagtgcgggatccactaggtgaagccagctgggctcctgagtctgctgctcttgtgaggacgtggagagtctttatatctagctcagggattgtaaatacaccagtcagcaccctgtgtttagctcaagatttgagtgcaccaatcgaaactctgtatctagctgctccggtgaggacgtggagagtctttatatctagctcagggattgtaaatacaccaatcagcaccctgtgtttagctcaaggaggacaagcaagggtgcaggttttcaacattgcgtcagtaaggaccactaaatccgaccttcctcggtcctccatgtggtctgggaggaaaactagtgtttctgttgctgcgtcagtgagtgcaactattccgatcagcagggtccagggaccgttgcgggttcttggacagggagagaaacaaaacaaaccaaaactgcgggaaacaagcaaagaaatctccaaaggaccacaaaaacccccgggctgtcggttatgtccccttcaatctgtagcaggaggggaatttggcccaacccgggtatatgtccccttctccctctctgatttaaagcagatcaaggcagacctggggaagttttcagatgatcctgatagggaccaagaagaacaggcccaaaaggaaaagcgagatcagagaaaggccacagccttagtcatggccctcagacaaacaaactttggtggttcagagaggtcagaaaatggagcaggccaatcacctgggtggttggtgacagaagaaggaaaggtagtcaaagcctgtgaggtgtgccaaaagaattatcccttggtatatcataaggcccctgtgggggaacaaagaataggtcactatcccggagaggactggcagttagacttctcccatatgcctaagtcaaagggatttcaatacttgttggtctgtgttgatacctttacaaattggatagaagctttctcttacaagacagagaaggctcaggaagtgattaaagtcctaataattcctagattcaggcttccccaaagcttacagagtgagaatgttccagcttttaaagccacgataactcagggaatctccaaggcactagggatacaatatcgccttcattgctcctggaggccacaatcctctgggaaggttgagaaggcaaatcaaacactcaagaggcacttaaggaaactaacacaagaaactcacctcccatggcctactcttttgcccatggccttgttgagaattcgaaattctccccacaaaatagggctcagtccatatgaaatgctgtatgggcgaccttttctcacaaatgacctcctactcaatcaggaaatggccaactttgtcaaagatataactttggcaaaatatcaacaaaaccttaaaaatctacctgaaggatgtcacagagaacagggaacagagttgtttcaaccaggagatctagtgttggtcaaatctcttccctctacctccccatctatggactctttgtgggaaggaccatactctataatcctctctactcccattgcagttaacatggcaggagtggaaacttggattcaccacacccgagttaaactttggacatctcctgaggaacctgctggatcatcagctcaggagtcccaagatcagccagaccagcttcgatacacctgcgaaccgttggaggacttgcacctcttatttcagaaggaaacatcccagactaaaaaggctcctaccactgatcctgaggaaagacctcttcctccttaa

SEQ ID NO: 141218 - DNA, 675 bp, Homo sapiens; identical to SEQ ID NO: 119416

SEQ ID NO: 141219 - DNA, 1285 bp, Homo sapiens
aattcaggggctaaataccaggcatctgtcggccagttaaaagtgactagcacggccaccagactaaagacacgggtgtcaggctttctgggaaagggctctcgaacaacctccaactcttcggagttgggagcgttgaaggaaacaataaaagaaatctccaaaggaccacaaaaccccctgggctatcggttatgtccccttcaagctgtagggggaggggaatttggcccaacccgggtacatgtccctttctccctctctgatttaaagcagatcaatgcagacctgggaaagctttcagatgatcctgatagggatcaagaggaagaggcccaaaaggaaaagcaagatcagagaaaggctgcagcattagtcatggccctcagacaaaccaaccttggtgattcagagaggacagaaaatggagcaggccaatcacttgccgttgagggccaggaaattgacttcctcctggacaatggtgcggctttctcagtgttaatctcctgtcccagacagctgtcctcaaggtccgttaccatccggggaatcctgggacagcctgtaaccaggtatttctcccacctcctcagttgtaattgggagacttttctacagataagttcccctctggaggacactacaactgcagggccccttcttcacccctatccaggaggaagtagctagagtggtcatcatccaattcccaacagcaattggggtgtcctgtttagaggggggattgacaggtgaagccaaccgggcttctgagtcagaaacacaaactaccatcagagaatactacaaacacctctatgcaaataaactagaaaatctagaagaaatggataaattcctcaacacatacactctcccaagactaaaccaggaagaagttgaatctctgaatagaccaataacaggatctgaaattgagtcaataattaacagcttaccaaccaaaaaaagtccaggaccagatggattcacagccaaattctaccagaggtacaaggaggagctggtgccattccttctgaaactattccaatcaatagaaaaagagggaatcctccctaactcattttatgaggccagcatcatcctgataccaaagactggcagagacacaacaaaaaaagagaattttagaccaatatccttgatgaacattgatgcaaaaatcctcaataaaatactggcaaaccgaatccagcaacacatcaaaaagcttatctaccatgatcaagtgggcttcatccctgggatgcaaggctag

SEQ ID NO: 141220 - DNA, 1491 bp, Homo sapiens
atgtttcggaaggatgaagaactgacttcctcacagagggatttagctgtaaggaactgggcatggagcctagcccgtggtgagcgctcagcaaacatgcacgcagtacacacctcgcttctagtggaaaggacaatactgaccacgaccaaggaaagagggtctaccttgcaatatcccttaagacctggagctcataaaggattgcaagatattgttaaacgtttcaaagctcaagccttaataaggaaatgcagcagtccctgcaacaccccaattctaggagtacaaaaaccgaatggtcagtggagactagtgcaagatcttagacttatcaatgaggcagtaattcctctatatccagttgtacccaacccctataacctgctctctcaaataccagaggaagcagaatggttcactgttctggacctcaaggatgccttcttctgtattcccctgcactctgactcccagtttctctttgcctttgaggatcccacagaccacacgtcccaacttacgtggacggtcttgcccccagggtttagggatagccctcccctgtttggtcaggcactggcccaagatctaggccacttctcaagtccaggcactctggtccttcagtatgtggatgatttacttttggccaccagttcagaagcctcttgccagcaggctactctagatctcttgaactttctagctaatcaagggtacaagttgtctaggtcgaaggcccagctttgcctacagcagacattaaaacagttgaaggggttccttggaattaccggcttttgccaactatggatccctggatgcagcgagatagccaggctcctctatactccaatcaaggaaacccagagggcaaatactcatctagtagaatgggaaccagaggcagaaacagccttcaaaaccttaaagcaggtcctagtacaagctccagctttaagccttcctacaggacagaacttctctttatacgtcacagagagagccaggatagctcttggagtccttactcagactcgtgggacaaccccacaaccagtggcatacctaagtaaggaaattgatgtagtagcaaaaggctggcctcactgtttaagggtagttgcagcagtggccatcttagtgtcagaggctatcaaaataatacaaggaaaggatctcactgtctggagtactcatgatgtaaatggcacactaggtgccaaaggaagtttatggctatcagacaacaacctacttagataccaggcactactccttgagggaccagtgcttgaaatatgcatgtgcgtggccctcaaccctgccccttttctcccagaggatggggaaccaatcgagcatgactgccaacaaattatagtccagacttatgccgcccaagatgatctcttagaagtccccttaactaatcctgaccttaacctatataccaatggaagttcatttgtggaaaatgggatatga

SEQ ID NO: 141221 - DNA, 3215 bp, Homo sapiens
tcaataaattctctgcgctgttgtcaggctttgtttgccgtaatgtttaccggaatagtcagtgtagaataaacggatttttccgtcagatgtaaaggttgcagaaccggaccattcttgcgtctgatctttcaggatcggatcgttggcgtcgaacttatcgctgtctttaaagacacggcccgcgtttttccagctgtcgattgagttgtcgccgaccttttgataaaacatgtagattgatgtgtcatcagcgtctttcgggcttcccgcaagagcaaacacaacgtgatagccgttgtattcagctactgttccgtcagcgttttgcagcggccagctgtcccacacatcaagtccttttgcagactcaatatttttaatcgttgattgatcgaattgaggcacttggtatttttcgttttgctgctgtttagggatctgcagcatatcatggcgtgtaatatgagagacgccgtacgtttctttgtatgctttttggttattttctttcgcgaagcttgagtcgctcctccttcgtatcccattctccacaaatgaacttccatcggcatataggttaaggtcaggattagctaaggggacttctaagagatcatctcgggtggcataagtctggactataatttgttggctgtcatgctcgattggttcctcatcctcccaggagggtgtggtcgccatgatctcgtagtcgatagtggctccaagtagcgaagcgagcaggactgggcggcggccaaagcggatcggacagtgctccgagaacgggtgcgcatagaaattgcatcaacgcatatagcgctagcagcacgccatagtgactggcgatgctgtcggaatggacgatatcccgcaagaggcccggcagtaccggcataaccaagcctatgcctacagcatccagggtgacggtgccgaggatgacgatgagcgcattgttagatttcatacacggtcccaggagaaaaaggaagaagctatcaccttactgaaggattccatcaaatatggtccagagtttgcagatgcatattcaagcttagcttcgttattggctgagcaggcccctgaaggcctttgtccgttgtcgtcaggactaggtcggtctcgcccaatggcgacagagtggtcacccgggaaccggatctgcgcggctccgtggcctaaagaggtggccgagcctgcttgcgtccctaggccgccttcccgggccctccacgccttaatggcctccgccgcgcggcgttcaagcggccgccatactttccggcccaccacgcccggcgccgcccaaaggcgctgcgtcccagcgactctgcgggggtttcgtcgaggcccggcaggcttgggtcgggagacgcggcggccggcggggtcccgtcggggagacgcagccgccgccatcagtcatccagccgccctcccgcggggcagggctcgggaccagcagcccgccatgcctgagcctcccaccccctccgtgggctcctgtgcggcccgagcctcccagattagcgcggccccctgctccacggcgcccagtcccatcgaccacccaagggctgaggagtgccggcgcaccgtgtgggactggcaggcagctccacctgcagcccaggtgcgggatccattgggtgaagccagctgggctcctgagtctggtggagatgtggagaacctttatgtcttgctcagggattgtaaatacaccagtcagcaccctgtgtctagctcagggtctgtgaatgcaccaatcgacactctgtatctagctactctgctcagggattgtaaatacaccaatcggcactctgtatctagctcaaggtttgtaaacacaccaatcagcaccgtgtctagctcagagtttgcgaatgcaccaatcgacactctgcatctagctactctgaaggaagaaactccgaacacatctgaacatcagaaggaacaaactccggacatgccgcctttaagaactgtaacagtcacggcgagggtccgcggcttcattcttgacgtcagtgagaccaagaacccaccaattccagacacattttggcgacccagatgggaccttcgccaatcaccaagcaatcaaaccctggcgtttaatgaaaagaatgcggctttagctgcagcccaagagtttggagatacctggtatcttagtcaagtaaatgacagaatgacagccgaagaaagggacaaattcccgactgaatttattccttctagtgggttcttggtcttgctgacttcaagaatgaagccgcagacatttgcggcgagtgttacagctcttagagttggcgcgtccggagttgttcgttcctcccatccagagttgtttgtccctccagatgggttgatggtcttgctggcttcaggagtgaagctgcagaccttcgcgggaagcggcaggctgaagggctcctcaagcacagccagagtggatgccaaggccgaggaggtgccgagagacaccccaactgctattgggaatttggccaatgaccactctagctacttcctgctggataggggtgaagaaggggccctgcagttgtagtgtcctccagaggggaacttatccctgactggttagtgtaaaaacaacactctttccctgagaaggtgcagagtcctcctttctcagcagtgaggaggtctaggccttggcggttttggagagtcactgctgccaaagagttttcaagtacagttacatcactaactatggcataacctgcccttcgtatcccattctccacaaatgaacttccatcaatatataggttaaggtcaggattagctaaggggacttctaagagatcatctcgggcggcataaatctggactataatttgttggcagtcatgcttgattggttccccatcccttaaacagtgaagccagacttttgctactacatcaacttctttacttaggtatgccactggttgtggggttgtctcacgagtctgagtaaggattccaagagctatccctgctctctctgtgatgtataaaaagaagttttgtcctgtgggaaggcttaaagctggagcttgtactagggcctgctttaaggttttgaaggctgtttctgcctctggttcccattctactagatgagtatttgccctccgggtctccttgattagagtatagaggggcctggctatctcgct

SEQ ID NO: 141222 - DNA, 3747 bp, Homo sapiens
atggctccatgcatacgtgtgccccacaacgtgctcctcgtgccagctagcaggcatggacccaaacacatcttccccctgcccctcacacggcccccggagctgacagcccaaaggaatcagaaggaacttcgagacaagccaaaaggatcctggaggagagaaagaataggagaggccaagctcctctcccctgcgaaggtcatgaatttccgaaggctccaccctgccttcccagttggcagttttccttttaacaaccaccacactacacctctatcagcagccctaaaaagggaacaggttgaggacagagctgggacatggaggatggaaggacagaaagatggaaagaacctgttggttttcagaaaccagtaccccaaaatacgacatgctgaactgaagaacaagactcaaggtctctctgaccttccaccgtttcttccaaagaaactgaagttccattatctgcctaagatccagacctatcaaggagaacagttttcttcccctccctctcagaaggaaatcagcaaagaaatctccaaaggaccacaaaaacccctgggctatcggttatgtccccttcaagctgtaggaggaggggaatttggcccaacctgggtacatgtccctttctcactctctgatttaaagcagatcaaggcagacctggggaagttttcagatgatcctgataggtacacagatgtcctacagggtctagggcaaacctttgatttcacttggagagatgtcatgctattgttagatcaaaccctggcctttaatgaaaagaatgcagctttagctgcagcccaagagtttggagatacctggtatcttagtcaagtaaatgatagaatgacagctgaagaaagggacaaattccctaccagtcagcaagccatccccagtatggatccccactgggacctcggctcagatcatggggactggagtcacaaacatctgttgacccacgttctagaaggactaaggagaattaggaaaaagcccatgaattgttcaatgatgtctaccataactcagggaaaggaagaaaatccttctgtcttcctcaagcggctatgggaggccttaagaaaatatactctcctgtcactctactcacttaagggtcagttgatcctaaaagataagcttattacccaatcagccacagaaatcaggagaaagctgcaaaaggaccaagaggaacaggcccaaaaggaaaagcaagatcagagaaaggccacagccttagtcatggccctcagacaaatgaaccttggtggttcagagaggacagaaaatggagcagaccagtcacctggtagggcttgttatcagtgtggtttacaaggaaactttaaaatagattgtccacagacacaagctgccccctcggccatgtccactatgccaagtttacccaacccctataccctgctctctcaaataccagaggaagcagaatggttcacagttctggacctcaaggatgacttcttctgtaatcccctgcactctgacttccagattctctttgcctttgaggatcccacagaccacaaatctgaacttatgtggacagtcttgccccaagggtttagggatagccctcacctgtttgttcaggtactggcccaagatctgagccacttctcaagttcaggcactctggtccttcagcatgtggatgatttacttttggctaccagtttagaagcctcatgccagcaggctcctctagatctcttgaactttctacctaatcaaggatacagcaagatagccaggcccctctatactctaatcaaggagacccagagggcaaatacttatctagtagaatgggaaccaggggcagaaacagccttcaaaaccttaaagcaggccctagtacaagctccagctttaagccttcccacaggacaaaacttctctttgtacatcacagagagagcaggaatagcttttggagtccttactcagactcgtgggacaaccccacaaccagtggtatacctaaaggatggggaaccaatcgagcatgactaccaacaaattatagcccagacttatgccacccaagatgatctcttagaagtccccttagctaatcctgaccttaacctatataccgatggaagttcatttgtggtgaacgggatacgaagggcaggttatgccatagttagtaatgtaactgttcttgaaattaaggtggcaggagtggaatcttggattcaccacacccaagttaaattttggacaccccctgaggaacctgtggggccgtcagctcaggagtcccaagatcagccagagcagcctcaatatacctgcaaactgttggaggacttgcatctcctattttggaaggaaacatcccagactgaaaagagagctcccctctggaggatactacaactgcagggccccttcttcacccctatccagcaggaagtagctacagcagtcattgcccaattcccaacagcagttggggtgtcctgtttagagaggggattgagagtggaaacatgggaaccagaggacaggtctccttcgagggtggagaaagcacggaagcagctggaagctcagcacagagaaagaacgtacctttgcaagcagagtcggatgggcatttctaactgcactgcaggaagtacatgctcagtgccacaggtaagggaccttccggagcaagccgcatgcctgggggcccaagtgcacagctttgagcaggacctgggggtgagagacctccaggcgcaagcagggtacttggaggcccagataaacagcctggaacaggagttagcaagagctgttagtgcgaccttgagccggtccttcaggcaggacactccctttaggtctgatgctgaggaggaggaggctcctccgctgcaggctcctcctgtgatccgtcagaagctgcagctgtgccaacggttggcacaagagcaaggtggccacacattaatcaagtggctaatgacagtcatatggactgttttcaatgatgccagagagatactacaaacttatgtggggtgccgcatacatgaagtgactactgctctggcagccctcagggaggcagaaggccattcgcaggaccggagaatccgcaccgtaaggagggagaaaatgcctcatccgcagttaaccaccccaccagataaaaaggggctccaggagggggaactagacaaccagaggctatatgtggagctggcaatccactggtcccccactaatgtaccgcgggtcctagcactgatagatactggtgcagactgcagtctagtttatgggaacccagataaatttctaggcaaagctgcatttatggacggttatgggagccagtcggtgaaggttacttccactcatcagtaccgtttgccaggggggaatacagaggtaactgagactattaagaagttagaggaggtgcaaatagtgtgtggcatccatagcccctaccattttccattatggccagtcagaaagcctgatgggatttggcagataacagtggattatcggaaactgaataaagtaatactccttctgcatgtatctgtaccttctatcatggatttgatgaacttcttgacaacagaactgagacaatgccactatgtggtggaattgaccaatgcattcctctcagtcgacattgttccagagaggcaggaacagtttgctttcatgggagggtga

SEQ ID NO: 141223 - DNA, 499 bp, Homo sapiens; identical to SEQ ID NO: 128768
  misc_feature (1)...(499): n = a,t,c or g

SEQ ID NO: 141224 - DNA, 428 bp, Homo sapiens
gtgtccaagtcacacagagccacggaatctcacaggtgtctcagaattcctcctcctgggactctcagaggatccagaactgcagcctgtcctccctgggctgtccctgtccatgtatctgctcacggtgctgaggaacctgctcatcatcctggctgtcagctctgactcccacctccacacccccatgtacttcttcctctccaacccgtcatgggctgacatcgctttcacctcggccacagttcccaagatgattgtggacatgcagagtggtgtggtggtgtcagtgatgtacactgtggtcacccccatgctgaaccctttcatctactgcctgagaaacagggacattcaaagcgccctgtggaggctgcgcagcagaacagtcgaatctcatgatctgttccatcctttttcttgtgtgg

SEQ ID NO: 141225 - DNA, 535 bp, Homo sapiens
tatctaaagtaggtatgtacagaaagagttgaatagcaaaagtgtaaatcatgtaatcattgtgagatttttgggtttgtcacaactgagaaatattgctgatggtggatggtcctcaagtgtgaaaatgttccttgtgaattgcttgtatccaaaatatacacacagcattaagggctggtttttattttttattttttccaatcctcttttcttctcaaggtgtccaagtcacacagaaccacagaatctcacaggtgtctcagaattccttctcctgggactctcagaggatccagaactgcagcctgtcctcgctgtgctgtccttgtccatttacctggtcacagtgctggggaacctgctcatcatcctggctgtcagctctgactcccacctccacacccccatatacttcttcctcttcaacctgtccttggctgacattggtttcacctcggccatggttcccaagatgattgtggacatgcaatcgcatagcagagtcatctcttatgcgggctgcctgacatag
